(19) United States
(12) Patent Application Publication
(10) Pub. No.: US 2024/0218339 A1
(43) Pub. Date: Jul. 4, 2024

(54) CLASS II, TYPE V CRISPR SYSTEMS

(71) Applicant: Metagenomi, Inc., Emeryville, CA (US)

(72) Inventors: Brian THOMAS, Berkeley, CA (US); Christopher BROWN, Albany, CA (US); Audra DEVOTO, Emeryville, CA (US); Cristina BUTTERFIELD, Oakland, CA (US); Lisa ALEXANDER, Albany, CA (US); Daniela S.A. GOLTSMAN, Oakland, CA (US)

(21) Appl. No.: 18/524,511

(22) Filed: Nov. 30, 2023

Related U.S. Application Data
(63) Continuation of application No. PCT/US22/31849, filed on Jun. 1, 2022.
(60) Provisional application No. 63/196,127, filed on Jun. 2, 2021.
(60) Provisional application No. 63/233,653, filed on Aug. 16, 2021.
(60) Provisional application No. 63/261,436, filed on Sep. 21, 2021.
(60) Provisional application No. 63/262,169, filed on Oct. 6, 2021.
(60) Provisional application No. 63/280,026, filed on Nov. 16, 2021.
(60) Provisional application No. 63/299,664, filed on Jan. 14, 2022.
(60) Provisional application No. 63/308,766, filed on Feb. 10, 2022.
(60) Provisional application No. 63/323,014, filed on Mar. 23, 2022.
(60) Provisional application No. 63/331,076, filed on Apr. 14, 2022.

(51) Int. Cl. C12N 9/22; C12N 15/11

(52) U.S. Cl. CPC C12N 9/22; C12N 15/111; C12N 2310/20

(57) ABSTRACT

Described herein are methods, compositions, and systems derived from uncultivated microorganisms useful for gene editing.

### CROSS-REFERENCE

[0001] This application is a continuation of International Application No. PCT/US2022/031849, filed Jun. 1, 2022, which claims the benefit of U.S. Provisional Application Nos: 63/196,127, filed Jun. 2, 2021; 63/233,653, filed Aug. 16, 2021; 63/261,436, filed Sep. 21, 2021; 63/262,169, filed Oct. 6, 2021; 63/280,026, filed Nov. 16, 2021; 63/299,664, filed Jan. 14, 2022; 63/308,766, filed Feb. 10, 2022; 63/323,014, filed Mar. 23, 2022; and 63/331,076, filed Apr. 14, 2022; each of which is incorporated by reference herein in their entireties. This application is related to PCT Application No. PCT/US21/21259, which is incorporated by reference herein in its entirety.

### BACKGROUND

[0002] Cas enzymes along with their associated Clustered Regularly Interspaced Short Palindromic Repeats (CRISPR) guide ribonucleic acids (RNAs) appear to be a pervasive (˜45% of bacteria, ˜84% of archaea) component of prokaryotic immune systems, serving to protect such microorganisms against non-self nucleic acids, such as infectious viruses and plasmids by CRISPR-RNA guided nucleic acid cleavage. While the deoxyribonucleic acid (DNA) elements encoding CRISPR RNA elements may be relatively conserved in structure and length, their CRISPR-associated (Cas) proteins are highly diverse, containing a wide variety of nucleic acid-interacting domains. While CRISPR DNA elements have been observed as early as 1987, the programmable endonuclease cleavage ability of CRISPR/Cas complexes has only been recognized relatively recently, leading to the use of recombinant CRISPR/Cas systems in diverse DNA manipulation and gene editing applications.

### SEQUENCE LISTING

[0003] The instant application contains a Sequence Listing which has been submitted electronically in XML file format and is hereby incorporated by reference in its entirety. Said XML copy, created on Nov. 17, 2023, is named 55921-728_301_SL.xml and is 14,699,770 bytes in size.

### SUMMARY

[0004] In some aspects, the present disclosure provides for an engineered nuclease system comprising: (a) an endonuclease comprising a RuvC domain, wherein the endonuclease is derived from an uncultivated microorganism, and wherein the endonuclease is a Cas12a endonuclease; and (b) an engineered guide RNA, wherein the engineered guide RNA is configured to form a complex with the endonuclease and the engineered guide RNA comprises a spacer sequence configured to hybridize to a target nucleic acid sequence. In some embodiments, the Cas12a endonuclease comprises the sequence GWxxxK. In some embodiments, the engineered guide RNA comprises UCUAC[N₃₋₅]GUAGAU (N₄). In some embodiments, the engineered guide RNA comprises CCUGC[N₄]GCAGG (N₃₋₄). In some aspects, the present disclosure provides for an engineered nuclease system comprising: (a) an endonuclease having at least 75% sequence identity to any one of SEQ ID NOs: 1-3470 or a variant thereof; and (b) an engineered guide RNA, wherein the engineered guide RNA is configured to form a complex with the endonuclease and the engineered guide RNA comprises a spacer sequence configured to hybridize to a target nucleic acid sequence. In some embodiments, the endonuclease comprises a RuvCI, II, or III domain. In some embodiments, the endonuclease has at least about 20%, at least about 25%, at least about 30%, at least about 35%, at least about 40%, at least about 45%, at least about 50%, at least about 55%, at least about 60%, at least about 65%, at least about 70%, at least about 75%, at least about 80%, at least about 85%, at least about 90%, at least about 91%, at least about 92%, at least about 93%, at least about 94%, at least about 95%, at least about 96%, at least about 97%, at least about 98%, at least about 99% identity to a RuvCI, II, or III domain of any one of SEQ ID NOs: 1-3470 or a variant thereof. In some embodiments, the RuvCI domain comprises a D catalytic residue. In some embodiments the RuvCII domain comprises an E catalytic residue. In some embodiments the RuvCIII domain comprises a D catalytic residue. In some embodiments, said RuvC domain does not have nuclease activity. In some embodiments, said endonuclease further comprises a WED II domain having at least about 20%, at least about 25%, at least about 30%, at least about 35%, at least about 40%, at least about 45%, at least about 50%, at least about 55%, at least about 60%, at least about 65%, at least about 70%, at least about 75%, at least about 80%, at least about 85%, at least about 90%, at least about 91%, at least about 92%, at least about 93%, at least about 94%, at least about 95%, at least about 96%, at least about 97%, at least about 98%, at least about 99% identity to a WED II domain of any one of SEQ ID NOs: 1-3470 or a variant thereof. In some aspects, the present disclosure provides for an engineered nuclease system comprising: (a) an endonuclease configured to bind to a protospacer adjacent motif (PAM) sequence comprising any one of SEQ ID NOs: 3890-3913 or any one of Sequence Numbers: A3863-A3889, wherein the endonuclease is a class 2, type V Cas endonuclease; and (b) an engineered guide RNA, wherein the engineered guide RNA is configured to form a complex with the endonuclease and the engineered guide RNA comprises a spacer sequence configured to hybridize to a target nucleic acid sequence. In some embodiments, the endonuclease further comprises a zinc finger-like domain. In some embodiments, the guide RNA comprises a sequence with at least 80% sequence identity to the non-degenerate nucleotides of any one of SEQ ID NOs: 3471, 3551-3559, 3608-3609, 3612, 3636-3637, 3640-3641, 3644-3645, 3648-3649, 3652-3653, 3656-3657, 3660-3661, 3664-3667, 3671-3672, 3678, 3695-3696, 3729-3730, 3734-3735, and 3851-3857. In some aspects, the present disclosure provides for an engineered nuclease system comprising: (a) an engineered guide RNA comprising a sequence with at least 80% sequence identity to the non-degenerate nucleotides of any one of SEQ ID NOs: 3471, 3551-3559, 3608-3609, 3612, 3636-3637, 3640-3641, 3644-3645, 3648-3649, 3652-3653, 3656-3657, 3660-3661, 3664-3667, 3671-3672, 3678, 3695-3696, 3729-3730, 3734-3735, or 3851-3857, and (b) a class 2, type V Cas endonuclease configured to bind to the engineered guide RNA. In some embodiments, the endonuclease is configured to bind to a protospacer adjacent motif (PAM) sequence comprising any one of Sequence Numbers A3863-A3889 or any one of SEQ ID NOs: 3890-3913. In some embodiments, the guide RNA comprises a sequence complementary to a eukaryotic, fungal, plant, mammalian, or human genomic polynucleotide sequence. In some embodiments, the guide RNA is 30-250 nucleotides in length. In some embodiments, the endonuclease comprises one or more nuclear localization sequences (NLSs) proximal to an N- or C-terminus of the endonuclease. In some embodiments, the NLS comprises a sequence at least 80% identical to a sequence from the group consisting of SEQ ID NO: 3938-3953. In some embodiments, the endonuclease comprises at least one of the following mutations: S168R, E172R, N577R, or Y170R when a sequence of the endonuclease is optimally aligned to SEQ ID NO: 215. In some embodiments, the endonuclease comprises the mutations S168R and E172R when a sequence of the endonuclease is optimally aligned to SEQ ID NO: 215. In some embodiments, the endonuclease comprises the mutations N577R or Y170R when a sequence of the endonuclease is optimally aligned to SEQ ID NO: 215. In some embodiments, the endonuclease comprises the mutation S168R when a sequence of the endonuclease is optimally aligned to SEQ ID NO: 215. In some embodiments, the endonuclease does not comprise a mutation of E172, N577, or Y170. In some embodiments, the engineered nuclease system further comprises
[0005] a single- or double-stranded DNA repair template comprising from 5′ to 3′: a first homology arm comprising a sequence of at least 20 nucleotides 5′ to the target deoxyribonucleic acid sequence, a synthetic DNA sequence of at least 10 nucleotides, and a second homology arm comprising a sequence of at least 20 nucleotides 3′ to the target sequence. In some embodiments, the first or second homology arm comprises a sequence of at least 40, 80, 120, 150, 200, 300, 500, or 1,000 nucleotides. In some embodiments, the first and second homology arms are homologous to a genomic sequence of a prokaryote, bacteria, fungus, or eukaryote. In some embodiments, the single- or double-stranded DNA repair template comprises a transgene donor. In some embodiments, the engineered nuclease system further comprises a DNA repair template comprising a double-stranded DNA segment flanked by one or two single-stranded DNA segments. In some embodiments, single-stranded DNA segments are conjugated to the 5′ ends of the double-stranded DNA segment. In some embodiments, the single stranded DNA segments are conjugated to the 3′ ends of the double-stranded DNA segment. In some embodiments, the single-stranded DNA segments have a length from 4 to 10 nucleotide bases. In some embodiments, the single-stranded DNA segments have a nucleotide sequence complementary to a sequence within the spacer sequence. In some embodiments, the double-stranded DNA sequence comprises a barcode, an open reading frame, an enhancer, a promoter, a protein-coding sequence, a miRNA coding sequence, an RNA coding sequence, or a transgene. In some embodiments, the double-stranded DNA sequence is flanked by a nuclease cut site. In some embodiments, the nuclease cut site comprises a spacer and a PAM sequence. In some embodiments, the system further comprises a source of Mg²⁺. In some embodiments, the guide RNA comprises a hairpin comprising at least 8, at least 10, or at least 12 base-paired ribonucleotides. In some embodiments, the hairpin comprises 10 base-paired ribonucleotides. In some embodiments: (a) the endonuclease comprises a sequence at least 75%, 80%, or 90% identical to any one of SEQ ID NOs: 141, 215, 229, 261, or 1711-1721 or a variant thereof; and (b) the guide RNA structure comprises a sequence at least 80%, or 90% identical to the non-degenerate nucleotides of any one of SEQ ID NOs: 3608-3609, 3853, or 3851-3857. In some embodiments, the endonuclease is configured to bind to a PAM comprising any one of Sequence Numbers A3863-A3889 or any one of SEQ ID NOs: 3890-3913. In some embodiments, the endonuclease is configured to bind to a PAM comprising the sequence of YYn. In some embodiments, the sequence identity is determined by a BLASTP, CLUSTALW, MUSCLE, MAFFT algorithm, or a CLUSTALW algorithm with the Smith-Waterman homology search algorithm parameters. In some embodiments, the sequence identity is determined by the BLASTP homology search algorithm using parameters of a wordlength (W) of 3, an expectation (E) of 10, and a BLOSUM62 scoring matrix setting gap costs at existence of 11, extension of 1, and using a conditional compositional score matrix adjustment.

[0006] In some aspects, the present disclosure provides for an engineered guide RNA comprising: (a) a DNA-targeting segment comprising a nucleotide sequence that is complementary to a target sequence in a target DNA molecule; and (b) a protein-binding segment comprising two complementary stretches of nucleotides that hybridize to form a double-stranded RNA (dsRNA) duplex, wherein the two complementary stretches of nucleotides are covalently linked to one another with intervening nucleotides, and wherein the engineered guide ribonucleic acid polynucleotide is capable of forming a complex with an endonuclease having at least 75% sequence identity to any one of SEQ ID NOs: 1-3470, and targeting the complex to the target sequence of the target DNA molecule. In some embodiments, the DNA-targeting segment is positioned 3′ of both of the two complementary stretches of nucleotides. In some embodiments, the protein binding segment comprises a sequence having at least 70%, at least 80%, or at least 90% identity to the non-degenerate nucleotides of SEQ ID NO: 3608-3609. In some embodiments, the double-stranded RNA (dsRNA) duplex comprises at least 5, at least 8, at least 10, or at least 12 ribonucleotides.

[0007] In some aspects, the present disclosure provides for a deoxyribonucleic acid polynucleotide encoding the engineered guide ribonucleic acid polynucleotide described herein.

[0008] In some aspects, the present disclosure provides for a nucleic acid comprising an engineered nucleic acid sequence optimized for expression in an organism, wherein the nucleic acid encodes a class 2, type V Cas endonuclease, and wherein the endonuclease is derived from an uncultivated microorganism, wherein the organism is not the uncultivated organism. In some embodiments, the endonuclease comprises a variant having at least 70% or at least 80% sequence identity to any one of SEQ ID NOs: 1-3470. In some embodiments, the endonuclease comprises a sequence encoding one or more nuclear localization sequences (NLSs) proximal to an N- or C-terminus of the endonuclease. In some embodiments, the NLS comprises a sequence selected from SEQ ID NOs: 3938-3953. In some embodiments, the NLS comprises SEQ ID NO: 3939. In some embodiments, the NLS is proximal to the N-terminus of the endonuclease. In some embodiments, the NLS comprises SEQ ID NO: 3938. In some embodiments, the NLS is proximal to the C-terminus of the endonuclease. In some embodiments, the organism is prokaryotic, bacterial, eukaryotic, fungal, plant, mammalian, rodent, or human.

[0009] In some aspects, the present disclosure provides for an engineered vector comprising a nucleic acid sequence encoding a class 2, type V Cas endonuclease or a Cas12a endonuclease, wherein the endonuclease is derived from an uncultivated microorganism.

[0010] In some aspects, the present disclosure provides for an engineered vector comprising a nucleic acid described herein.

[0011] In some aspects, the present disclosure provides for an engineered vector comprising a deoxyribonucleic acid polynucleotide described herein. In some embodiments, the vector is a plasmid, a minicircle, a CELiD, an adeno-associated virus (AAV) derived virion, a lentivirus, or an adenovirus.

[0012] In some aspects, the present disclosure provides for a cell comprising a vector described herein.

[0013] In some aspects, the present disclosure provides for a method of manufacturing an endonuclease, comprising cultivating any of the host cells described herein.

[0014] In some aspects, the present disclosure provides for a method for binding, cleaving, marking, or modifying a double-stranded deoxyribonucleic acid polynucleotide, comprising: (a) contacting the double-stranded deoxyribonucleic acid polynucleotide with a class 2, type V Cas endonuclease in complex with an engineered guide RNA configured to bind to the endonuclease and the double-stranded deoxyribonucleic acid polynucleotide; (b) wherein the double-stranded deoxyribonucleic acid polynucleotide comprises a protospacer adjacent motif (PAM); and (c) wherein the PAM comprises a sequence comprising any one of Sequence Numbers A3863-A3889 or any one of SEQ ID NOs: 3890-3913. In some embodiments, the double-stranded deoxyribonucleic acid polynucleotide comprises a first strand comprising a sequence complementary to a sequence of the engineered guide RNA and a second strand comprising the PAM. In some embodiments, the PAM is directly adjacent to the 5′ end of the sequence complementary to the sequence of the engineered guide RNA. In some embodiments, the PAM comprises a sequence of YYn. In some embodiments, the class 2, type V Cas endonuclease is derived from an uncultivated microorganism. In some embodiments, the double-stranded deoxyribonucleic acid polynucleotide is a eukaryotic, plant, fungal, mammalian, rodent, or human double-stranded deoxyribonucleic acid polynucleotide. In some embodiments, the method comprising delivering to the target nucleic acid locus the engineered nuclease system described herein, wherein the endonuclease is configured to form a complex with the engineered guide ribonucleic acid structure, and wherein the complex is configured such that upon binding of the complex to the target nucleic acid locus, the complex modifies the target nucleic acid locus. In some embodiments, modifying the target nucleic acid locus comprises binding, nicking, cleaving, or marking the target nucleic acid locus. In some embodiments, the target nucleic acid locus comprises deoxyribonucleic acid (DNA) or ribonucleic acid (RNA). In some embodiments, the target nucleic acid comprises genomic DNA, viral DNA, viral RNA, or bacterial DNA. In some embodiments, the target nucleic acid locus is in vitro. In some embodiments, the target nucleic acid locus is within a cell. In some embodiments, the cell is a prokaryotic cell, a bacterial cell, a eukaryotic cell, a fungal cell, a plant cell, an animal cell, a mammalian cell, a rodent cell, a primate cell, a human cell, or a primary cell. In some embodiments, the cell is a primary cell. In some embodiments, the primary cell is a T cell. In some embodiments, the primary cell is a hematopoietic stem cell (HSC). In some embodiments, delivering the engineered nuclease system to the target nucleic acid locus comprises delivering the nucleic acid described herein or the vector described herein. In some embodiments, delivering the engineered nuclease system to the target nucleic acid locus comprises delivering a nucleic acid comprising an open reading frame encoding the endonuclease. In some embodiments, the nucleic acid comprises a promoter to which the open reading frame encoding the endonuclease is operably linked. In some embodiments, delivering the engineered nuclease system to the target nucleic acid locus comprises delivering a capped mRNA containing the open reading frame encoding the endonuclease. In some embodiments, delivering the engineered nuclease system to the target nucleic acid locus comprises delivering a translated polypeptide. In some embodiments, delivering the engineered nuclease system to the target nucleic acid locus comprises delivering a deoxyribonucleic acid (DNA) encoding the engineered guide RNA operably linked to a ribonucleic acid (RNA) pol III promoter. In some embodiments, the endonuclease induces a single-stranded break or a double-stranded break at or proximal to the target locus. In some embodiments, the endonuclease induces a staggered single stranded break within or 3′ to the target locus.

[0015] In some aspects, the present disclosure provides for a method of editing a TRAC locus in a cell, comprising contacting to the cell (a) an RNA-guided endonuclease; and (b) an engineered guide RNA, wherein the engineered guide RNA is configured to form a complex with the endonuclease and the engineered guide RNA comprises a spacer sequence configured to hybridize to a region of the TRAC locus, wherein the engineered guide RNA comprises a targeting sequence having at least 85% identity at least 18 consecutive nucleotides of any one of SEQ ID NOs: 4316-4369. In some embodiments, the RNA-guided nuclease is a Cas endonuclease. In some embodiments, the Cas endonuclease is a class 2, type V Cas endonuclease. In some embodiments, the class 2, type V Cas endonuclease comprises a RuvC domain comprising a RuvCI subdomain, a RuvCII subdomain, and a RuvCIII subdomain. In some embodiments, the class 2, type V Cas endonuclease comprises an endonuclease having at least 75% sequence identity to any one of SEQ ID NOs: 1-3470 or a variant thereof. In some embodiments, the engineered guide RNA further comprises a sequence with at least 80% sequence identity to at least 19 of the non-degenerate nucleotides of any one of SEQ ID NOs: 3471, 3551-3559, 3608-3609, 3612, 3636-3637, 3640-3641, 3644-3645, 3648-3649, 3652-3653, 3656-3657, 3660-3661, 3664-3667, 3671-3672, 3678, 3695-3696, 3729-3730, 3734-3735, and 3851-3857. In some embodiments, the endonuclease comprises a sequence at least 75%, 80%, or 90% identical to any one of SEQ ID NOs: 141, 215, 229, 261, or 1711-1721 or a variant thereof. In some embodiments, the guide RNA structure comprises a sequence at least 80%, or at least 90% identical to at least 19 of the non-degenerate nucleotides of any one of SEQ ID NOs: 3608-3609, 3853, or 3851-3857. In some embodiments, the method further comprises contacting to the cell or introducing to the cell a donor nucleic acid comprising a cargo sequence flanked on a 3′ or 5′ end by sequence having at least 80% identity to any one of SEQ ID NOs: 4424 or 4425. In some embodiments, the cell is a peripheral blood mononuclear cell (PBMC). In some embodiments, the cell is a T-cell or a precursor thereof or a hematopoietic stem cell (HSC). In some embodiments, the cargo sequence comprises a sequence encoding a T-cell receptor polypeptide, a CAR-T polypeptide, or a fragment or derivative thereof. In some embodiments, the engineered guide RNA comprises a sequence having at least 80% identity to any one of SEQ ID NOs:4370-4423. In some embodiments, the engineered guide RNA comprises the nucleotide sequence of sgRNAs 1-54 from Table 5A comprising the corresponding chemical modifications listed in Table 5A. In some embodiments, the engineered guide RNA comprises a targeting sequence having at least 80% sequence identity to any one of SEQ ID NOs: 4334, 4350, or 4324. In some embodiments, the engineered guide RNA comprises a sequence having at least 80% sequence identity to any one of SEQ ID NOs: 4388, 4404, or 4378. In some embodiments, the engineered guide RNA comprises the nucleotide sequence of sgRNAs 9, 35, or 19 from Table 5A.

[0016] In some aspects, the present disclosure provides for an engineered nuclease system comprising: (a) an RNA-guided endonuclease; and (b) an engineered guide RNA, wherein the engineered guide RNA is configured to form a complex with the endonuclease and the engineered guide RNA comprises a spacer sequence configured to hybridize to a target nucleic acid sequence, wherein the engineered guide RNA comprises at least one of the following modifications: (i) a 2′-O methyl or a 2′-fluoro base modification of at least one nucleotide within the first 4 bases of the 5′ end of the engineered guide RNA or the last 4 bases of a 3′ end of the engineered guide RNA; (ii) a thiophosphate (PS) linkage between at least 2 of the first five bases of a 5′ end of the engineered guide RNA, or a thiophosphate linkage between at least two of the last five bases of a 3′ end of the engineered guide RNA; (iii) a thiophosphate linkage within a 3′ stem or a 5′ stem of the engineered guide RNA; (iv) a 2′-O methyl or 2′base modification within a 3′ stem or a 5′ stem of the engineered guide RNA; (v) a 2′-fluoro base modification of at least 7 bases of a spacer region of the engineered guide RNA; and (vi) a thiophosphate linkage within a loop region of the engineered guide RNA. In some embodiments, the engineered guide RNA comprises a 2′-O methyl or a 2′-fluoro base modification of at least one nucleotide within the first 5 bases of a 5′ end of the engineered guide RNA or the last 5 bases of a 3′ end of the engineered guide RNA. In some embodiments, the engineered guide RNA comprises a 2′-O methyl or a 2′-fluoro base modification at a 5′ end of the engineered guide RNA or a 3′ end of the engineered guide RNA. In some embodiments, the engineered guide RNA comprises a thiophosphate (PS) linkage between at least 2 of the first five bases of a 5′ end of the engineered guide RNA, or a thiophosphate linkage between at least two of the last five bases of a 3′ end of the engineered guide RNA. In some embodiments, the engineered guide RNA comprises a thiophosphate linkage within a 3′ stem or a 5′ stem of the engineered guide RNA. In some embodiments, the engineered guide RNA comprises a 2′-O methyl base modification within a 3′ stem or a 5′ stem of the engineered guide RNA. In some embodiments, the engineered guide RNA comprises a 2′-fluoro base modification of at least 7 bases of a spacer region of the engineered guide RNA. In some embodiments, the engineered guide RNA comprises a thiophosphate linkage within a loop region of the engineered guide RNA. In some embodiments, the engineered guide RNA comprises at least three 2′-O methyl or 2′-fluoro bases at the 5′ end of the engineered guide RNA, two thiophosphate linkages between the first 3 bases of the 5′ end of the engineered guide RNA, at least 4 2′-O methyl or 2′-fluoro bases at the 4′ end of the engineered guide RNA, and three thiophosphate linkages between the last three bases of the 3′ end of the engineered guide RNA. In some embodiments, the engineered guide RNA comprises at least two 2′-O-methyl bases and at least two thiophosphate linkages at a 5′ end of the engineered guide RNA and at least one 2′-O-methyl bases and at least one thiophosphate linkage at a 3′ end of the engineered guide RNA. In some embodiments, the engineered guide RNA comprises at least one 2′-O-methyl base in both the 3′ stem or the 5′ stem region of the engineered guide RNA. In some embodiments, the engineered guide RNA comprises at least one to at least fourteen 2′-fluoro bases in the spacer region excluding a seed region of the engineered guide RNA. In some embodiments, the engineered guide RNA comprises at least one 2′-O-methyl base in the 5′ stem region of the engineered guide RNA and at least one to at least fourteen 2′-fluoro bases in the spacer region excluding a seed region of the guide RNA. In some embodiments, the guide RNA comprises a spacer sequence targeting a VEGF-A gene. In some embodiments, the guide RNA comprises a spacer sequence having at least 80% identity to SEQ ID NO: 3985. In some embodiments, the guide RNA comprises the nucleotides of guide RNAs 1-7 from Table 7 comprising the chemical modifications listed in Table 7. In some embodiments, the RNA-guided nuclease is a Cas endonuclease. In some embodiments, the Cas endonuclease is a class 2, type V Cas endonuclease. In some embodiments, the class 2, type V Cas endonuclease comprises a RuvC domain comprising a RuvCI subdomain, a RuvCII subdomain, and a RuvCIII subdomain. In some embodiments, the class 2, type V Cas endonuclease comprises an endonuclease having at least 75% sequence identity to any one of SEQ ID NOs: 1-3470 or a variant thereof. In some embodiments, the class 2, type V Cas endonuclease comprises an endonuclease having at least 75% sequence identity to any one of SEQ ID NOs: 141, 215, 229, 261, or 1711-1721 or a variant thereof. In some embodiments, the engineered guide RNA comprises a sequence with at least 80% sequence identity to the non-degenerate nucleotides of any one of SEQ ID NOs: 3471, 3551-3559, 3608-3609, 3612, 3636-3637, 3640-3641, 3644-3645, 3648-3649, 3652-3653, 3656-3657, 3660-3661, 3664-3667, 3671-3672, 3678, 3695-3696, 3729-3730, 3734-3735, and 3851-3857. In some embodiments, the engineered guide RNA comprises a sequence with at least 80% sequence identity to the non-degenerate nucleotides of any one of SEQ ID NOs: 3608-3609, 3853, or 3851-3857.

[0017] In some aspects, the present disclosure provides for a host cell comprising an open reading frame encoding a heterologous endonuclease having at least 75% sequence identity to any one of SEQ ID NOs: 1-3470 or a variant thereof. In some embodiments, the endonuclease has at least 75% sequence identity to any one of SEQ ID NOs: 141, 215, 229, 261, or 1711-1721, or a variant thereof. In some embodiments, the host cell is an E. coli cell or a mammalian cell. In some embodiments, the host cell is an E. coli cell, wherein the E. coli cell is a λDE3 lysogen or the E. coli cell is a BL21(DE3) strain. In some embodiments, the E. coli cell has an ompT Ion genotype. In some embodiments, the open reading frame is operably linked to a T7 promoter sequence, a T7-lac promoter sequence, a lac promoter sequence, a tac promoter sequence, a trc promoter sequence, a ParaBAD promoter sequence, a PrhaBAD promoter sequence, a T5 promoter sequence, a cspA promoter sequence, an araPBAD promoter, a strong leftward promoter from phage lambda (pL promoter), or any combination thereof. In some embodiments, the open reading frame comprises a sequence encoding an affinity tag linked in-frame to a sequence encoding the endonuclease. In some embodiments, the affinity tag is an immobilized metal affinity chromatography (IMAC) tag. In some embodiments, the IMAC tag is a polyhistidine tag. In some embodiments, the affinity tag is a myc tag, a human influenza hemagglutinin (HA) tag, a maltose binding protein (MBP) tag, a glutathione S-transferase (GST) tag, a streptavidin tag, a FLAG tag, or any combination thereof. In some embodiments, the affinity tag is linked in-frame to the sequence encoding the endonuclease via a linker sequence encoding a protease cleavage site. In some embodiments, the protease cleavage site is a tobacco etch virus (TEV) protease cleavage site, a PreScission® protease cleavage site, a Thrombin cleavage site, a Factor Xa cleavage site, an enterokinase cleavage site, or any combination thereof. In some embodiments, the open reading frame is codon-optimized for expression in the host cell. In some embodiments, the open reading frame is provided on a vector. In some embodiments, the open reading frame is integrated into a genome of the host cell.

[0018] In some aspects, the present disclosure provides for a culture comprising any of the host cells described herein in compatible liquid medium.

[0019] In some aspects, the present disclosure provides for a method of producing an endonuclease, comprising cultivating any of the host cells described herein in compatible growth medium. In some embodiments, the method further comprises inducing expression of the endonuclease. In some embodiments, the inducing expression of the nuclease is by addition of an additional chemical agent or an increased amount of a nutrient, or by temperature increase or decrease. In some embodiments, an additional chemical agent or an increased amount of a nutrient comprises Isopropyl β-D-1-thiogalactopyranoside (IPTG) or additional amounts of lactose. In some embodiments, the method further comprises isolating the host cell after the cultivation and lysing the host cell to produce a protein extract. In some embodiments, the method further comprises isolating the endonuclease. In some embodiments, the isolating comprises subjecting the protein extract to IMAC, ion-exchange chromatography, anion exchange chromatography, or cation exchange chromatography. In some embodiments, the open reading frame comprises a sequence encoding an affinity tag linked in-frame to a sequence encoding the endonuclease. In some embodiments, the affinity tag is linked in-frame to the sequence encoding the endonuclease via a linker sequence encoding protease cleavage site. In some embodiments, the protease cleavage site comprises a tobacco etch virus (TEV) protease cleavage site, a PreScission® protease cleavage site, a Thrombin cleavage site, a Factor Xa cleavage site, an enterokinase cleavage site, or any combination thereof. In some embodiments, the method further comprises cleaving the affinity tag by contacting a protease corresponding to the protease cleavage site to the endonuclease. In some embodiments, the affinity tag is an IMAC affinity tag. In some embodiments, the method further comprises performing subtractive IMAC affinity chromatography to remove the affinity tag from a composition comprising the endonuclease.

[0020] In some aspects, the present disclosure provides for a system comprising (a) a class 2, Type V-A Cas endonuclease configured to bind a 3- or 4-nucleotide PAM sequence, wherein the endonuclease has increased cleavage activity relative to sMbCas12a; and (b) an engineered guide RNA, wherein the engineered guide RNA is configured to form a complex with the class 2, Type V-A Cas endonuclease and the engineered guide RNA comprises a spacer sequence configured to hybridize to a target nucleic acid comprising a target nucleic acid sequence. In some embodiments, the cleavage activity is measured in vitro by introducing the endonucleases alongside compatible guide RNAs to cells comprising the target nucleic acid and detecting cleavage of the target nucleic acid sequence in the cells. In some embodiments, the class 2, Type V-A Cas endonuclease comprises a sequence having at least 75% identity to any one of 215-225 or a variant thereof. In some embodiments, the engineered guide RNA comprises a sequence having at least 80% identity to the non-degenerate nucleotides of SEQ ID NO: 3609. In some embodiments, the target nucleic acid further comprises a YYN PAM sequence proximal to the target nucleic acid sequence. In some embodiments, the class 2, Type V-A Cas endonuclease has at least about 5%, 10%, 20%, 30%, 40%, 50%, 60%, 70%, 80%, 90%, 100%, or 200%, or more increased activity relative to sMbCas12a.

[0021] In some aspects, the present disclosure provides for a system comprising: (a) a class 2, Type V-A′ Cas endonuclease; and (b) an engineered guide RNA, wherein the engineered guide RNA comprises a sequence having at least 80% identity to about 19 to about 25 or about 19 to about 31 consecutive nucleotides of a natural effector repeat sequence of a class 2, Type V Cas endonuclease. In some embodiments, the natural effector repeat sequence is any one of SEQ ID NOs: 3560-3572. In some embodiments, the class 2, Type V-A′ Cas endonuclease has at least 75% identity to SEQ ID NO: 126.

[0022] In some aspects, the present disclosure provides for a system comprising: (a) a class 2, Type V-L endonuclease, and (b) an engineered guide RNA, wherein the engineered guide RNA comprises a sequence having at least 80% identity to about 19 to about 25 or about 19 to about 31 consecutive nucleotides of a natural effector repeat sequence of a class 2, Type V Cas endonuclease. In some embodiments, the class 2, Type V-L endonuclease has at least 75% sequence identity to any one of SEQ ID NOs: 793-1163.

[0023] In some aspects, the present disclosure provides for a method of disrupting the VEGF-A locus in a cell, comprising introducing to the cell: (a) a class 2, type V Cas endonuclease; and (b) an engineered guide RNA, wherein the engineered guide RNA is configured to form a complex with the endonuclease and the engineered guide RNA comprises a spacer sequence configured to hybridize to a region of the VEGF-A locus, wherein the engineered guide RNA comprises a targeting sequence having at least 80% identity to SEQ ID NO: 3985; or wherein the engineered guide RNA comprises the nucleotide sequence of any one of guide RNAs 1-7 from Table 7 In some embodiments, the class 2, type V Cas endonuclease comprises an endonuclease having at least 75% sequence identity to any one of SEQ ID NOs: 1-3470 or a variant thereof. In some embodiments, the class 2, type V Cas endonuclease comprises an endonuclease having at least 75% sequence identity to any one of SEQ ID NOs: 141, 215, 229, 261, or 1711-1721 or a variant thereof. In some embodiments, the engineered guide RNA comprises a sequence with at least 80% sequence identity to the non-degenerate nucleotides of any one of SEQ ID NOs: 3471, 3551-3559, 3608-3609, 3612, 3636-3637, 3640-3641, 3644-3645, 3648-3649, 3652-3653, 3656-3657, 3660-3661, 3664-3667, 3671-3672, 3678, 3695-3696, 3729-3730, 3734-3735, and 3851-3857. In some embodiments, the engineered guide RNA comprises a sequence with at least 80% sequence identity to the non-degenerate nucleotides of any one of SEQ ID NOs: 3608-3609, 3853, or 3851-3857.

[0024] In some aspects, the present disclosure provides for a method of disrupting a locus in a cell, comprising contacting to the cell a composition comprising: (a) a class 2, type V Cas endonuclease having at least 75% identity to any one of SEQ ID NOs: 215-225 or a variant thereof; and (b) an engineered guide RNA, wherein the engineered guide RNA is configured to form a complex with the endonuclease and the engineered guide RNA comprises a spacer sequence configured to hybridize to a region of the locus, wherein the class 2, type V Cas endonuclease has at least equivalent cleavage activity to spCas9 in the cell. In some embodiments, the cleavage activity is measured in vitro by introducing the endonucleases alongside compatible guide RNAs to cells comprising the target nucleic acid and detecting cleavage of the target nucleic acid sequence in the cells. In some embodiments, the composition comprises 20 pmoles or less of the class 2, type V Cas endonuclease. In some embodiments, the composition comprises 1 pmol or less of the class 2, type V Cas endonuclease. In some aspects, the present disclosure provides for a method of disrupting a CD38 locus in a cell, comprising introducing to the cell: (a) a class 2, type V Cas endonuclease; and (b) an engineered guide RNA, wherein the engineered guide RNA is configured to form a complex with the endonuclease and the engineered guide RNA comprises a spacer sequence configured to hybridize to a region of the CD38 locus, wherein the engineered guide RNA is configured to hybridize to a sequence having at least 20-22 consecutive nucleotides having at least about 80%, at least about 85%, at least about 90%, at least about 91%, at least about 92%, at least about 93%, at least about 94%, at least about 95%, at least about 96%, at least about 97%, at least about 98%, or at least about 99% sequence identity to any one of SEQ ID NOs: 4466-4503 and 5686; or wherein the engineered guide RNA comprises a nucleotide sequence having at least about 80%, at least about 85%, at least about 90%, at least about 91%, at least about 92%, at least about 93%, at least about 94%, at least about 95%, at least about 96%, at least about 97%, at least about 98%, or at least about 99% sequence identity to any one of SEQ ID NOs: 4428-4465 and 5685. In some embodiments, the class 2, type V Cas endonuclease comprises an endonuclease having at least 75% sequence identity to any one of SEQ ID NOs: 1-3470 or a variant thereof. In some embodiments, the class 2, type V Cas endonuclease comprises an endonuclease having at least 75% sequence identity to any one of SEQ ID NOs: 141, 215, 229, 261, or 1711-1722 or a variant thereof. In some embodiments, the engineered guide RNA comprises a sequence with at least about 80%, at least about 85%, at least about 90%, at least about 91%, at least about 92%, at least about 93%, at least about 94%, at least about 95%, at least about 96%, at least about 97%, at least about 98%, or at least about 99% sequence identity to the non-degenerate nucleotides of any one of SEQ ID NOs: 3471, 3551-3559, 3608-3609, 3612, 3636-3637, 3640-3641, 3644-3645, 3648-3649, 3652-3653, 3656-3657, 3660-3661, 3664-3667, 3671-3672, 3678, 3695-3696, 3729-3730, 3734-3735, 3851-3857, and 6033-6036. In some embodiments, the guide RNA comprises a sequence with at least 80% sequence identity to the non-degenerate nucleotides of SEQ ID NO: 3609. In some embodiments, the engineered guide RNA is configured to hybridize to a sequence having at least 20-22 consecutive nucleotides having at least 80% identity to any one of SEQ ID NOs: 4466, 4467, 4468, 4479, 4484, 4490, 4492, 4493, 4495, 4498. In some embodiments, the engineered guide RNA comprises a nucleotide sequence having at least 80% identity to any one of SEQ ID NOs: 4428, 4429, 4430, 4436, 4441, 4446, 4452, 4454, 4455, 4460, or 4461. In some embodiments, the cell is a eukaryotic cell, T-cell, hematopoietic stem cell, or precursor thereof. In some aspects, the present disclosure provides for a method of disrupting a TIGIT locus in a cell, comprising introducing to the cell: (a) a class 2, type V Cas endonuclease; and (b) an engineered guide RNA, wherein the engineered guide RNA is configured to form a complex with the endonuclease and the engineered guide RNA comprises a spacer sequence configured to hybridize to a region of the TIGIT locus, wherein the engineered guide RNA is configured to hybridize to a sequence having at least 20-22 consecutive nucleotides having at least about 80%, at least about 85%, at least about 90%, at least about 91%, at least about 92%, at least about 93%, at least about 94%, at least about 95%, at least about 96%, at least about 97%, at least about 98%, or at least about 99% sequence identity to any one of SEQ ID NOs: 4521-4537; or wherein the engineered guide RNA comprises a nucleotide sequence having at least about 80%, at least about 85%, at least about 90%, at least about 91%, at least about 92%, at least about 93%, at least about 94%, at least about 95%, at least about 96%, at least about 97%, at least about 98%, or at least about 99% sequence identity to any one of SEQ ID NOs: 4504-4520. In some embodiments, the class 2, type V Cas endonuclease comprises an endonuclease having at least 75% sequence identity to any one of SEQ ID NOs: 1-3470 or a variant thereof. In some embodiments, the class 2, type V Cas endonuclease comprises an endonuclease having at least 75% sequence identity to any one of SEQ ID NOs: 141, 215, 229, 261, or 1711-1722 or a variant thereof. In some embodiments, the engineered guide RNA comprises a sequence with at least about 80%, at least about 85%, at least about 90%, at least about 91%, at least about 92%, at least about 93%, at least about 94%, at least about 95%, at least about 96%, at least about 97%, at least about 98%, or at least about 99% sequence identity to the non-degenerate nucleotides of any one of SEQ ID NOs: 3471, 3551-3559, 3608-3609, 3612, 3636-3637, 3640-3641, 3644-3645, 3648-3649, 3652-3653, 3656-3657, 3660-3661, 3664-3667, 3671-3672, 3678, 3695-3696, 3729-3730, 3734-3735, 3851-3857, and 6033-6036. In some embodiments, the guide RNA comprises a sequence with at least 80% sequence identity to the non-degenerate nucleotides of SEQ ID NO: 3609. In some embodiments, the engineered guide RNA is configured to hybridize to a sequence having at least 20-22 consecutive nucleotides having at least 80% identity to any one of SEQ ID NOs: 4521, 4527, 4528, 4535, or 4536. In some embodiments, the engineered guide RNA comprises a nucleotide sequence having at least 80% identity to any one of SEQ ID NOs: 4504, 4510, 4511, 4518, or 4519. In some embodiments, the cell is a eukaryotic cell, T-cell, hematopoietic stem cell, or precursor thereof.

[0025] In some aspects, the present disclosure provides for a method of disrupting an AAVS1 locus in a cell, comprising introducing to the cell: (a) a class 2, type V Cas endonuclease; and (b) an engineered guide RNA, wherein the engineered guide RNA is configured to form a complex with the endonuclease and the engineered guide RNA comprises a spacer sequence configured to hybridize to a region of the AAVS1 locus, wherein the engineered guide RNA is configured to hybridize to a sequence having at least 20-22 consecutive nucleotides complementary to a sequence having at least about 80%, at least about 85%, at least about 90%, at least about 91%, at least about 92%, at least about 93%, at least about 94%, at least about 95%, at least about 96%, at least about 97%, at least about 98%, or at least about 99% sequence identity to any one of SEQ ID NOs: 4569-4599; or wherein the engineered guide RNA comprises a nucleotide sequence having at least about 80%, at least about 85%, at least about 90%, at least about 91%, at least about 92%, at least about 93%, at least about 94%, at least about 95%, at least about 96%, at least about 97%, at least about 98%, or at least about 99% sequence identity to any one of SEQ ID NOs: 4538-4568. In some embodiments, the class 2, type V Cas endonuclease comprises an endonuclease having at least 75% sequence identity to any one of SEQ ID NOs: 1-3470 or a variant thereof. In some embodiments, the class 2, type V Cas endonuclease comprises an endonuclease having at least 75% sequence identity to any one of SEQ ID NOs: 141, 215, 229, 261, or 1711-1722 or a variant thereof. In some embodiments, the engineered guide RNA comprises a sequence with at least about 80%, at least about 85%, at least about 90%, at least about 91%, at least about 92%, at least about 93%, at least about 94%, at least about 95%, at least about 96%, at least about 97%, at least about 98%, or at least about 99% sequence identity to the non-degenerate nucleotides of any one of SEQ ID NOs: 3471, 3551-3559, 3608-3609, 3612, 3636-3637, 3640-3641, 3644-3645, 3648-3649, 3652-3653, 3656-3657, 3660-3661, 3664-3667, 3671-3672, 3678, 3695-3696, 3729-3730, 3734-3735, 3851-3857, 6033-6036. In some embodiments, the guide RNA comprises a sequence with at least 80% sequence identity to the non-degenerate nucleotides of SEQ ID NO: 3609. In some embodiments, the engineered guide RNA is configured to hybridize to a sequence having at least 20-22 consecutive nucleotides having at least 80% identity to any one of SEQ ID NOs: 4574, 4577, 4578, 4579, 4582, 4584, 4585, 4586, 4587, 4589, 4590, 4591, 4592, 4593, 4595, 4596, or 4598. In some embodiments, the engineered guide RNA comprises a nucleotide sequence having at least 80% identity to any one of SEQ ID NOs: 4543, 4546, 4547, 4548, 4551, 4553, 4554, 4555, 4556, 4558, 4559, 4560, 4561, 4562, 4565, or 4567. In some embodiments, the cell is a eukaryotic cell, T-cell, hematopoietic stem cell, hepatocyte, or precursor thereof.

[0026] In some aspects, the present disclosure provides for a method of disrupting a B2M locus in a cell, comprising introducing to the cell: (a) a class 2, type V Cas endonuclease; and (b) an engineered guide RNA, wherein the engineered guide RNA is configured to form a complex with the endonuclease and the engineered guide RNA comprises a spacer sequence configured to hybridize to a region of the B2M locus, wherein the engineered guide RNA is configured to hybridize to a sequence having at least 20-22 consecutive nucleotides complementary to a sequence having at least about 80%, at least about 85%, at least about 90%, at least about 91%, at least about 92%, at least about 93%, at least about 94%, at least about 95%, at least about 96%, at least about 97%, at least about 98%, or at least about 99% sequence identity to any one of SEQ ID NOs: 4676-4751; or wherein the engineered guide RNA comprises a nucleotide sequence having at least about 80%, at least about 85%, at least about 90%, at least about 91%, at least about 92%, at least about 93%, at least about 94%, at least about 95%, at least about 96%, at least about 97%, at least about 98%, or at least about 99% sequence identity to any one of SEQ ID NOs: 4600-4675. In some embodiments, the class 2, type V Cas endonuclease comprises an endonuclease having at least 75% sequence identity to any one of SEQ ID NOs: 1-3470 or a variant thereof. In some embodiments, the class 2, type V Cas endonuclease comprises an endonuclease having at least 75% sequence identity to any one of SEQ ID NOs: 141, 215, 229, 261, or 1711-1722 or a variant thereof. In some embodiments, the engineered guide RNA comprises a sequence with at least about 80%, at least about 85%, at least about 90%, at least about 91%, at least about 92%, at least about 93%, at least about 94%, at least about 95%, at least about 96%, at least about 97%, at least about 98%, or at least about 99% sequence identity to the non-degenerate nucleotides of any one of SEQ ID NOs: 3471, 3551-3559, 3608-3609, 3612, 3636-3637, 3640-3641, 3644-3645, 3648-3649, 3652-3653, 3656-3657, 3660-3661, 3664-3667, 3671-3672, 3678, 3695-3696, 3729-3730, 3734-3735, 3851-3857 and 6033-6036. In some embodiments, the guide RNA comprises a sequence with at least 80% sequence identity to the non-degenerate nucleotides of SEQ ID NO: 3609. In some embodiments, the engineered guide RNA is configured to hybridize to a sequence having at least 20-22 consecutive nucleotides having at least 80% identity to any one of SEQ ID NOs: 4676, 4678-4687, 4690, 4692, 4698-4707, 4720-4723, 4725-4726, 4732-4733, 4736-4737, 4741, or 4750-4751. In some embodiments, the engineered guide RNA comprises a nucleotide sequence having at least 80% identity to any one of SEQ ID NOs: 4600, 4602-4611, 4614, 4616, 4622-4631, 4644-4647, 4649-4650, 4656-4657, 4660-4661, 4665, or 4674-4675. In some embodiments, the cell is a eukaryotic cell, T-cell, hematopoietic stem cell, or precursor thereof.

[0027] In some aspects, the present disclosure provides for a method of disrupting a CD2 locus in a cell, comprising introducing to the cell: (a) a class 2, type V Cas endonuclease; and (b) an engineered guide RNA, wherein the engineered guide RNA is configured to form a complex with the endonuclease and the engineered guide RNA comprises a spacer sequence configured to hybridize to a region of the CD2 locus, wherein the engineered guide RNA is configured to hybridize to a sequence having at least 20-22 consecutive nucleotides complementary to a sequence having at least about 80%, at least about 85%, at least about 90%, at least about 91%, at least about 92%, at least about 93%, at least about 94%, at least about 95%, at least about 96%, at least about 97%, at least about 98%, or at least about 99% sequence identity to any one of SEQ ID NOs: 4837-4921; or wherein the engineered guide RNA comprises a nucleotide sequence having at least about 80%, at least about 85%, at least about 90%, at least about 91%, at least about 92%, at least about 93%, at least about 94%, at least about 95%, at least about 96%, at least about 97%, at least about 98%, or at least about 99% sequence identity to any one of SEQ ID NOs: 4752-4836. In some embodiments, the class 2, type V Cas endonuclease comprises an endonuclease having at least 75% sequence identity to any one of SEQ ID NOs: 1-3470 or a variant thereof. In some embodiments, the class 2, type V Cas endonuclease comprises an endonuclease having at least 75% sequence identity to any one of SEQ ID NOs: 141, 215, 229, 261, or 1711-1722 or a variant thereof. In some embodiments, the engineered guide RNA comprises a sequence with at least about 80%, at least about 85%, at least about 90%, at least about 91%, at least about 92%, at least about 93%, at least about 94%, at least about 95%, at least about 96%, at least about 97%, at least about 98%, or at least about 99% sequence identity to the non-degenerate nucleotides of any one of SEQ ID NOs: 3471, 3551-3559, 3608-3609, 3612, 3636-3637, 3640-3641, 3644-3645, 3648-3649, 3652-3653, 3656-3657, 3660-3661, 3664-3667, 3671-3672, 3678, 3695-3696, 3729-3730, 3734-3735, 3851-3857, and 6033-6036. In some embodiments, the guide RNA comprises a sequence with at least 80% sequence identity to the non-degenerate nucleotides of SEQ ID NO: 3609. In some embodiments, the engineered guide RNA is configured to hybridize to a sequence having at least 20-22 consecutive nucleotides having at least 80% identity to any one of SEQ ID NOs: 4837, 4844, 4845, 4848, 4857-4858, 4883, 4887, 4892-4893, 4904-4909, 4914, 4916, or 4918. In some embodiments, the engineered guide RNA has at least 80% sequence identity to any of the guide RNAs from Table 14E that target any one of SEQ ID NOs: 4837, 4844, 4845, 4848, 4857-4858, 4883, 4887, 4892-4893, 4904-4909, 4914, 4916, or 4918. In some embodiments, the cell is a eukaryotic cell, T-cell, hematopoietic stem cell, or precursor thereof.

[0028] In some aspects, the present disclosure provides for a method of disrupting a CD5 locus in a cell, comprising introducing to the cell: (a) a class 2, type V Cas endonuclease; and (b) an engineered guide RNA, wherein the engineered guide RNA is configured to form a complex with the endonuclease and the engineered guide RNA comprises a spacer sequence configured to hybridize to a region of the CD5 locus, wherein the engineered guide RNA is configured to hybridize to a sequence having at least 20-22 consecutive nucleotides complementary to a sequence having at least about 80%, at least about 85%, at least about 90%, at least about 91%, at least about 92%, at least about 93%, at least about 94%, at least about 95%, at least about 96%, at least about 97%, at least about 98%, or at least about 99% sequence identity to any one of SEQ ID NOs: 4946-4969; or wherein the engineered guide RNA comprises a nucleotide sequence having at least about 80%, at least about 85%, at least about 90%, at least about 91%, at least about 92%, at least about 93%, at least about 94%, at least about 95%, at least about 96%, at least about 97%, at least about 98%, or at least about 99% sequence identity to any one of SEQ ID NOs: 4922-4945. In some embodiments, the class 2, type V Cas endonuclease comprises an endonuclease having at least 75% sequence identity to any one of SEQ ID NOs: 1-3470 or a variant thereof. In some embodiments, the class 2, type V Cas endonuclease comprises an endonuclease having at least 75% sequence identity to any one of SEQ ID NOs: 141, 215, 229, 261, or 1711-1722 or a variant thereof. In some embodiments, the engineered guide RNA comprises a sequence with at least about 80%, at least about 85%, at least about 90%, at least about 91%, at least about 92%, at least about 93%, at least about 94%, at least about 95%, at least about 96%, at least about 97%, at least about 98%, or at least about 99% sequence identity to the non-degenerate nucleotides of any one of SEQ ID NOs: 3471, 3551-3559, 3608-3609, 3612, 3636-3637, 3640-3641, 3644-3645, 3648-3649, 3652-3653, 3656-3657, 3660-3661, 3664-3667, 3671-3672, 3678, 3695-3696, 3729-3730, 3734-3735, 3851-3857, and 6033-6036. In some embodiments, the guide RNA comprises a sequence with at least 80% sequence identity to the non-degenerate nucleotides of SEQ ID NO: 3609. In some embodiments, the engineered guide RNA is configured to hybridize to a sequence having at least 20-22 consecutive nucleotides having at least 80% identity to any one of SEQ ID NOs: 4946-4947, 4949, 4951, 4957-4960, 4963, 4967, or 4969. In some embodiments, the engineered guide RNA has at least 80% sequence identity to any of the guide RNAs from Table 14F that target any one of SEQ ID NOs: 4946-4947, 4949, 4951, 4957-4960, 4963, 4967, or 4969. In some embodiments, the cell is a eukaryotic cell, T-cell, hematopoietic stem cell, or precursor thereof.

[0029] In some aspects, the present disclosure provides for a method of disrupting a mouse TRAC locus in a cell, comprising introducing to the cell: (a) a class 2, type V Cas endonuclease; and (b) an engineered guide RNA, wherein the engineered guide RNA is configured to form a complex with the endonuclease and the engineered guide RNA comprises a spacer sequence configured to hybridize to a region of the mouse TRAC locus, wherein the engineered guide RNA is configured to hybridize to a sequence having at least 20-22 consecutive nucleotides complementary to a sequence having at least about 80%, at least about 85%, at least about 90%, at least about 91%, at least about 92%, at least about 93%, at least about 94%, at least about 95%, at least about 96%, at least about 97%, at least about 98%, or at least about 99% sequence identity to any one of SEQ ID NOs: 5126-5195, 5682, or 5684; or wherein the engineered guide RNA comprises a nucleotide sequence having at least about 80%, at least about 85%, at least about 90%, at least about 91%, at least about 92%, at least about 93%, at least about 94%, at least about 95%, at least about 96%, at least about 97%, at least about 98%, or at least about 99% sequence identity to any one of SEQ ID NOs: 5056-5125, 5681, or 5683. In some embodiments, the class 2, type V Cas endonuclease comprises an endonuclease having at least 75% sequence identity to any one of SEQ ID NOs: 1-3470 or a variant thereof. In some embodiments, the class 2, type V Cas endonuclease comprises an endonuclease having at least 75% sequence identity to any one of SEQ ID NOs: 141, 215, 229, 261, or 1711-1722 or a variant thereof. In some embodiments, the engineered guide RNA comprises a sequence with at least about 80%, at least about 85%, at least about 90%, at least about 91%, at least about 92%, at least about 93%, at least about 94%, at least about 95%, at least about 96%, at least about 97%, at least about 98%, or at least about 99% sequence identity to the non-degenerate nucleotides of any one of SEQ ID NOs: 3471, 3551-3559, 3608-3609, 3612, 3636-3637, 3640-3641, 3644-3645, 3648-3649, 3652-3653, 3656-3657, 3660-3661, 3664-3667, 3671-3672, 3678, 3695-3696, 3729-3730, 3734-3735, 3851-3857, or 6033-6036. In some embodiments, the guide RNA comprises a sequence with at least 80% sequence identity to the non-degenerate nucleotides of SEQ ID NO: 3609. In some embodiments, the engineered guide RNA is configured to hybridize to a sequence having at least 20-22 consecutive nucleotides having at least 80% identity to any one of SEQ ID NOs: 5126-5130, 5133-5143, 5147-5150, 5172-5173, 5184-5189, or 5192-5194. In some embodiments, the engineered guide RNA has at least 80% sequence identity to any of the guide RNAs from Table 14G that target any one of SEQ ID NOs: 5126-5130, 5133-5143, 5147-5150, 5172-5173, 5184-5189, or 5192-5194. In some embodiments, the cell is a eukaryotic cell, T-cell, hematopoietic stem cell, or precursor thereof.

[0030] In some aspects, the present disclosure provides for a method of disrupting a mouse TRBC1 or TRBC2 locus in a cell, comprising introducing to the cell: (a) a class 2, type V Cas endonuclease; and (b) an engineered guide RNA, wherein the engineered guide RNA is configured to form a complex with the endonuclease and the engineered guide RNA comprises a spacer sequence configured to hybridize to a region of the mouse TRBC1 or TRBC2 locus, wherein the engineered guide RNA is configured to hybridize to a sequence having at least 20-22 consecutive nucleotides complementary to a sequence having at least about 80%, at least about 85%, at least about 90%, at least about 91%, at least about 92%, at least about 93%, at least about 94%, at least about 95%, at least about 96%, at least about 97%, at least about 98%, or at least about 99% sequence identity to any one of SEQ ID NOs: 5211-5225 or 5247-5267; or wherein the engineered guide RNA comprises a nucleotide sequence having at least about 80%, at least about 85%, at least about 90%, at least about 91%, at least about 92%, at least about 93%, at least about 94%, at least about 95%, at least about 96%, at least about 97%, at least about 98%, or at least about 99% sequence identity to any one of SEQ ID NOs: 5196-5210 or 5226-5246. In some embodiments, the class 2, type V Cas endonuclease comprises an endonuclease having at least 75% sequence identity to any one of SEQ ID NOs: 1-3470 or a variant thereof. In some embodiments, the class 2, type V Cas endonuclease comprises an endonuclease having at least 75% sequence identity to any one of SEQ ID NOs: 141, 215, 229, 261, or 1711-1722 or a variant thereof. In some embodiments, the engineered guide RNA comprises a sequence with at least about 80%, at least about 85%, at least about 90%, at least about 91%, at least about 92%, at least about 93%, at least about 94%, at least about 95%, at least about 96%, at least about 97%, at least about 98%, or at least about 99% sequence identity to the non-degenerate nucleotides of any one of SEQ ID NOs: 3471, 3551-3559, 3608-3609, 3612, 3636-3637, 3640-3641, 3644-3645, 3648-3649, 3652-3653, 3656-3657, 3660-3661, 3664-3667, 3671-3672, 3678, 3695-3696, 3729-3730, 3734-3735, 3851-3857, or 6033-6036. In some embodiments, the guide RNA comprises a sequence with at least 80% sequence identity to the non-degenerate nucleotides of SEQ ID NO: 3609. In some embodiments, the engineered guide RNA is configured to hybridize to a sequence having at least 20-22 consecutive nucleotides having at least 80% identity to any one of SEQ ID NOs: 5211, 5213-5215, 5217, 5221, 5223, 5247, 5249-5250, 5252-5253, 5258-5259, or 5264. In some embodiments, the engineered guide RNA has at least 80% sequence identity to any of the guide RNAs from Table 14H that target any one of SEQ ID NOs: 5211, 5213-5215, 5217, 5221, 5223, 5247, 5249-5250, 5252-5253, 5258-5259, or 5264. In some embodiments, the cell is a eukaryotic cell, T-cell, hematopoietic stem cell, or precursor thereof.

[0031] In some aspects, the present disclosure provides for a method of disrupting a human TRBC1 or TRBC2 locus in a cell, comprising introducing to the cell: (a) a class 2, type V Cas endonuclease; and (b) an engineered guide RNA, wherein the engineered guide RNA is configured to form a complex with the endonuclease and the engineered guide RNA comprises a spacer sequence configured to hybridize to a region of the human TRBC1 or TRBC2 locus, wherein the engineered guide RNA is configured to hybridize to a sequence having at least 20-22 consecutive nucleotides complementary to a sequence having at least about 80%, at least about 85%, at least about 90%, at least about 91%, at least about 92%, at least about 93%, at least about 94%, at least about 95%, at least about 96%, at least about 97%, at least about 98%, or at last about 99% sequence identity to any one of SEQ ID NOs: 5661-5679; or wherein the engineered guide RNA comprises a nucleotide sequence having at least about 80%, at least about 85%, at least about 90%, at least about 91%, at least about 92%, at least about 93%, at least about 94%, at least about 95%, at least about 96%, at least about 97%, at least about 98%, or at least about 99% sequence identity to any one of SEQ ID NOs: 5642-5660. In some embodiments, the class 2, type V Cas endonuclease comprises an endonuclease having at least 75% sequence identity to any one of SEQ ID NOs: 1-3470 or a variant thereof. In some embodiments, the class 2, type V Cas endonuclease comprises an endonuclease having at least 75% sequence identity to any one of SEQ ID NOs: 141, 215, 229, 261, or 1711-1722 or a variant thereof. In some embodiments, the engineered guide RNA comprises a sequence with at least about 80%, at least about 85%, at least about 90%, at least about 91%, at least about 92%, at least about 93%, at least about 94%, at least about 95%, at least about 96%, at least about 97%, at least about 98%, or at least about 99% sequence identity to the non-degenerate nucleotides of any one of SEQ ID NOs: 3471, 3551-3559, 3608-3609, 3612, 3636-3637, 3640-3641, 3644-3645, 3648-3649, 3652-3653, 3656-3657, 3660-3661, 3664-3667, 3671-3672, 3678, 3695-3696, 3729-3730, 3734-3735, 3851-3857, or 6033-6036. In some embodiments, the guide RNA comprises a sequence with at least 80% sequence identity to the non-degenerate nucleotides of SEQ ID NO: 3609. In some embodiments, the engineered guide RNA is configured to hybridize to a sequence having at least 20-22 consecutive nucleotides having at least 80% identity to any one of SEQ ID NOs: 5661-5663, 5672-5675, or 5678. In some embodiments, the engineered guide RNA has at least 80% sequence identity to any of the guide RNAs from Table 141 that target any one of SEQ ID NOs: 5661-5663, 5672-5675, or 5678. In some embodiments, the cell is a eukaryotic cell, T-cell, hematopoietic stem cell, or precursor thereof.

[0032] In some aspects, the present disclosure provides for a method of disrupting an HPRT locus in a cell, comprising introducing to the cell: (a) a class 2, type V Cas endonuclease; and (b) an engineered guide RNA, wherein the engineered guide RNA is configured to form a complex with the endonuclease and the engineered guide RNA comprises a spacer sequence configured to hybridize to a region of the HPRT locus, wherein the engineered guide RNA is configured to hybridize to a sequence having at least 20-22 consecutive nucleotides complementary to a sequence having at least about 80%, at least about 85%, at least about 90%, at least about 91%, at least about 92%, at least about 93%, at least about 94%, at least about 95%, at least about 96%, at least about 97%, at least about 98%, or at least about 99% sequence identity to any one of SEQ ID NOs: 5562-5641; or wherein the engineered guide RNA comprises a nucleotide sequence having at least about 80%, at least about 85%, at least about 90%, at least about 91%, at least about 92%, at least about 93%, at least about 94%, at least about 95%, at least about 96%, at least about 97%, at least about 98%, or at least about 99% sequence identity to any one of SEQ ID NOs: 5482-5561. In some embodiments, the class 2, type V Cas endonuclease comprises an endonuclease having at least 75% sequence identity to any one of SEQ ID NOs: 1-3470 or a variant thereof. In some embodiments, the class 2, type V Cas endonuclease comprises an endonuclease having at least 75% sequence identity to any one of SEQ ID NOs: 141, 215, 229, 261, or 1711-1722 or a variant thereof. In some embodiments, the engineered guide RNA comprises a sequence with at least about 80%, at least about 85%, at least about 90%, at least about 91%, at least about 92%, at least about 93%, at least about 94%, at least about 95%, at least about 96%, at least about 97%, at least about 98%, or at least about 99% sequence identity to the non-degenerate nucleotides of any one of SEQ ID NOs: 3471, 3551-3559, 3608-3609, 3612, 3636-3637, 3640-3641, 3644-3645, 3648-3649, 3652-3653, 3656-3657, 3660-3661, 3664-3667, 3671-3672, 3678, 3695-3696, 3729-3730, 3734-3735, 3851-3857, or 6033-6036. In some embodiments, the guide RNA comprises a sequence with at least 80% sequence identity to the non-degenerate nucleotides of SEQ ID NO: 3609. In some embodiments, the engineered guide RNA is configured to hybridize to a sequence having at least 20-22 consecutive nucleotides having at least 80% identity to any one of SEQ ID NOs: 5562-5564 or 5568. In some embodiments, the engineered guide RNA has at least 80% sequence identity to any of the guide RNAs from Table 14J that target any one of SEQ ID NOs: 5562-5564 or 5568. In some embodiments, the cell is a eukaryotic cell, hepatocyte, T-cell, hematopoietic stem cell, or precursor thereof.

[0033] In some aspects, the present disclosure provides for a method of disrupting an APO-A1 locus in a cell, comprising introducing to the cell: (a) a class 2, type V Cas endonuclease; and (b) an engineered guide RNA, wherein the engineered guide RNA is configured to form a complex with the endonuclease and the engineered guide RNA comprises a spacer sequence configured to hybridize to a region of the APO-A1 locus, wherein the engineered guide RNA is configured to hybridize to a sequence having at least 20-22 consecutive nucleotides complementary to a sequence having at least about 80%, at least about 85%, at least about 90%, at least about 91%, at least about 92%, at least about 93%, at least about 94%, at least about 95%, at least about 96%, at least about 97%, at least about 98%, or at least about 99% sequence identity to any one of SEQ ID NOs: 5861-5874; or wherein the engineered guide RNA comprises a nucleotide sequence having at least about 80%, at least about 85%, at least about 90%, at least about 91%, at least about 92%, at least about 93%, at least about 94%, at least about 95%, at least about 96%, at least about 97%, at least about 98%, or at least about 99% sequence identity to any one of SEQ ID NOs: 5847-5860. In some embodiments, the class 2, type V Cas endonuclease comprises an endonuclease having at least 75% sequence identity to any one of SEQ ID NOs: 1-3470 or a variant thereof. In some embodiments, the class 2, type V Cas endonuclease comprises an endonuclease having at least 75% sequence identity to any one of SEQ ID NOs: 141, 215, 229, 261, or 1711-1722 or a variant thereof. In some embodiments, the engineered guide RNA comprises a sequence with at least about 80%, at least about 85%, at least about 90%, at least about 91%, at least about 92%, at least about 93%, at least about 94%, at least about 95%, at least about 96%, at least about 97%, at least about 98%, or at least about 99% sequence identity to the non-degenerate nucleotides of any one of SEQ ID NOs: 3471, 3551-3559, 3608-3609, 3612, 3636-3637, 3640-3641, 3644-3645, 3648-3649, 3652-3653, 3656-3657, 3660-3661, 3664-3667, 3671-3672, 3678, 3695-3696, 3729-3730, 3734-3735, 3851-3857, or 6033-6036. In some embodiments, the guide RNA comprises a sequence with at least 80% sequence identity to the non-degenerate nucleotides of SEQ ID NO: 3609. In some embodiments, the engineered guide RNA is configured to hybridize to a sequence having at least 20-22 consecutive nucleotides having at least 80% identity to any one of SEQ ID NOs: 5861-5866 or 5868-5869. In some embodiments, the engineered guide RNA has at least 80% sequence identity to any of the guide RNAs from Table 43A that target any one of SEQ ID NOs: 5861-5866 or 5868-5869. In some embodiments, the cell is a eukaryotic cell, hepatocyte, T-cell, hematopoietic stem cell, or precursor thereof.

[0034] In some aspects, the present disclosure provides for a method of disrupting an ANGPTL3 locus in a cell, comprising introducing to the cell: (a) a class 2, type V Cas endonuclease; and (b) an engineered guide RNA, wherein the engineered guide RNA is configured to form a complex with the endonuclease and the engineered guide RNA comprises a spacer sequence configured to hybridize to a region of the ANGPTL3 locus, wherein the engineered guide RNA is configured to hybridize to a sequence having at least 20-22 consecutive nucleotides complementary to a sequence having at least about 80%, at least about 85%, at least about 90%, at least about 91%, at least about 92%, at least about 93%, at least about 94%, at least about 95%, at least about 96%, at least about 97%, at least about 98%, or at least about 99% sequence identity to any one of SEQ ID NOs: 5953-6030; or wherein the engineered guide RNA comprises a nucleotide sequence having at least about 80%, at least about 85%, at least about 90%, at least about 91%, at least about 92%, at least about 93%, at least about 94%, at least about 95%, at least about 96%, at least about 97%, at least about 98%, or at least about 99% sequence identity to any one of SEQ ID NOs: 5875-5952. In some embodiments, the class 2, type V Cas endonuclease comprises an endonuclease having at least 75% sequence identity to any one of SEQ ID NOs: 1-3470 or a variant thereof. In some embodiments, the class 2, type V Cas endonuclease comprises an endonuclease having at least 75% sequence identity to any one of SEQ ID NOs: 141, 215, 229, 261, or 1711-1722 or a variant thereof. In some embodiments, the engineered guide RNA comprises a sequence with at least about 80%, at least about 85%, at least about 90%, at least about 91%, at least about 92%, at least about 93%, at least about 94%, at least about 95%, at least about 96%, at least about 97%, at least about 98%, or at least about 99% sequence identity to the non-degenerate nucleotides of any one of SEQ ID NOs: 3471, 3551-3559, 3608-3609, 3612, 3636-3637, 3640-3641, 3644-3645, 3648-3649, 3652-3653, 3656-3657, 3660-3661, 3664-3667, 3671-3672, 3678, 3695-3696, 3729-3730, 3734-3735, 3851-3857, or 6033-6036. In some embodiments, the guide RNA comprises a sequence with at least 80% sequence identity to the non-degenerate nucleotides of SEQ ID NO: 3609. In some embodiments, the engineered guide RNA is configured to hybridize to a sequence having at least 20-22 consecutive nucleotides having at least 80% identity to any one of SEQ ID NOs: 5955-5963, 5968-5975, 5979-5987, 5989-5993, 5997, 5999, 6003-6010, 6014-6016, 6024-6025, or 6027-6030. In some embodiments, the engineered guide RNA has at least 80% sequence identity to any of the guide RNAs from Table 43B that target any one of SEQ ID NOs: 5955-5963, 5968-5975, 5979-5987, 5989-5993, 5997, 5999, 6003-6010, 6014-6016, 6024-6025, or 6027-6030. In some embodiments, the cell is a eukaryotic cell, hepatocyte, T-cell, hematopoietic stem cell, or precursor thereof.

[0035] In some aspects, the present disclosure provides for a method of disrupting a human Rosa26 locus in a cell, comprising introducing to the cell: (a) a class 2, type V Cas endonuclease; and (b) an engineered guide RNA, wherein the engineered guide RNA is configured to form a complex with the endonuclease and the engineered guide RNA comprises a spacer sequence configured to hybridize to a region of the human Rosa26 locus, wherein the engineered guide RNA is configured to hybridize to a sequence having at least 20-22 consecutive nucleotides complementary to a sequence having at least about 80%, at least about 85%, at least about 90%, at least about 91%, at least about 92%, at least about 93%, at least about 94%, at least about 95%, at least about 96%, at least about 97%, at least about 98%, or at least about 99% sequence identity to any one of SEQ ID NOs: 5013-5055; or wherein the engineered guide RNA comprises a nucleotide sequence having at least about 80%, at least about 85%, at least about 90%, at least about 91%, at least about 92%, at least about 93%, at least about 94%, at least about 95%, at least about 96%, at least about 97%, at least about 98%, or at least about 99% sequence identity to any one of SEQ ID NOs: 4970-5012. In some embodiments, the class 2, type V Cas endonuclease comprises an endonuclease having at least 75% sequence identity to any one of SEQ ID NOs: 1-3470 or a variant thereof. In some embodiments, the class 2, type V Cas endonuclease comprises an endonuclease having at least 75% sequence identity to any one of SEQ ID NOs: 141, 215, 229, 261, or 1711-1722 or a variant thereof. In some embodiments, the engineered guide RNA comprises a sequence with at least about 80%, at least about 85%, at least about 90%, at least about 91%, at least about 92%, at least about 93%, at least about 94%, at least about 95%, at least about 96%, at least about 97%, at least about 98%, or at least about 99% sequence identity to the non-degenerate nucleotides of any one of SEQ ID NOs: 3471, 3551-3559, 3608-3609, 3612, 3636-3637, 3640-3641, 3644-3645, 3648-3649, 3652-3653, 3656-3657, 3660-3661, 3664-3667, 3671-3672, 3678, 3695-3696, 3729-3730, 3734-3735, 3851-3857, or 6033-6036. In some embodiments, the guide RNA comprises a sequence with at least 80% sequence identity to the non-degenerate nucleotides of SEQ ID NO: 3609. In some embodiments, the cell is a eukaryotic cell, hepatocyte, T-cell, hematopoietic stem cell, or precursor thereof.

[0036] In some aspects, the present disclosure provides for a method of disrupting a FAS locus in a cell, comprising introducing to the cell: (a) a class 2, type V Cas endonuclease; and (b) an engineered guide RNA, wherein the engineered guide RNA is configured to form a complex with the endonuclease and the engineered guide RNA comprises a spacer sequence configured to hybridize to a region of the FAS locus, wherein the engineered guide RNA is configured to hybridize to a sequence having at least 20-22 consecutive nucleotides complementary to a sequence having at least about 80%, at least about 85%, at least about 90%, at least about 91%, at least about 92%, at least about 93%, at least about 94%, at least about 95%, at least about 96%, at least about 97%, at least about 98%, or at least about 99% sequence identity to any one of SEQ ID NOs: 5367-5465; or wherein the engineered guide RNA comprises a nucleotide sequence having at least about 80%, at least about 85%, at least about 90%, at least about 91%, at least about 92%, at least about 93%, at least about 94%, at least about 95%, at least about 96%, at least about 97%, at least about 98%, or at least about 99% sequence identity to any one of SEQ ID NOs: 5268-5366. In some embodiments, the class 2, type V Cas endonuclease comprises an endonuclease having at least 75% sequence identity to any one of SEQ ID NOs: 1-3470 or a variant thereof. In some embodiments, the class 2, type V Cas endonuclease comprises an endonuclease having at least 75% sequence identity to any one of SEQ ID NOs: 141, 215, 229, 261, or 1711-1722 or a variant thereof. In some embodiments, the engineered guide RNA comprises a sequence with at least about 80%, at least about 85%, at least about 90%, at least about 91%, at least about 92%, at least about 93%, at least about 94%, at least about 95%, at least about 96%, at least about 97%, at least about 98%, or at least about 99% sequence identity to the non-degenerate nucleotides of any one of SEQ ID NOs: 3471, 3551-3559, 3608-3609, 3612, 3636-3637, 3640-3641, 3644-3645, 3648-3649, 3652-3653, 3656-3657, 3660-3661, 3664-3667, 3671-3672, 3678, 3695-3696, 3729-3730, 3734-3735, 3851-3857, or 6033-6036. In some embodiments, the guide RNA comprises a sequence with at least 80% sequence identity to the non-degenerate nucleotides of SEQ ID NO: 3609. In some embodiments, the cell is a eukaryotic cell, hepatocyte, T-cell, hematopoietic stem cell, or precursor thereof.

[0037] In some aspects, the present disclosure provides for a method of disrupting a PD-1 locus in a cell, comprising introducing to the cell: (a) a class 2, type V Cas endonuclease; and (b) an engineered guide RNA, wherein the engineered guide RNA is configured to form a complex with the endonuclease and the engineered guide RNA comprises a spacer sequence configured to hybridize to a region of the PD-1 locus, wherein the engineered guide RNA is configured to hybridize to a sequence having at least 20-22 consecutive nucleotides complementary to a sequence having at least about 80%, at least about 85%, at least about 90%, at least about 91%, at least about 92%, at least about 93%, at least about 94%, at least about 95%, at least about 96%, at least about 97%, at least about 98%, or at least about 99% sequence identity to any one of SEQ ID NOs: 5474-5481; or wherein the engineered guide RNA comprises a nucleotide sequence having at least about 80%, at least about 85%, at least about 90%, at least about 91%, at least about 92%, at least about 93%, at least about 94%, at least about 95%, at least about 96%, at least about 97%, at least about 98%, or at least about 99% sequence identity to any one of SEQ ID NOs: 5466-5473. In some embodiments, the class 2, type V Cas endonuclease comprises an endonuclease having at least 75% sequence identity to any one of SEQ ID NOs: 1-3470 or a variant thereof. In some embodiments, the class 2, type V Cas endonuclease comprises an endonuclease having at least 75% sequence identity to any one of SEQ ID NOs: 141, 215, 229, 261, or 1711-1722 or a variant thereof. In some embodiments, the engineered guide RNA comprises a sequence with at least about 80%, at least about 85%, at least about 90%, at least about 91%, at least about 92%, at least about 93%, at least about 94%, at least about 95%, at least about 96%, at least about 97%, at least about 98%, or at least about 99% sequence identity to the non-degenerate nucleotides of any one of SEQ ID NOs: 3471, 3551-3559, 3608-3609, 3612, 3636-3637, 3640-3641, 3644-3645, 3648-3649, 3652-3653, 3656-3657, 3660-3661, 3664-3667, 3671-3672, 3678, 3695-3696, 3729-3730, 3734-3735, 3851-3857, or 6033-6036. In some embodiments, the guide RNA comprises a sequence with at least 80% sequence identity to the non-degenerate nucleotides of SEQ ID NO: 3609. In some embodiments, the cell is a eukaryotic cell, hepatocyte, T-cell, hematopoietic stem cell, or precursor thereof.

[0038] In some aspects, the present disclosure provides for an engineered nuclease system comprising: (a) an endonuclease having at least 75% sequence identity to any one of SEQ ID NOs: 215 or a variant thereof; and (b) an engineered guide RNA, wherein the engineered guide RNA is configured to form a complex with the endonuclease and the engineered guide RNA comprises a spacer sequence configured to hybridize to a target nucleic acid sequence, wherein the system has reduced immunogenicity when administered to a human subject compared to an equivalent system comprising a Cas9 enzyme. In some embodiments, the Cas9 enzyme is an SpCas9 enzyme. In some embodiments, the guide RNA comprises a sequence with at least 80% sequence identity to the non-degenerate nucleotides of SEQ ID NO: 3609. In some embodiments, the immunogenicity is antibody immunogenicity.

[0039] An aspect of the present disclosure provides for a method of disrupting a mouse HAO-1 locus in a cell, comprising introducing to the cell: (a) a class 2, type V Cas endonuclease; and (b) an engineered guide RNA, wherein the engineered guide RNA is configured to form a complex with the endonuclease and the engineered guide RNA comprises a spacer sequence configured to hybridize to a region of the mouse HAO-1 locus, wherein the engineered guide RNA comprises the nucleotides of guide RNAs mH29-1_37, mH29-15_37, mH29-29_37 from Table 25 comprising the nucleotide modifications described in Table 25; or wherein the engineered guide RNA comprises any one of SEQ ID NOs: 4184-4225. In some embodiments, the class 2, type V Cas endonuclease comprises an endonuclease having at least 75% sequence identity to any one of SEQ ID NOs: 1-3470 or a variant thereof. In some embodiments, the class 2, type V Cas endonuclease comprises an endonuclease having at least 75% sequence identity to any one of SEQ ID NOs: 141, 215, 229, 261, or 1711-1722 or a variant thereof. In some embodiments, the engineered guide RNA comprises a sequence with at least about 80%, at least about 85%, at least about 90%, at least about 91%, at least about 92%, at least about 93%, at least about 94%, at least about 95%, at least about 96%, at least about 97%, at least about 98%, or at least about 99% sequence identity to the non-degenerate nucleotides of any one of SEQ ID NOs: 3471, 3551-3559, 3608-3609, 3612, 3636-3637, 3640-3641, 3644-3645, 3648-3649, 3652-3653, 3656-3657, 3660-3661, 3664-3667, 3671-3672, 3678, 3695-3696, 3729-3730, 3734-3735, 3851-3857, or 6033-6036. In some embodiments, the guide RNA comprises a sequence with at least 80% sequence identity to the non-degenerate nucleotides of SEQ ID NO: 3609. In some embodiments, the cell is a eukaryotic cell, hepatocyte, T-cell, hematopoietic stem cell, or precursor thereof. In some embodiments, the engineered guide RNA comprises the nucleotides of guide RNAs mH29-15_37 or mH29-29_37 from Table 25 comprising the nucleotide modifications described in Table 25. In some embodiments, the method further comprises disrupting expression of glycolate oxidase from the HAO-1 locus.

[0040] In some aspects, the present disclosure provides for a method of disrupting a human TRAC locus in a cell, comprising introducing to the cell: (a) a class 2, type V Cas endonuclease; and (b) an engineered guide RNA, wherein the engineered guide RNA is configured to form a complex with the endonuclease and the engineered guide RNA comprises a spacer sequence configured to hybridize to a region of the human TRAC locus, wherein the engineered guide RNA comprises the nucleotides of MG29-1-TRAC-sgRNA-35 from Table 28B comprising the nucleotide modifications described in Table 28B. In some embodiments, the class 2, type V Cas endonuclease comprises an endonuclease having at least 75% sequence identity to any one of SEQ ID NOs: 1-3470 or a variant thereof. In some embodiments, the class 2, type V Cas endonuclease comprises an endonuclease having at least 75% sequence identity to any one of SEQ ID NOs: 141, 215, 229, 261, or 1711-1722 or a variant thereof. In some embodiments, the engineered guide RNA comprises a sequence with at least about 80%, at least about 85%, at least about 90%, at least about 91%, at least about 92%, at least about 93%, at least about 94%, at least about 95%, at least about 96%, at least about 97%, at least about 98%, or at least about 99% sequence identity to the non-degenerate nucleotides of any one of SEQ ID NOs: 3471, 3551-3559, 3608-3609, 3612, 3636-3637, 3640-3641, 3644-3645, 3648-3649, 3652-3653, 3656-3657, 3660-3661, 3664-3667, 3671-3672, 3678, 3695-3696, 3729-3730, 3734-3735, 3851-3857, or 6033-6036. In some embodiments, the guide RNA comprises a sequence with at least 80% sequence identity to the non-degenerate nucleotides of SEQ ID NO: 3609. In some embodiments, the cell is a eukaryotic cell, hepatocyte, T-cell, hematopoietic stem cell, or precursor thereof.

[0041] An aspect of the present disclosure provides for a method of disrupting an albumin locus in a cell, comprising introducing to the cell: (a) a class 2, type V Cas endonuclease; and (b) an engineered guide RNA, wherein the engineered guide RNA is configured to form a complex with the endonuclease and the engineered guide RNA comprises a spacer sequence configured to hybridize to a region of the albumin locus, wherein the engineered guide RNA comprises the nucleotides of mA1b298-37, mA1b2912-37, mA1b2918-37, or mA1b298-34 from Table 29 comprising the nucleotide modifications described in Table 29; or wherein the engineered guide RNA comprises the nucleotides of mA1b29-8-44, mA1b29-8-50, mA1b29-8-50b, mA1b29-8-51b, mA1b29-8-52b, mA1b29-8-53b, or mA1b29-8-54b comprising the nucleotide modifications described in Table 46. In some embodiments, the class 2, type V Cas endonuclease comprises an endonuclease having at least 75% sequence identity to any one of SEQ ID NOs: 1-3470 or a variant thereof. In some embodiments, the class 2, type V Cas endonuclease comprises an endonuclease having at least 75% sequence identity to any one of SEQ ID NOs: 141, 215, 229, 261, or 1711-1722 or a variant thereof. In some embodiments, the engineered guide RNA comprises a sequence with at least about 80%, at least about 85%, at least about 90%, at least about 91%, at least about 92%, at least about 93%, at least about 94%, at least about 95%, at least about 96%, at least about 97%, at least about 98%, or at least about 99% sequence identity to the non-degenerate nucleotides of any one of SEQ ID NOs: 3471, 3551-3559, 3608-3609, 3612, 3636-3637, 3640-3641, 3644-3645, 3648-3649, 3652-3653, 3656-3657, 3660-3661, 3664-3667, 3671-3672, 3678, 3695-3696, 3729-3730, 3734-3735, 3851-3857, or 6033-6036. In some embodiments, the guide RNA comprises a sequence with at least 80% sequence identity to the non-degenerate nucleotides of SEQ ID NO: 3609. In some embodiments, the cell is a eukaryotic cell, hepatocyte, T-cell, hematopoietic stem cell, or precursor thereof. In some embodiments, the engineered guide RNA comprises the nucleotides of mA1b298-37, mA1b2912-37, mA1b2918-37, or mA1b298-34 from Table 29 comprising the nucleotide modifications described in Table 29.

[0042] In some aspects, the present disclosure provides for an engineered guide RNA comprising: (a) a DNA-targeting segment comprising a nucleotide sequence that is complementary to a target sequence in a target DNA molecule; and (b) a protein-binding segment configured to bind to a class 2, type V Cas endonuclease, and wherein the guide RNA comprises a nucleotide modification pattern depicted in any one of SEQ ID NOs: 5695-5701 in Table 34. In some embodiments, the guide RNA comprises mA1b29-8-44, mA1b29-8-50, mA1b29-8-37, or mA1b29-12-44. In some embodiments, the guide RNA comprises hH29-4_50, hH29-21_50, hH29-23_50, hH29-41_50, hH29-4_50b, hH29-21_50b, hH29-23_50b, or hH29-41_50b, mH29-1-50, mH29-15-50, mH29-29-50, mH29-1-50b, mH29-15-50b, or mH29-29-50b. In some embodiments, the DNA-targeting segment is configured to hybridize to an HAO-1 gene or an albumin gene. In some embodiments, the class 2, type V Cas endonuclease comprises an endonuclease having at least 75% sequence identity to any one of SEQ ID NOs: 141, 215, 229, 261, or 1711-1722 or a variant thereof. In some embodiments, the class 2, type V Cas endonuclease comprises an endonuclease having at least 75% sequence identity to SEQ ID NO: 215.

[0043] In some aspects, the present disclosure provides for an engineered nuclease system comprising: (a) an endonuclease having at least 75% sequence identity to any one of SEQ ID NOs: 1-3470 or a variant thereof, or a nucleotide sequence encoding the enonuclease; and (b) a polynucleotide sequence encoding a CRISPR array, wherein the CRISPR array is configured to be processed by the endonuclease to an engineered guide RNA, wherein the engineered guide RNA is configured to form a complex with the endonuclease and the engineered guide RNA comprises a spacer sequence configured to hybridize to a target nucleic acid sequence, wherein the spacer sequence is configured to hybridize to an albumin gene. In some embodiments, the polynucleotide sequence comprises a sequence having at least about 80%, at least about 85%, at least about 90%, at least about 91%, at least about 92%, at least about 93%, at least about 94%, at least about 95%, at least about 96%, at least about 97%, at least about 98%, or at least about 99% sequence identity to SEQ ID NO: 5712. In some embodiments, the endonuclease comprises an endonuclease having at least 75% sequence identity to any one of SEQ ID NOs: 141, 215, 229, 261, or 1711-1722 or a variant thereof. In some embodiments, the endonuclease comprises an endonuclease having at least 75% sequence identity to SEQ ID NO: 215.

[0044] In some aspects, the present disclosure provides for an engineered nuclease system comprising: (a) an endonuclease having at least 75% sequence identity to SEQ ID NOs: 470 or a variant thereof; and (b) an engineered guide RNA, wherein the engineered guide RNA is configured to form a complex with the endonuclease and the engineered guide RNA comprises a spacer sequence configured to hybridize to a target nucleic acid sequence. In some embodiments, the engineered guide RNA comprises a sequence having at least about 80%, at least about 85%, at least about 90%, at least about 91%, at least about 92%, at least about 93%, at least about 94%, at least about 95%, at least about 96%, at least about 97%, at least about 98%, or at least about 99% sequence identity to SEQ ID NO: 6031. In some embodiments, the endonuclease is configured to be selective for a 5′ PAM sequence comprising a sequence of YTn.

[0045] In some aspects, the present disclosure provides for an engineered nuclease system comprising: (a) an endonuclease having at least at least about 80%, at least about 85%, at least about 86%, at least about 87%, at least about 88%, at least about 89%, at least about 90%, at least about 91%, at least about 92%, at least about 93%, at least about 94%, at least about 95%, at least about 96%, at least about 97%, at least about 98%, or at least about 99% sequence identity to any one of SEQ ID NOs: 2824, 2841, or 2896, or a variant thereof; and (b) an engineered guide RNA, wherein the engineered guide RNA is configured to form a complex with the endonuclease and the engineered guide RNA comprises a spacer sequence configured to hybridize to a target nucleic acid sequence, wherein the engineered guide RNA comprises a sequence having at least about 80%, at least about 85%, at least about 90%, at least about 91%, at least about 92%, at least about 93%, at least about 94%, at least about 95%, at least about 96%, at least about 97%, at least about 98%, or at least about 99% sequence identity to any one of SEQ ID NOs: 6033, 6034, or 6035. In some embodiments, the endonuclease has at least 80% sequence identity to SEQ ID NO: 2824 and the engineered guide RNA has at least 80% sequence identity to SEQ ID NO: 6033. In some embodiments, the endonuclease has at least 80% sequence identity to SEQ ID NO: 2841 and the engineered guide RNA has at least 80% sequence identity to SEQ ID NO: 6034. In some embodiments, the endonuclease has at least 80% sequence identity to SEQ ID NO: 2896 and the engineered guide RNA has at least 80% sequence identity to SEQ ID NO: 6035. In some embodiments, the endonuclease is configured to be selective for a 5′ PAM sequence comprising any one of Sequence Numbers: A6037-A6039.

[0046] In some aspects, the present disclosure provides for a lipid nanoparticle comprising: (a) any of the endonucleases described herein; (b) any of the engineered guide RNAs described herein: (c) a cationic lipid; (d) a sterol; (e) a neutral lipid; and (f) a PEG-modified lipid. In some embodiments, the cationic lipid comprises C12-200, the sterol comprises cholesterol, the neutral lipid comprises DOPE, or the PEG-modified lipid comprises DMG-PEG2000. In some embodiments, the cationic lipid comprises any of the cationic lipids depicted in FIG. 109.

[0047] Additional aspects and advantages of the present disclosure will become readily apparent to those skilled in this art from the following detailed description, wherein only illustrative embodiments of the present disclosure are shown and described. As will be realized, the present disclosure is capable of other and different embodiments, and its several details are capable of modifications in various obvious respects, all without departing from the disclosure. Accordingly, the drawings and description are to be regarded as illustrative in nature, and not as restrictive.

### INCORPORATION BY REFERENCE

[0048] All publications, patents, and patent applications mentioned in this specification are herein incorporated by reference to the same extent as if each individual publication, patent, or patent application was specifically and individually indicated to be incorporated by reference.

### BRIEF DESCRIPTION OF THE DRAWINGS

[0049] The novel features of the invention are set forth with particularity in the appended claims. A better understanding of the features and advantages of the present invention will be obtained by reference to the following detailed description that sets forth illustrative embodiments, in which the principles of the invention are utilized, and the accompanying drawings of which:

[0050] FIG. 1 depicts example organizations of CRISPR/Cas loci of different classes and types that were previously documented before this disclosure.

[0051] FIG. 2 depicts environmental distribution of MG nucleases described herein. Protein length is shown for representatives of the MG29 protein family. Shades of circle indicates the environment or environment type from which each protein was identified (dark gray circle indicates high temperature environment source; light gray circle indicates non-high temperature environment source). N/A denotes the type of environment the sample was collected from is unknown.

[0052] FIG. 3 depicts the number of predicted catalytic residues present in MG nucleases detected from sample types described herein (e.g. FIG.). Protein length is shown for representatives of the MG29 protein family. The number of catalytic residues that were predicted for each protein are indicated in the figure legend (3.0 residues). The first, second and third catalytic residues are located in the RuvCI domain, the RuvCII domain and the RuvCIII domain, respectively.

[0053] FIGS. 4A and 4B show the diversity of CRISPR Type V-A effectors. FIG. 4A depicts per family distribution of taxonomic classification of contigs encoding the novel Type V-A effectors. FIG. 4B depicts the phylogenetic gene tree inferred from an alignment of 119 novel and 89 reference Type V effector sequences. MG families are denoted in parentheses. PAM requirements for active nucleases are outlined with boxes associated with the family. Non-Type V-A reference sequences were used to root the tree (*MG61 family requires a crRNA with an alternative stem-loop sequence).

[0054] FIGS. 5A, 5B, 5C, and 5D provide various characteristic information about nucleases described herein. FIG. 5A depicts the per family distribution of effector protein length and the type of sample; FIG. 5B shows the presence of RuvC catalytic residues. FIG. 5C shows the number of CRISPR arrays having various repeat motifs. FIG. 5D depicts the per family distribution of repeat motifs.

[0055] FIGS. 6A and 6B depict multiple sequence alignment of catalytic and PAM interacting regions in Type V-A sequences. Francisella novicida Cas12a (FnCas12) is a reference sequence. Other reference sequences are Acidaminococcus sp. (AsCas12a), Moraxella bovoculi (MbCas12a), and Lachnospiraceae bacterium ND2006 (LbCas12a). FIG. 6A shows blocks of conservation around the DED catalytic residues in RuvC-I (left), RuvC-II (middle), and RuvC-III (right) regions. FIG. 6B shows WED-II and PAM interacting regions containing residues involved in PAM recognition and interaction. The grey boxes underneath the FnCas12a sequence identify the domains. Darker boxes in the alignments indicate increased sequence identity. Black boxes over the FnCas12a sequence indicate catalytic residues (and positions) of the reference sequence. Grey boxes indicate domains in the reference sequence at the top of the alignment (FnCas12a). Black boxes indicate catalytic residues (and positions) of the reference sequence.

[0056] FIGS. 7A and 7B depicts Type V-A and associated V-A′ effectors. FIG. 7A shows Type V-A (MG26-1) and V-A′ (MG26-2) indicated by arrows pointing in the direction of transcription. The CRISPR array is indicated by a gray bar. Predicted domains for each protein in the contig are indicated by boxes. FIG. 7B shows sequence alignments of Type V-A′ MG26-2 and AsCas12a reference sequence. Top: RuvC-I domain. Middle: region containing the RuvC-I and RuvC-II catalytic residues. Bottom: region containing the RuvC-III catalytic residue. Catalytic residues are indicated by squares.

[0057] FIG. 8 depicts a schematic representation of the structure of a sgRNA and a target DNA in a ternary complex with AacC2C1 (see Yang, Hui, Pu Gao, Kanagalaghatta R. Rajashankar, and Dinshaw J. Patel. 2016. “PAM-Dependent Target DNA Recognition and Cleavage by C2c1 CRISPR-Cas Endonuclease.” Cell 167 (7): 1814-28.e12 which is incorporated by reference herein in its entirety).

[0058] FIG. 9 depicts the effects of mutations or truncations in the R-AR domains of an sgRNA on AacC2c1-mediated cleavage of linear plasmid DNA; WT, wild-type sgRNA. The mutant nucleotides within sgRNA (lanes 1-5) are highlighted in the left panel. Δ15: 15 nt deleted from the sgRNA R-AR 1 region. Δ12: 12 nt have been removed from the sgRNA J2/4 R-AR 1 region (see Liu, Liang, Peng Chen, Min Wang, Xueyan Li, Jiuyu Wang, Maolu Yin, and Yanli Wang. 2017. “C2c1-sgRNA Complex Structure Reveals RNA-Guided DNA Cleavage Mechanism.” Molecular Cell 65 (2): 310-22 which is incorporated by reference herein in its entirety).

[0059] FIGS. 10A, 10B, and 10C demonstrate that the CRISPR RNA (crRNA) structure is conserved among Type V-A systems. FIG. 10A shows the fold structure of the reference crRNA sequence in the LbCpf1 system. FIG. 10B shows multiple sequence alignment of CRISPR repeats associated with novel Type V-A systems. The LbCpf1 processing site is indicated with a black bar. FIG. 10C shows the fold structure of MG61-2 putative crRNA with an alternative stem-loop motif CCUGC[N₃₋₄]GCAGG. FIG. 10D shows multiple sequence alignment of CRISPR repeats with the alternative repeat motif sequence. The processing sites and loop are indicated.

[0060] FIG. 11 depicts a predicted structure of a guide RNA utilized herein (SEQ ID NO: 3608).

[0061] FIG. 12 depicts predicted structures of corresponding sgRNAs of MG enzymes described herein (clockwise, SEQ ID NOs: 3636, 3637, 3641, 3640).

[0062] FIG. 13 depicts predicted structures of corresponding sgRNAs of MG enzymes described herein (clockwise, SEQ ID NOs: 3644, 3645, 3649, 3648).

[0063] FIG. 14 depicts predicted structures of corresponding sgRNAs of MG enzymes described herein (clockwise, SEQ ID NOs: 3652, 3653, 3657, 3656).

[0064] FIG. 15 depicts predicted structures of corresponding sgRNAs of MG enzymes described herein (clockwise, SEQ ID NOs: 3660, 3661, 3665, 3664).

[0065] FIG. 16 depicts predicted structures of corresponding sgRNAs of MG enzymes described herein (clockwise, SEQ ID NOs: 3666, 3667, 3672, 3671).

[0066] FIGS. 17A and 17B depict an agarose gel showing the results of PAM vector library cleavage in the presence of TXTL extracts containing various MG family nucleases and their corresponding tracrRNA or sgRNAs (as described in Example 12). FIG. 17A shows lane 1: ladder. The bands are, from top to bottom, 766, 500, 350, 300, 350, 200, 150, 100, 75, 50; lane 2: 28-1+MGcrRNA spacer1 (SEQ ID NOs: 141+3860); lane 3: 29-1+MGcrRNA spacer1 (SEQ ID NOs: 215+3860); lane 4: 30-1+MGcrRNA spacer1 (SEQ ID NOs:226+3860); lane 5: 31-1+MGcrRNA spacer1 (SEQ ID NOs: 229+3860); lane 6: 32-1+MGcrRNA spacer1 (SEQ ID NOs: 261+3860); lane 7: ladder. FIG. 17B shows lane 1: ladder; lane 2: LbaCas12a+LbaCas12a crRNA spacer2; lane 3: LbaCas12a+MGcrRNA spacer2; lane 4: Apo 13-1; lane 5: 28-1+MGcrRNA spacer2 (SEQ ID NOs: 141+3861); lane 6: 29-1+MGcrRNA spacer2 (SEQ ID NOs: 215+3861); lane 7: 30-1+MGcrRNA spacer2 (SEQ ID NOs: 226+3861); lane 8: 31-1+MGcrRNA spacer2 (SEQ ID NOs: 229+3861); lane 9: 32-1+MGcrRNA spacer2 (SEQ ID NOs: 261+3861)

[0067] FIGS. 18A, 18B, 18C, 18D, and 18E provide data showing that type V-A effectors described herein are active nucleases. FIG. 18A depicts seqLogo representations of PAM sequences determined for three nucleases described herein. FIG. 18B shows a boxplot of plasmid transfection activity assays inferred from frequency of indel edits for active nucleases. The boundaries of the boxplots indicate first and third quartile values. The mean is indicated with an “x” and the median is represented by the midline within each box. FIG. 18C shows plasmid transfection editing frequencies at four target sites for MG29-1 and AsCas12a. One side-by-side experiment with AsCas12a was done. FIG. 18D shows plasmid and RNP editing activity for nuclease MG29-1 at 14 target loci with either TIN or CCN PAMs. FIG. 18E shows the editing profile of nuclease MG29-1 from RNP transfection assays. One side-by-side experiment with AsCas12a was done. Editing frequency and profile experiments for MG29-1 were done in duplicate. The bar plots FIG. 18C and FIG. 18D show mean editing frequency with one standard deviation error bar.

[0068] FIG. 19 depicts in cell indel formation generated by transfection of HEK cells with MG29-1 constructs described in Example 12 alongside their corresponding sgRNAs containing various different targeting sequences targeting various locations in the human genome.

[0069] FIG. 20 depicts seqLogo representations of PAM sequences of specific MG family enzymes derived via NGS as described herein (as described in Example 13).

[0070] FIG. 21 depict seqLogo representations of PAM sequences of specific MG family enzymes derived via NGS as described herein (top to bottom, Sequence Numbers: A3865, A3867, A3872).

[0071] FIG. 22 depict seqLogo representations of PAM sequences derived via NGS as described herein (top to bottom, Sequence Numbers: A3879, A3880, A3881).

[0072] FIG. 23 depict seqLogo representations of PAM sequences derived via NGS as described herein (top to bottom, Sequence Numbers: A3883, A3884, A3885).

[0073] FIG. 24 depict seqLogo representations of PAM sequences derived via NGS as described herein (Sequence Number: A3882).

[0074] FIG. 25 depicts in cell indel formation generated by transfection of HEK cells with MG31-1 constructs described in Example 14 alongside their corresponding sgRNAs containing various different targeting sequences targeting various locations in the human genome.

[0075] FIGS. 26A, 26B, and 26C shows the biochemical characterization of Type V-A nucleases. FIG. 26A shows PCR of cleavage products with adaptors ligated to their ends shows activity of nucleases described herein and Cpf1 (positive control) when bound to a universal crRNA. Expected cleavage product band labeled with an arrow. FIG. 26B shows PCR of cleavage products with adaptors ligated to their ends show activity of nucleases described herein when bound to their native crRNA. Cleavage product band indicated with an arrow. FIG. 26C shows analysis of the NGS cut sites shows cleavage on the target strand at position 22, sometimes with less frequent cleavage after 21 or 23 nt.

[0076] FIGS. 27A and 27B depict multiple sequence alignments of Type V-L nucleases described herein, showing (FIG. 27A) an example locus organization for a Type V-L nuclease, and (FIG. 27B) a multiple sequence alignment. Regions containing putative RuvC-III domains are shown as light grey rectangles. Putative RuvC catalytic residues are shown as small dark grey rectangles above each sequence. Putative single-guide RNA binding sequences are small white rectangles, putative scissile phosphate binding sites are indicated by black rectangles above sequences, and residues predicted to disrupt base stacking near the scissile phosphate in the target sequence are indicated by small medium-grey rectangles above sequences.

[0077] FIG. 28 shows a Type V-L candidate labeled MG60 as an example locus organization alongside an effector repeat structure and a phylogenetic tree showing the location of the enzyme in the Type V families.

[0078] FIG. 29 shows examples of smaller Type V effectors one of which may be labeled as MG70.

[0079] FIG. 30 shows characteristic information of MG70 as described herein. Depicted is an example locus organization alongside a phylogenetic tree illustrating the location of these enzymes in the Type V family.

[0080] FIG. 31 shows another example of a small Type V effector MG81 as described herein. Depicted is an example locus organization alongside a phylogenetic tree illustrating the location of these enzymes in the Type V family.

[0081] FIG. 32 shows that the activity individual enzymes of Type V effector families identified herein (e.g. MG20, MG60, MG70, other) is maintained over a variety of different enzyme lengths (e.g. 400-1200 AA). Light dots (True) indicate active enzymes while dark dots (unknown) indicate untested enzymes.

[0082] FIG. 33 depicts sequence conservation of MG nucleases described herein. The black bars indicate putative RuvC catalytic residues.

[0083] FIG. 34 and FIG. 35 depict an enlarged version of multiple sequence alignments in FIG. 33 of regions of the MG nucleases described herein containing putative RuvC catalytic residues (dark-grey rectangles), scissile phosphate-binding residues (black rectangles), and residues predicted to disrupt base stacking adjacent to the scissile phosphate (light-grey rectangles).

[0084] FIG. 36 depicts the regions of the MG nucleases described herein containing putative RuvC-III domain & catalytic residues.

[0085] FIG. 37 depicts regions of the MG nucleases containing putative single-guide RNA-binding residues (white rectangles above sequences).

[0086] FIG. 38 depicts multiple protein sequence alignment of representatives from several MG type V Families. Shown are conserved regions containing portions of the RuvC domain predicted to be involved in nuclease activity. Predicted catalytic residues are highlighted.

[0087] FIG. 39 shows a screen of the TRAC locus for MG29-1 gene editing. A bar graph shows indel creation resulting from transfection of MG29-1 with 54 separate guide RNAs targeting the TRAC locus in primary human T cells. The corresponding guide RNAs depicted in the figure are identified in SEQ ID NOs: 4316-4423.

[0088] FIG. 40 depicts the optimization of MG29-1 editing at TRAC. A bar graph shows indel creation resulting from transfection of MG29-1 (at the indicated concentrations) with the four best 22 nt guide RNAs from FIG. 39 (9, 19, 25, and 35). Legend: MG29-1 9 is MG29-1 effector (SEQ ID NO: 215) and Guide 9 (SEQ ID NO: 4378), MG29-1 19 is MG29-1 effector (SEQ ID NO: 215) and Guide 19 (SEQ ID NO: 4388), MG29-1 25 is MG29-1 effector (SEQ ID NO: 215) and Guide 25 (SEQ ID NO: 4394), and MG29-1 35 is MG29-1 effector (SEQ ID NO: 215) and Guide 35 (SEQ ID NO: 4404).

[0089] FIG. 41 depicts the optimization of dose and guide length for MG29-1 editing at TRAC. Line graphs show the indel creation resulting from transfection of MG29-1 and either guide RNA #19 (SEQ ID NO: 4388) or guide RNA #35 (SEQ ID NO: 4404). Three different doses of nuclease/guide RNA were used. For each dose, six different guide lengths were tested, successive one-nucleotide 3′ truncations of SEQ ID NOs: 4388 and 4404. The guides used in FIG. 39 and FIG. 40 are the 22 nt-long spacer-containing guides in this case.

[0090] FIG. 42 shows a correlation of indel generation at TRAC and loss of the T cell receptor expression in the Experiment of Example 22.

[0091] FIG. 43 depicts targeted transgene integration at TRAC stimulated by MG29-1 cleavage. Cells receiving transgene donor alone by AAV infection retain TCR expression and lack CAR expression; cells transfected with MG29-1 RNPs and infected with 100,000 vg (vector genomes) of a CAR transgene donor lose TCR expression and gain CAR expression. Shown are FACS plots of CAR antigen binding vs TCR expression for cells transfected with AAV alone containing the CAR-T-containing donor sequence (“AAV”); AAV containing the CAR-T-containing donor sequence with MG29-1 enzyme and sgRNA 19 (SEQ ID NO: 4388) (“AAV+MG29-1-19-22” comprising a 22 nucleotide spacer), or AAV containing the CAR-T-containing donor sequence with MG29-1 enzyme and sgRNA 35 (SEQ ID NO: 4404) (“AAV+MG29-1-35-22” comprising a 22 nucleotide spacer).

[0092] FIG. 44 shows MG29-1 gene editing at TRAC in hematopoietic stem cells. A bar graph shows the extent of indel creation at TRAC after transfection with MG29-1-9-22 (“MG29-1 9”; MG29-1 plus guide RNA #19) and MG29-1-35-22 (“MG29-1 35”; MG29-1 plus guide RNA #35) compared to mock-transfected cells.

[0093] FIG. 45 shows the refinement of the MG29-1 PAM based on analysis of gene editing outcomes in cells. Guide RNAs were designed using a 5′-NTTN-3′ PAM sequence and then sorted according to the gene editing activity observed. The identity of the underlined base (the 5′-proximal N) is shown for each bin. All of the guides with activity greater than 10% had a T at this position in the genomic DNA indicating that the MG29-1 PAM may be best described as 5′-TTTN-3′. The statistical significance of the over-representation of T at this position is shown for each bin.

[0094] FIG. 46 depicts the analysis of gene editing activity versus the base composition of MG29-1 spacer sequences. A bar graph shows experimental data illustrating a relationship between GC content (%) and indel frequency (“high” signifies >50% indels (N=4); “medium” signifies 10-50% indels (N=15); “>1%” signifies 1-5% indels (N=12); “<1%” signifies less than 1% indels (N=82)).

[0095] FIG. 47 depicts MG29-1 guide RNA chemical modifications. The bar graph shows the consequences of modifications from Table 7 on VEGF-A editing activity relative to an unmodified guide RNA (sample #1).

[0096] FIG. 48 depicts a dose titration of a variously chemically modified MG29-1 RNA. The bar graphs show indel generation after transfection of RNPs with guides using modification patterns 1, 4, 5, 7, and 8. RNPs doses were 126 pmol MG29-1 and 160 pmol guide RNA or as indicated. Full dose (A), ¼th (B), ⅛th (C), 1/16th (D), and 1/32nd (E).

[0097] FIG. 49 depicts a plasmid map of pMG450 (MG29-1 nuclease protein in lac inducible tac promoter E. coli BL21 expression vector.

[0098] FIG. 50 depicts the indel profile of MG29-1 with spacer mALb29-1-8 (SEQ ID NO: 3999) compared to spCas9 with a guide targeting mouse albumin intron 1.

[0099] FIG. 51 is a representative indel profile of MG29-1 with a guide targeting mouse albumin intron 1 determined by next generation sequencing (approximately 15,000 total reads analyzed) as in Example 29.

[0100] FIG. 52 shows the editing efficiency of MG29-1 compared to spCas9 in mouse liver cell line Hepa1-6 nucleofected with RNP as in Example 29.

[0101] FIGS. 53A, 53B, 53C, and 53D show the editing efficiencies in mammalian cells of MG29-1 variants with single and double amino acid substitutions compared to wild type MG29-1. FIG. 53A depicts editing efficiency in Hepa 1-6 cells transfected with plasmids codifying for MG29-1 WT or mutant versions. FIG. 53B depicts Editing efficiency in Hepa 1-6 cells transfected with mRNA encoding WT or S168R at various concentrations. FIG. 53C depicts the editing efficiency in Hepa 1-6 cells transfected with mRNA codifying versions of MG29-1 with single or double amino acid substitutions. FIG. 53D depicts the editing efficiency in Hepa 1-6 and HEK293T cells transfected with MG29-1 WT vs S168R in combination with 13 guides. 12 guides correspond to guides in Table 7. Guide “35 (TRAC)” is a guide targeting the human locus TRAC.

[0102] FIG. 54 shows the predicted secondary structure of the MG29-1 guide mA1b29-1-8.

[0103] FIG. 55 shows the impact of chemical modifications of the MG29-1 sgRNA sequence upon the stability of the sgRNA in whole cell extracts of mammalian cells.

[0104] FIGS. 56A, 56B, and 56C show the use of sequencing to identify the cut site on the target strand in an in vitro reaction performed with MG29-1 protein, a guide RNA, and an appropriate template. FIG. 56A shows the distance of the cut position from the PAM in nucleotides as determined by next generation sequencing. FIG. 56B shows the use of Sanger Sequencing to define the MG29-1 cut site on the target strand. FIG. 56C shows the use of Sanger Sequencing to define the MG29-1 cut site on the non-target strand. Run-off Sanger sequencing was performed on in vitro reactions containing MG29-1, a guide, and an appropriate template to evaluate the cleavage of both strands. The cleavage site on the target strand is position 23 which is consistent with the NGS data in FIG. 56A which shows cleavage at 21-23 bases. The “A” peak at the end of the sequence is due to polymerase run off and is expected. The cleavage site on the non-target strand can be seen in the reverse read in which the expected terminating base is “T”. The marked spot (line) shows cleavage at position 17 from the PAM and then the terminal T. However, there is a mixed T signal at positions 18, 19, and 20 from the PAM suggesting variable cleavage on this strand at positions 17, 18, and 19.

[0105] FIG. 57 depicts the gene editing outcomes at the DNA level for CD38. S. pyogenes (Spy) Cas9 guides for CD38 and TRAC are shown at right.

[0106] FIG. 58 depicts the gene editing outcomes at the phenotypic level for CD38.

[0107] FIG. 59 depicts the gene editing outcomes at the DNA level for TIGIT.

[0108] FIG. 60 depicts the gene editing outcomes at the DNA level for AAVS1.

[0109] FIG. 61 depicts the gene editing outcomes at the DNA level for B2M.

[0110] FIG. 62 depicts the gene editing outcomes at the DNA level for CD2.

[0111] FIG. 63 depicts the gene editing outcomes at the DNA level for CD5.

[0112] FIG. 64A depicts the gene editing outcomes at the DNA level for mouse TRAC. FIG. 64B depicts the flow cytometry results for gene editing of mouse TRAC.

[0113] FIG. 65 depicts the percentage of TRAC knock-out versus the percentage of indels.

[0114] FIG. 66A depicts the gene editing outcomes at the DNA level for mouse TRBC1. FIG. 66B depicts the gene editing outcomes at the DNA level for mouse TRBC2. FIG. 66C depicts the flow cytometry results for gene editing of human TRBC1/2.

[0115] FIG. 67 depicts the gene editing outcomes at the DNA level for HPRT.

[0116] FIG. 68 depicts the activity of chemically modified guides in Hepa1-6 cells when delivered as mRNA and gRNA using lipofectamine Messenger Max.

[0117] FIG. 69 depicts the stability of guides modified with modification 44 versus end-modified or unmodified guides.

[0118] FIGS. 70A and 70B depict a comparison of guide stability for Type II and Type V systems. FIG. 70A depicts stability data for unmodified guides. FIG. 70B depicts stability data for guides with 5′ and 3′ end modifications.

[0119] FIG. 71 depicts the predicted secondary structures of MG29-1 (Type V) and MG3-6/3-4 (Type II) guide RNA. The backbone (tracr) portion is shown.

[0120] FIG. 72 depicts the stability of guide mA1b298-34 compared to mA1b298-37 in cell lysates from Hepa1-6 cells.

[0121] FIG. 73 depicts the editing efficiency of MG29-1 in mouse liver following in vivo delivery.

[0122] FIG. 74 depicts analysis of gene-editing outcomes by NGS for mRNA electroporation in T cells.

[0123] FIG. 75 depicts analysis of gene-editing outcomes by NGS for chemically modified guides.

[0124] FIG. 76 depicts ELISA results from a screen performed at a serum dilution of 1:50 to detect antibodies against MG29-1 (n=50). Tetanus toxoid was used as the positive control due to wide-spread vaccination against this antigen. Serum samples above the dashed line were considered antibody-positive; the line represents the mean absorbance of the negative control (human albumin) plus two standard deviations from the mean. *P<0.05, **P<0.01, ****P<0.0001 as determined by an unpaired Student's t-test; ns, not significant.

[0125] FIG. 77 depicts HAO-1 editing efficiency in mouse liver as measured by NGS. Each point represents an individual mouse.

[0126] FIGS. 78A-B depict the effects of HAO-1 editing on glycolate oxidase (GO) protein levels in mouse liver as evaluated by Western Blot. 10 μg of total protein was loaded for each sample.

[0127] FIG. 79 depicts Western Blot analysis of glycolate oxidase (GO) protein levels in an untreated mouse compared to two individual mice treated with lipid nanoparticles (LNPs) encapsulating MG29-1 mRNA and either guide mH29-1_37 or mH29-5_37. Three different amounts of total liver protein (40 μg, 20 μg, and 10 μg) from each mouse were loaded on the gel then processed for detection of the mouse glycolate oxidase protein.

[0128] FIG. 80 depicts an example INDEL profile for MG29-1 and an sgRNA targeting the HAO-1 gene in mouse liver. The sample was taken from mouse #17 (treated with a lipid nanoparticle encapsulating mH29-29_37 and MG29-1 WT mRNA).

[0129] FIG. 81 depicts the gene editing outcomes at the DNA level for TRAC in human peripheral blood B cells.

[0130] FIG. 82 depicts the gene editing outcomes at the DNA level for TRAC in hematopoietic stem cells.

[0131] FIG. 83 depicts the gene editing outcomes at the DNA level for TRAC in induced pluripotent stem cells (iPSCs).

[0132] FIG. 84 depicts the results of in vivo genome editing with MG29-1 as quantified by next generation sequencing (NGS).

[0133] FIG. 85 depicts an example INDEL profile generated by the MG29-1 nuclease and guide 298-37 as measured by next generation sequencing (NGS).

[0134] FIG. 86 depicts spacer length optimization for MG29-1 guides targeting two loci.

[0135] FIG. 87 depicts in vitro stability of sgRNAs for MG29-1 and MG3-6/3-4.

[0136] FIG. 88 depicts the predicted secondary structures of the backbone parts of the guide RNA for MG29-1 and MG3-6/3-4.

[0137] FIG. 89 depicts the predicted secondary structure of an MG3-6/3-4 guide with a spacer targeting mouse albumin.

[0138] FIG. 90 depicts the predicted secondary structure of an MG29-1 guide with stem-loop 1 from MG3-6/3-4 added to the 5′ end.

[0139] FIG. 91 depicts the editing efficiency of MG29-1 with mouse albumin guide 8 with chemistries 44 or 50 in Hepa1-6 cells by mRNA transfection or RNP nucleofection.

[0140] FIG. 92 depicts editing in the liver of mice after dosing with LNP encapsulating MG29-1 mRNA and one of four different guide RNAs.

[0141] FIG. 93 depicts the predicted secondary structure of the RNA molecule mA1b29-g8-37-array.

[0142] FIG. 94 depicts a plot showing editing efficiency in the whole liver of mice at 5 days after intravenous injection of LNP encapsulating one of: (1) MG29-1 mRNA and guide mA1b29-8-50 (mA29-8-50) at three different doses; (2) spCas9 mRNA and guide mA1bR2 at three different doses; or (3) PBS buffer (Control). Each circle represents a single mouse and the bars indicate the mean and standard deviation.

[0143] FIG. 95 depicts editing activity in Hep3B cells transfected with MG29-1 mRNA and 6 sgRNA targeting human HAO-1.

[0144] FIG. 96 depicts editing Activity of 4 MG29-1 sgRNA targeting human HAO-1 in HuH7 and Hep3B cells transfected with Ribonuclear Protein Complexes.

[0145] FIG. 97 depicts editing activity of MG29-1 with sgRNA targeting the human HAO-1 gene in primary human hepatocytes.

[0146] FIG. 98A depicts a representative indel profile for MG29-1 sgRNAs hH29-4-37 and hH29-21-37 in Primary Human Hepatocytes. FIG. 98B depicts a representative indel profile for MG29-1 sgRNAs hH29-23-37 and hH29-41-37 in Primary Human Hepatocytes.

[0147] FIG. 99 depicts the activity of MG29-1 guide RNAs with 22 nucleotide or 20 nucleotide spacers targeting mouse HAO-1 in mouse liver.

[0148] FIG. 100 depicts the impact of the mRNA/guide RNA ratio and separate or co-formulation on editing efficiency in mouse liver.

[0149] FIG. 101 depicts the evaluation of MG29-1 guide chemistries on editing activity in the liver of mice after in vivo delivery in LNP.

[0150] FIG. 102 depicts the gene-editing outcomes at the DNA level for APO-A1 in Hepa1-6 cells.

[0151] FIG. 103 depicts the gene-editing outcomes at the DNA level for ANGPTL3 in Hepa1-6 cells.

[0152] FIG. 104A-E depicts in vitro characterization of MG55-43. FIG. 104A shows the genomic region in the vicinity of the MG55-43 nuclease. Genes are represented by orange arrows. The gene encoding the candidate nuclease includes a “putative transposase DNA-binding domain”. The CRISPR array is represented by repeats and spacers. The predicted tracrRNA is shown as an arrow between the array and the nuclease and labeled “Predicted-trimmed-TracrRNA-CM2”. FIG. 104B shows active single guide RNA design (tracrRNA and repeat sequences connected by a tetraloop). The color of the nitrogenated bases corresponds to the probability of base pairing of that base, where red is high probability and blue is low probability.

[0153] FIG. 104C shows an agarose gel showing in vitro cleavage of plasmid target DNA library with the sgRNA and two different spacers (U67 and U40). Lanes that are not related to the MG55-43 nuclease are not shown. FIG. 104D shows sequence logo showing the MG55-43 PAM sequence.

[0154] FIG. 104E shows a histogram showing the cut site position in the spacer sequence tested with MG55-43.

[0155] FIG. 105A-C depicts examples of genomic regions encoding MG91 nucleases. Genes are represented by arrows with genes encoding candidate nuclease labeled as such. The CRISPR array is represented by repeats and spacers. Intergenic regions potentially encoding active tracrRNAs are highlighted as bars labeled IG # or Intergenic region #.

[0156] FIG. 106 depicts multiple sequence alignments of intergenic region nucleotide sequences potentially containing tracrRNAs. Green bars on top indicate a high degree of similarity among the sequence of the intergenic regions. FIG. 106A shows intergenic region 2 in the vicinity of the MG91-15 nuclease and its relatives. FIG. 106B shows intergenic region 2 in the vicinity of the MG91-32 nuclease and its relatives. FIG. 106C shows intergenic region 2 in the vicinity of the MG91-87 nuclease and its relatives.

[0157] FIG. 107A-D depicts single guide RNA designs and in vitro cleavage assay results. For the single guide RNA designs (tracrRNA and repeat sequences), the color of the bases corresponds to the probability of base pairing of that base, where red is high probability and blue is low probability. FIG. 107A depicts MG91-15 sgRNA1, FIG. 107B depicts MG91-32 sgRNA1, and FIG. 107C depicts MG91-87 sgRNA1. FIG. 107D depicts an agarose gel showing in vitro cleavage of plasmid target DNA library with different sgRNA designs (sgRNA1 and sgRNA2) and two different spacers (U67 and U40). Lanes that are not related to these nucleases are not shown.

[0158] FIG. 108A-F depicts sequence logos of predicted PAM sequence and histograms showing cut site position. FIGS. 108A, 108B, and 108C depict sequence logos showing the PAM sequences of MG91-15, MG91-32, and MG91-87, respectively. FIGS. 108D, 108E, and 108F depict histograms showing the cut site positions in the spacer sequences tested with MG91-15, MG91-32, and MG91-87, respectively.

[0159] FIG. 109 depicts structures of example cationic lipids that can be used in lipid nanoparticles described herein.

### BRIEF DESCRIPTION OF THE SEQUENCE LISTING

[0160] The Sequence Listing filed herewith provides exemplary polynucleotide and polypeptide sequences for use in methods, compositions, and systems according to the disclosure. Below are exemplary descriptions of sequences therein.

### MG11

[0161] SEQ ID NOs: 1-37 show the full-length peptide sequences of MG11 nucleases.

[0162] SEQ ID NO: 3471 shows a crRNA 5′ direct repeats designed to function with an MG11 nuclease.

[0163] SEQ ID NOs: 3472-3538 show effector repeat motifs of MG11 nucleases.

[0164] SEQ ID NOs: 38-118 show the full-length peptide sequences of MG13 nucleases.

[0165] SEQ ID NO: 3540-3550 show effector repeat motifs of MG13 nucleases.

### MG19

[0166] SEQ ID NOs: 119-124 show the full-length peptide sequences of MG19 nucleases.

[0167] SEQ ID NOs: 3551-3558 show the nucleotide sequences of sgRNAs engineered to function with a MG19 nuclease.

[0168] Sequence Numbers: A3863-A3866 show PAM sequences compatible with MG19 nucleases.

### MG20

[0169] SEQ ID NO: 125 shows the full-length peptide sequence of a MG20 nuclease.

[0170] SEQ ID NO: 3559 shows the nucleotide sequence of a sgRNA engineered to function with a MG20 nuclease.

[0171] Sequence Number: A3867 shows a PAM sequence compatible with an MG20 nuclease.

### MG26

[0172] SEQ ID NOs: 126-140 show the full-length peptide sequences of MG26 nucleases.

[0173] SEQ ID NOs: 3560-3572 show effector repeat motifs of MG26 nucleases.

### MG28

[0174] SEQ ID NOs: 141-214 show the full-length peptide sequences of MG28 nucleases.

[0175] SEQ ID NOs: 3573-3607 show effector repeat motifs of MG28 nucleases.

[0176] SEQ ID NOs: 3608-3609 show crRNA 5′ direct repeats designed to function with an MG28 nuclease.

[0177] Sequence Numbers: A3868-A3869 shows a PAM sequence compatible with an MG28 nuclease.

### MG29

[0178] SEQ ID NOs: 215-225 show the full-length peptide sequences of MG29 nucleases.

[0179] SEQ ID NO: 5680 shows the nucleotide sequence of an MG29-1 nuclease containing 5′ UTR, NLS, CDS, NLS, 3′ UTR, and polyA tail.

[0180] SEQ ID NOs: 3610-3611 show effector repeat motifs of MG29 nucleases.

[0181] SEQ ID NO: 3612 shows the nucleotide sequence of a sgRNA engineered to function with a MG29 nuclease.

[0182] Sequence Numbers: A3870-A3872 show PAM sequences compatible with an MG29 nuclease.

[0183] SEQ ID NO: 5687 shows an MG29-1 coding sequence used for the generation of mRNA.

[0184] SEQ ID NOs: 5830 and 5846 show DNA sequences encoding MG29-1 mRNAs.

### MG30

[0185] SEQ ID NOs: 226-228 show the full-length peptide sequences of MG30 nucleases.

[0186] SEQ ID NOs: 3613-3615 show effector repeat motifs of MG30 nucleases.

[0187] Sequence Number: A3873 shows a PAM sequence compatible with an MG30 nuclease.

### MG31

[0188] SEQ ID NOs: 229-260 show the full-length peptide sequences of MG31 nucleases.

[0189] SEQ ID NOs: 3616-3632 show effector repeat motifs of MG31 nucleases.

[0190] Sequence Numbers: A3874-A3876 show PAM sequences compatible with a MG31 nuclease.

### MG32

[0191] SEQ ID NO: 261 shows the full-length peptide sequence of a MG32 nuclease.

[0192] SEQ ID NO: 3633-3634 show effector repeat motifs of MG32 nucleases.

[0193] Sequence Number: A3876 shows a PAM sequence compatible with a MG32 nuclease.

### MG37

[0194] SEQ ID NOs: 262-426 show the full-length peptide sequences of MG37 nucleases.

[0195] SEQ ID NO: 3635 shows an effector repeat motif of MG37 nucleases.

[0196] SEQ ID NOs: 3636-3637, 3640-3641, 3644-3645, 3648-3649, 3652-3653, 3656-3657, and 3660-3661 show the nucleotide sequence of sgRNA engineered to function with an MG37 nuclease.

[0197] SEQ ID NOs: 3638, 3642, 3646, 3650, 3654, 3658, and 3662 show the nucleotide sequences of MG37 tracrRNAs derived from the same loci as MG37 nucleases above.

[0198] SEQ ID NO: 3639, 3643, 3647, 3651, 3655, and 3659 show 5′ direct repeat sequences derived from native MG37 loci that serve as crRNAs when placed 5′ to a 3′ targeting or spacer sequence.

### MG53

[0199] SEQ ID NOs: 427-428 show the full-length peptide sequences of MG53 nucleases.

[0200] SEQ ID NO: 3663 shows a 5′ direct repeat sequence derived from native MG53 loci that serve as a crRNA when placed 5′ to a 3′ targeting or spacer sequence.

[0201] SEQ ID NOs: 3664-3667 show the nucleotide sequence of sgRNAs engineered to function with an MG53 nuclease.

[0202] SEQ ID NOs: 3668-3669 show the nucleotide sequences of MG53 tracrRNAs derived from the same loci as MG53 nucleases above.

### MG54

[0203] SEQ ID NOs: 429-430 show the full-length peptide sequences of MG54 nucleases.

[0204] SEQ ID NO: 3670 shows a 5′ direct repeat sequence derived from native MG54 loci that serve as a crRNA when placed 5′ to a 3′ targeting or spacer sequence.

[0205] SEQ ID NOs: 3671-3672 show the nucleotide sequence of sgRNA engineered to function with an MG54 nuclease.

[0206] SEQ ID NOs: 3673-3676 show the nucleotide sequences of MG54 tracrRNAs derived from the same loci as MG54 nucleases above.

### MG55

[0207] SEQ ID NOs: 431-688 show the full-length peptide sequences of MG55 nucleases.

[0208] SEQ ID NO: 6031 shows the nucleotide sequence of an sgRNA engineered to function with an MG55 nuclease.

[0209] Sequence Number: A6032 shows a PAM sequence compatible with an MG55 nuclease.

### MG56

[0210] SEQ ID NOs: 689-690 show the full-length peptide sequences of MG56 nucleases.

[0211] SEQ ID NO: 3678 shows a crRNA 5′ direct repeats designed to function with an MG56 nuclease.

[0212] SEQ ID NOs: 3679-3680 show effector repeat motifs of MG56 nucleases.

### MG57

[0213] SEQ ID NOs: 691-721 show the full-length peptide sequences of MG57 nucleases.

[0214] SEQ ID NOs: 3681-3694 show effector repeat motifs of MG57 nucleases.

[0215] SEQ ID NOs: 3695-3696 show the nucleotide sequences of sgRNAs engineered to function with an MG57 nuclease.

[0216] Sequence Numbers: A3879-A3880 shows PAM sequences compatible with MG57 nucleases.

### MG58

[0217] SEQ ID NOs: 722-779 show the full-length peptide sequences of MG58 nucleases.

[0218] SEQ ID NOs: 3697-3711 show effector repeat motifs of MG58 nucleases.

### MG59

[0219] SEQ ID NOs: 780-792 show the full-length peptide sequences of MG59 nucleases.

[0220] SEQ ID NOs: 3712-3728 show effector repeat motifs of MG59 nucleases.

[0221] SEQ ID NOs: 3729-3730 show the nucleotide sequences of sgRNAs engineered to function with an MG59 nuclease.

[0222] Sequence Numbers: A3881-A3882 shows PAM sequences compatible with MG59 nucleases.

### MG60

[0223] SEQ ID NOs: 793-1163 show the full-length peptide sequences of MG60 nucleases.

[0224] SEQ ID NOs: 3731-3733 show effector repeat motifs of MG60 nucleases.

### MG61

[0225] SEQ ID NOs: 1164-1469 show the full-length peptide sequences of MG61 nucleases.

[0226] SEQ ID NOs: 3734-3735 show crRNA 5′ direct repeats designed to function with MG61 nucleases.

[0227] SEQ ID NOs: 3736-3847 show effector repeat motifs of MG61 nucleases.

### MG62

[0228] SEQ ID NOs: 1470-1472 show the full-length peptide sequences of MG62 nucleases.

[0229] SEQ ID NOs: 3848-3850 show effector repeat motifs of MG62 nucleases.

### MG70

[0230] SEQ ID NOs: 1473-1514 show the full-length peptide sequences of MG70 nucleases.

### MG75

[0231] SEQ ID NOs: 1515-1710 show the full-length peptide sequences of MG75 nucleases.

### MG77

[0232] SEQ ID NOs: 1711-1712 show the full-length peptide sequences of MG77 nucleases.

[0233] SEQ ID NOs: 3851-3852 show the nucleotide sequences of sgRNAs engineered to function with an MG77 nuclease.

[0234] Sequence Numbers: A3883-A3884 show PAM sequences compatible with MG77 nucleases.

### MG78

[0235] SEQ ID NOs: 1713-1717 show the full-length peptide sequences of MG78 nucleases.

[0236] SEQ ID NO: 3853 shows the nucleotide sequence of a sgRNA engineered to function with an MG78 nuclease.

[0237] Sequence Number: A3885 shows a PAM sequence compatible with a MG78 nuclease.

### MG79

[0238] SEQ ID NOs: 1718-1722 show the full-length peptide sequences of MG79 nucleases.

[0239] SEQ ID NOs: 3854-3857 shows the nucleotide sequences of sgRNAs engineered to function with an MG79 nuclease.

[0240] Sequence Numbers: A3886-A3889 show the PAM sequences compatible with MG79 nucleases.

### MG80

[0241] SEQ ID NO: 1723 shows the full-length peptide sequence of a MG80 nuclease.

### MG81

[0242] SEQ ID NOs: 1724-2654 show the full-length peptide sequences of MG81 nucleases.

### MG82

[0243] SEQ ID NOs: 2655-2657 show the full-length peptide sequences of MG82 nucleases.

### MG83

[0244] SEQ ID NOs: 2658-2659 show the full-length peptide sequences of MG83 nucleases.

### MG84

[0245] SEQ ID NOs: 2660-2677 show the full-length peptide sequences of MG84 nucleases.

### MG85

[0246] SEQ ID NOs: 2678-2680 show the full-length peptide sequences of MG85 nucleases.

### MG90

[0247] SEQ ID NOs: 2681-2809 show the full-length peptide sequences of MG90 nucleases.

### MG91

[0248] SEQ ID NOs: 2810-3470 show the full-length peptide sequences of MG91 nucleases.

[0249] SEQ ID NOs: 6033-6036 show nucleotide sequences of sgRNAs engineered to function with MG91 nucleases.

[0250] Sequence Numbers: A6037-A6039 show PAM sequences compatible with MG91 nucleases.

[0251] SEQ ID NOs: 6040-6049 show MG91 intergenic regions potentially encoding tracrRNA.

[0252] SEQ ID NOs: 6050-6059 show MG91 CRISPR repeats.

### Spacer Segments

[0253] SEQ ID NOs: 3858-3861 show the nucleotide sequences of spacer segments.

### NLS

[0254] SEQ ID NOs: 3938-3953 show the sequences of example nuclear localization sequences (NLSs) that can be appended to nucleases according to the disclosure.

### CD38 Targeting

[0255] SEQ ID NOs: 4428-4465 and 5685 show the nucleotide sequences of sgRNAs engineered to function with an MG29-1 nuclease in order to target CD38.

[0256] SEQ ID NOs: 4466-4503 and 5686 show the DNA sequences of CD38 target sites.

### TIGIT Targeting

[0257] SEQ ID NOs: 4504-4520 show the nucleotide sequences of sgRNAs engineered to function with an MG29-1 nuclease in order to target TIGIT.

[0258] SEQ ID NOs: 4521-4537 show the DNA sequences of TIGIT target sites.

### AAVS1 Targeting

[0259] SEQ ID NOs: 4538-4568 show the nucleotide sequences of sgRNAs engineered to function with an MG29-1 nuclease in order to target AAVS1.

[0260] SEQ ID NOs: 4569-4599 show the DNA sequences of AAVS1 target sites.

### B2M Targeting

[0261] SEQ ID NOs: 4600-4675 show the nucleotide sequences of sgRNAs engineered to function with an MG29-1 nuclease in order to target B2M.

[0262] SEQ ID NOs: 4676-4751 show the DNA sequences of B2M target sites.

### CD2 Targeting

[0263] SEQ ID NOs: 4752-4836 show the nucleotide sequences of sgRNAs engineered to function with an MG29-1 nuclease in order to target CD2.

[0264] SEQ ID NOs: 4837-4921 show the DNA sequences of CD2 target sites.

### CD5 Targeting

[0265] SEQ ID NOs: 4922-4945 show the nucleotide sequences of sgRNAs engineered to function with an MG29-1 nuclease in order to target CD5.

[0266] SEQ ID NOs: 4946-4969 show the DNA sequences of CD5 target sites.

hRosa26 Targeting

[0267] SEQ ID NOs: 4970-5012 show the nucleotide sequences of sgRNAs engineered to function with an MG29-1 nuclease in order to target hRosa26.

[0268] SEQ ID NOs: 5013-5055 show the DNA sequences of hRosa26 target sites.

### TRAC Targeting

[0269] SEQ ID NOs: 5056-5125, 5681, and 5683 show the nucleotide sequences of sgRNAs engineered to function with an MG29-1 nuclease in order to target TRAC.

[0270] SEQ ID NOs: 5126-5195, 5682, and 5684 show the DNA sequences of TRAC target sites.

### TRBC1 Targeting

[0271] SEQ ID NOs: 5196-5210 show the nucleotide sequences of sgRNAs engineered to function with an MG29-1 nuclease in order to target TRBC1.

[0272] SEQ ID NOs: 5211-5225 show the DNA sequences of TRBC1 target sites.

### TRBC2 Targeting

[0273] SEQ ID NOs: 5226-5246 show the nucleotide sequences of sgRNAs engineered to function with an MG29-1 nuclease in order to target TRBC2.

[0274] SEQ ID NOs: 5247-5267 show the DNA sequences of TRBC2 target sites.

### TRBC1/2 Targeting

[0275] SEQ ID NOs: 5642-5660 show the nucleotide sequences of sgRNAs engineered to function with an MG29-1 nuclease in order to target TRBC.

[0276] SEQ ID NOs: 5661-5679 show the DNA sequences of TRBC target sites.

### FAS Targeting

[0277] SEQ ID NOs: 5268-5366 show the nucleotide sequences of sgRNAs engineered to function with an MG29-1 nuclease in order to target FAS.

[0278] SEQ ID NOs: 5367-5465 show the DNA sequences of FAS target sites.

### PD-1 Targeting

[0279] SEQ ID NOs: 5466-5473 show the nucleotide sequences of sgRNAs engineered to function with an MG29-1 nuclease in order to target PD-1.

[0280] SEQ ID NOs: 5474-5481 show the DNA sequences of PD-1 target sites.

### HPRT Targeting

[0281] SEQ ID NOs: 5482-5561 show the nucleotide sequences of sgRNAs engineered to function with an MG29-1 nuclease in order to target HPRT.

[0282] SEQ ID NOs: 5562-5641 show the DNA sequences of HPRT target sites.

### HAO-1 Targeting

[0283] SEQ ID NOs: 5788-5829 and 5831-5834 show the nucleotide sequences of sgRNAs engineered to function with an MG29-1 nuclease in order to target human HAO-1.

[0284] SEQ ID NOs: 5836-5845 show the nucleotide sequences of sgRNAs engineered to function with an MG29-1 nuclease in order to target mouse HAO-1.

### APO-A1 Targeting

[0285] SEQ ID NOs: 5847-5860 show the nucleotide sequences of sgRNAs engineered to function with an MG29-1 nuclease in order to target mouse APO-A1.

[0286] SEQ ID NOs: 5861-5874 show the DNA sequences of APO-A1 target sites.

### ANGPTL3 Targeting

[0287] SEQ ID NOs: 5875-5952 show the nucleotide sequences of sgRNAs engineered to function with an MG29-1 nuclease in order to target mouse ANGPTL3.

[0288] SEQ ID NOs: 5953-6030 show the DNA sequences of ANGPTL3 target sites.

### DETAILED DESCRIPTION

[0289] While various embodiments of the invention have been shown and described herein, it will be obvious to those skilled in the art that such embodiments are provided by way of example only. Numerous variations, changes, and substitutions may occur to those skilled in the art without departing from the invention. It should be understood that various alternatives to the embodiments of the invention described herein may be employed.

[0290] The practice of some methods disclosed herein employ, unless otherwise indicated, techniques of immunology, biochemistry, chemistry, molecular biology, microbiology, cell biology, genomics, and recombinant DNA. See for example Sambrook and Green, Molecular Cloning: A Laboratory Manual'4th Edition (2012); the series Current Protocols in Molecular Biology (F. M. Ausubel, et al. eds.); the series Methods In Enzymology (Academic Press, Inc.), PCR 2: A Practical Approach (M. J. MacPherson, B. D. Hames and G. R Taylor eds. (1995)), Harlow and Lane, eds. (1988) Antibodies, A Laboratory Manual, and Culture of Animal Cells: A Manual of Basic Technique and Specialized Applications'6th Edition (R. I. Freshney, ed. (2010)) (which is entirely incorporated by reference herein).

[0291] As used herein, the singular forms “a”, “an” and “the” are intended to include the plural forms as well, unless the context clearly indicates otherwise. Furthermore, to the extent that the terms “including”, “includes”, “having”, “has”, “with”, or variants thereof are used in either the detailed description and/or the claims, such terms are intended to be inclusive in a manner similar to the term “comprising”.

[0292] The term “about” or “approximately” means within an acceptable error range for the particular value as determined by one of ordinary skill in the art, which will depend in part on how the value is measured or determined, i.e., the limitations of the measurement system. For example, “about” can mean within one or more than one standard deviation, per the practice in the art. Alternatively, “about” can mean a range of up to 20%, up to 15%, up to 10%, up to 5%, or up to 1% of a given value.

[0293] As used herein, a “cell” generally refers to a biological cell. A cell may be the basic structural, functional and/or biological unit of a living organism. A cell may originate from any organism having one or more cells. Some non-limiting examples include: a prokaryotic cell, eukaryotic cell, a bacterial cell, an archaeal cell, a cell of a single-cell eukaryotic organism, a protozoa cell, a cell from a plant (e.g., cells from plant crops, fruits, vegetables, grains, soy bean, corn, maize, wheat, seeds, tomatoes, rice, cassava, sugarcane, pumpkin, hay, potatoes, cotton, cannabis, tobacco, flowering plants, conifers, gymnosperms, ferns, clubmosses, hornworts, liverworts, mosses), an algal cell, (e.g., Botryococcus braunii, Chlamydomonas reinhardtii, Nannochloropsis gaditana, Chlorella pyrenoidosa, Sargassum patens C. Agardh, and the like), seaweeds (e.g., kelp), a fungal cell (e.g., a yeast cell, a cell from a mushroom), an animal cell, a cell from an invertebrate animal (e.g., fruit fly, cnidarian, echinoderm, nematode, etc.), a cell from a vertebrate animal (e.g., fish, amphibian, reptile, bird, mammal), a cell from a mammal (e.g., a pig, a cow, a goat, a sheep, a rodent, a rat, a mouse, a non-human primate, a human, etc.), and etcetera. Sometimes a cell is not originating from a natural organism (e.g., a cell can be a synthetically made, sometimes termed an artificial cell).

[0294] The term “nucleotide,” as used herein, generally refers to a base-sugar-phosphate combination. A nucleotide may comprise a synthetic nucleotide. A nucleotide may comprise a synthetic nucleotide analog. Nucleotides may be monomeric units of a nucleic acid sequence (e.g., deoxyribonucleic acid (DNA) and ribonucleic acid (RNA)). The term nucleotide may include ribonucleoside triphosphates adenosine triphosphate (ATP), uridine triphosphate (UTP), cytosine triphosphate (CTP), guanosine triphosphate (GTP) and deoxyribonucleoside triphosphates such as dATP, dCTP, dITP, dUTP, dGTP, dTTP, or derivatives thereof. Such derivatives may include, for example, [αS]dATP, 7-deaza-dGTP and 7-deaza-dATP, and nucleotide derivatives that confer nuclease resistance on the nucleic acid molecule containing them. The term nucleotide as used herein may refer to dideoxyribonucleoside triphosphates (ddNTPs) and their derivatives. Illustrative examples of dideoxyribonucleoside triphosphates may include, but are not limited to, ddATP, ddCTP, ddGTP, ddITP, and ddTTP. A nucleotide may be unlabeled or detectably labeled, such as using moieties comprising optically detectable moieties (e.g., fluorophores). Labeling may also be carried out with quantum dots. Detectable labels may include, for example, radioactive isotopes, fluorescent labels, chemiluminescent labels, bioluminescent labels, and enzyme labels. Fluorescent labels of nucleotides may include but are not limited fluorescein, 5-carboxyfluorescein (FAM), 2′7′-dimethoxy-4′5-dichloro-6-carboxyfluorescein (JOE), rhodamine, 6-carboxyrhodamine (R6G), N,N,N′,N′-tetramethyl-6-carboxyrhodamine (TAMRA), 6-carboxy-X-rhodamine (ROX), 4-(4′dimethylaminophenylazo) benzoic acid (DABCYL), Cascade Blue, Oregon Green, Texas Red, Cyanine and 5-(2′-aminoethyl)aminonaphthalene-1-sulfonic acid (EDANS). Specific examples of fluorescently labeled nucleotides can include [R6G]dUTP, [TAMRA]dUTP, [R110]dCTP, [R6G]dCTP, [TAMRA]dCTP, [JOE]ddATP, [R6G]ddATP, [FAM]ddCTP, [R110]ddCTP, [TAMRA]ddGTP, [ROX]ddTTP, [dR6G]ddATP, [dR110]ddCTP, [dTAMRA]ddGTP, and [dROX]ddTTP available from Perkin Elmer, Foster City, Calif; FluoroLink DeoxyNucleotides, FluoroLink Cy3-dCTP, FluoroLink Cy5-dCTP, FluoroLink Fluor X-dCTP, FluoroLink Cy3-dUTP, and FluoroLink Cy5-dUTP available from Amersham, Arlington Heights, Il.; Fluorescein-15-dATP, Fluorescein-12-dUTP, Tetramethyl-rodamine-6-dUTP, IR770-9-dATP, Fluorescein-12-ddUTP, Fluorescein-12-UTP, and Fluorescein-15-2′-dATP available from Boehringer Mannheim, Indianapolis, Ind.; and Chromosome Labeled Nucleotides, BODIPY-FL-14-UTP, BODIPY-FL-4-UTP, BODIPY-TMR-14-UTP, BODIPY-TMR-14-dUTP, BODIPY-TR-14-UTP, BODIPY-TR-14-dUTP, Cascade Blue-7-UTP, Cascade Blue-7-dUTP, fluorescein-12-UTP, fluorescein-12-dUTP, Oregon Green 488-5-dUTP, Rhodamine Green-5-UTP, Rhodamine Green-5-dUTP, tetramethylrhodamine-6-UTP, tetramethylrhodamine-6-dUTP, Texas Red-5-UTP, Texas Red-5-dUTP, and Texas Red-12-dUTP available from Molecular Probes, Eugene, Oreg. Nucleotides can also be labeled or marked by chemical modification. A chemically-modified single nucleotide can be biotin-dNTP. Some non-limiting examples of biotinylated dNTPs can include, biotin-dATP (e.g., bio-N6-ddATP, biotin-14-dATP), biotin-dCTP (e.g., biotin-11-dCTP, biotin-14-dCTP), and biotin-dUTP (e.g., biotin-11-dUTP, biotin-16-dUTP, biotin-20-dUTP).

[0295] The terms “polynucleotide,” “oligonucleotide,” and “nucleic acid” are used interchangeably to generally refer to a polymeric form of nucleotides of any length, either deoxyribonucleotides or ribonucleotides, or analogs thereof, either in single-, double-, or multi-stranded form. A polynucleotide may be exogenous or endogenous to a cell. A polynucleotide may exist in a cell-free environment. A polynucleotide may be a gene or fragment thereof. A polynucleotide may be DNA. A polynucleotide may be RNA. A polynucleotide may have any three-dimensional structure and may perform any function. A polynucleotide may comprise one or more analogs (e.g., altered backbone, sugar, or nucleobase). If present, modifications to the nucleotide structure may be imparted before or after assembly of the polymer. Some non-limiting examples of analogs include: 5-bromouracil, peptide nucleic acid, xeno nucleic acid, morpholinos, locked nucleic acids, glycol nucleic acids, threose nucleic acids, dideoxynucleotides, cordycepin, 7-deaza-GTP, fluorophores (e.g., rhodamine or fluorescein linked to the sugar), thiol-containing nucleotides, biotin-linked nucleotides, fluorescent base analogs, CpG islands, methyl-7-guanosine, methylated nucleotides, inosine, thiouridine, pseudouridine, dihydrouridine, queuosine, and wyosine. Non-limiting examples of polynucleotides include coding or non-coding regions of a gene or gene fragment, loci (locus) defined from linkage analysis, exons, introns, messenger RNA (mRNA), transfer RNA (tRNA), ribosomal RNA (rRNA), short interfering RNA (siRNA), short-hairpin RNA (shRNA), micro-RNA (miRNA), ribozymes, cDNA, recombinant polynucleotides, branched polynucleotides, plasmids, vectors, isolated DNA of any sequence, isolated RNA of any sequence, cell-free polynucleotides including cell-free DNA (cfDNA) and cell-free RNA (cfRNA), nucleic acid probes, and primers. The sequence of nucleotides may be interrupted by non-nucleotide components.

[0296] The terms “transfection” or “transfected” generally refer to introduction of a nucleic acid into a cell by non-viral or viral-based methods. The nucleic acid molecules may be gene sequences encoding complete proteins or functional portions thereof. See, e.g., Sambrook et al., 1989, Molecular Cloning: A Laboratory Manual, 18.1-18.88 (which is entirely incorporated by reference herein).

[0297] The terms “peptide,” “polypeptide,” and “protein” are used interchangeably herein to generally refer to a polymer of at least two amino acid residues joined by peptide bond(s). This term does not connote a specific length of polymer, nor is it intended to imply or distinguish whether the peptide is produced using recombinant techniques, chemical or enzymatic synthesis, or is naturally occurring. The terms apply to naturally occurring amino acid polymers as well as amino acid polymers comprising at least one modified amino acid. In some cases, the polymer may be interrupted by non-amino acids. The terms include amino acid chains of any length, including full length proteins, and proteins with or without secondary and/or tertiary structure (e.g., domains). The terms also encompass an amino acid polymer that has been modified, for example, by disulfide bond formation, glycosylation, lipidation, acetylation, phosphorylation, oxidation, and any other manipulation such as conjugation with a labeling component. The terms “amino acid” and “amino acids,” as used herein, generally refer to natural and non-natural amino acids, including, but not limited to, modified amino acids and amino acid analogues. Modified amino acids may include natural amino acids and non-natural amino acids, which have been chemically modified to include a group or a chemical moiety not naturally present on the amino acid. Amino acid analogues may refer to amino acid derivatives. The term “amino acid” includes both D-amino acids and L-amino acids.

[0298] As used herein, the “non-native” can generally refer to a nucleic acid or polypeptide sequence that is not found in a native nucleic acid or protein. Non-native may refer to affinity tags. Non-native may refer to fusions. Non-native may refer to a naturally occurring nucleic acid or polypeptide sequence that comprises mutations, insertions and/or deletions. A non-native sequence may exhibit and/or encode for an activity (e.g., enzymatic activity, methyltransferase activity, acetyltransferase activity, kinase activity, ubiquitinating activity, etc.) that may also be exhibited by the nucleic acid and/or polypeptide sequence to which the non-native sequence is fused. A non-native nucleic acid or polypeptide sequence may be linked to a naturally-occurring nucleic acid or polypeptide sequence (or a variant thereof) by genetic engineering to generate a chimeric nucleic acid and/or polypeptide sequence encoding a chimeric nucleic acid and/or polypeptide.

[0299] The term “promoter”, as used herein, generally refers to the regulatory DNA region which controls transcription or expression of a gene and which may be located adjacent to or overlapping a nucleotide or region of nucleotides at which RNA transcription is initiated. A promoter may contain specific DNA sequences which bind protein factors, often referred to as transcription factors, which facilitate binding of RNA polymerase to the DNA leading to gene transcription. A ‘basal promoter’, also referred to as a ‘core promoter’, may generally refer to a promoter that contains all the basic elements to promote transcriptional expression of an operably linked polynucleotide. Eukaryotic basal promoters can contain a TATA-box and/or a CAAT box.

[0300] The term “expression”, as used herein, generally refers to the process by which a nucleic acid sequence or a polynucleotide is transcribed from a DNA template (such as into mRNA or other RNA transcript) and/or the process by which a transcribed mRNA is subsequently translated into peptides, polypeptides, or proteins. Transcripts and encoded polypeptides may be collectively referred to as “gene product.” If the polynucleotide is derived from genomic DNA, expression may include splicing of the mRNA in a eukaryotic cell.

[0301] As used herein, “operably linked”, “operable linkage”, “operatively linked”, or grammatical equivalents thereof generally refer to juxtaposition of genetic elements, e.g., a promoter, an enhancer, a polyadenylation sequence, etc., wherein the elements are in a relationship permitting them to operate in the expected manner. For instance, a regulatory element, which may comprise promoter and/or enhancer sequences, is operatively linked to a coding region if the regulatory element helps initiate transcription of the coding sequence. There may be intervening residues between the regulatory element and coding region so long as this functional relationship is maintained.

[0302] A “vector” as used herein, generally refers to a macromolecule or association of macromolecules that comprises or associates with a polynucleotide and which may be used to mediate delivery of the polynucleotide to a cell. Examples of vectors include plasmids, viral vectors, liposomes, and other gene delivery vehicles. The vector generally comprises genetic elements, e.g., regulatory elements, operatively linked to a gene to facilitate expression of the gene in a target.

[0303] As used herein, “an expression cassette” and “a nucleic acid cassette” are used interchangeably generally to refer to a combination of nucleic acid sequences or elements that are expressed together or are operably linked for expression. In some cases, an expression cassette refers to the combination of regulatory elements and a gene or genes to which they are operably linked for expression.

[0304] A “functional fragment” of a DNA or protein sequence generally refers to a fragment that retains a biological activity (either functional or structural) that is substantially similar to a biological activity of the full-length DNA or protein sequence. A biological activity of a DNA sequence may be its ability to influence expression in a manner attributed to the full-length sequence.

[0305] As used herein, an “engineered” object generally indicates that the object has been modified by human intervention. According to non-limiting examples: a nucleic acid may be modified by changing its sequence to a sequence that does not occur in nature; a nucleic acid may be modified by ligating it to a nucleic acid that it does not associate with in nature such that the ligated product possesses a function not present in the original nucleic acid; an engineered nucleic acid may synthesized in vitro with a sequence that does not exist in nature; a protein may be modified by changing its amino acid sequence to a sequence that does not exist in nature; an engineered protein may acquire a new function or property. An “engineered” system comprises at least one engineered component.

[0306] As used herein, “synthetic” and “artificial” can generally be used interchangeably to refer to a protein or a domain thereof that has low sequence identity (e.g., less than 50% sequence identity, less than 25% sequence identity, less than 10% sequence identity, less than 5% sequence identity, less than 1% sequence identity) to a naturally occurring human protein. For example, VPR and VP64 domains are synthetic transactivation domains.

[0307] As used herein, the term “Cas12a” generally refers to a family of Cas endonucleases that are class 2, Type V-A Cas endonucleases and that (a) use a relatively small guide RNA (about 42-44 nucleotides) that is processed by the nuclease itself following transcription from the CRISPR array, and (b) cleave DNA to leave staggered cut sites. Further features of this family of enzymes can be found, e.g. in Zetsche B, Heidenreich M, Mohanraju P, et al. Nat Biotechnol 2017; 35:31-34, and Zetsche B, Gootenberg J S, Abudayyeh O O, et al. Cell 2015; 163:759-771, which are incorporated by reference herein.

[0308] As used herein, a “guide nucleic acid” can generally refer to a nucleic acid that may hybridize to another nucleic acid. A guide nucleic acid may be RNA. A guide nucleic acid may be DNA. The guide nucleic acid may be programmed to bind to a sequence of nucleic acid site-specifically. The nucleic acid to be targeted, or the target nucleic acid, may comprise nucleotides. The guide nucleic acid may comprise nucleotides. A portion of the target nucleic acid may be complementary to a portion of the guide nucleic acid. The strand of a double-stranded target polynucleotide that is complementary to and hybridizes with the guide nucleic acid may be called the complementary strand. The strand of the double-stranded target polynucleotide that is complementary to the complementary strand, and therefore may not be complementary to the guide nucleic acid may be called noncomplementary strand. A guide nucleic acid may comprise a polynucleotide chain and can be called a “single guide nucleic acid.” A guide nucleic acid may comprise two polynucleotide chains and may be called a “double guide nucleic acid.” If not otherwise specified, the term “guide nucleic acid” may be inclusive, referring to both single guide nucleic acids and double guide nucleic acids. A guide nucleic acid may comprise a segment that can be referred to as a “nucleic acid-targeting segment” or a “nucleic acid-targeting sequence” or “spacer sequence.” A nucleic acid-targeting segment may comprise a sub-segment that may be referred to as a “protein binding segment” or “protein binding sequence” or “Cas protein binding segment”.

[0309] The term “sequence identity” or “percent identity” in the context of two or more nucleic acids or polypeptide sequences, generally refers to two (e.g., in a pairwise alignment) or more (e.g., in a multiple sequence alignment) sequences that are the same or have a specified percentage of amino acid residues or nucleotides that are the same, when compared and aligned for maximum correspondence over a local or global comparison window, as measured using a sequence comparison algorithm. Suitable sequence comparison algorithms for polypeptide sequences include, e.g., BLASTP using parameters of a wordlength (W) of 3, an expectation (E) of 10, and the BLOSUM62 scoring matrix setting gap costs at existence of 11, extension of 1, and using a conditional compositional score matrix adjustment for polypeptide sequences longer than 30 residues; BLASTP using parameters of a wordlength (W) of 2, an expectation (E) of 1000000, and the PAM30 scoring matrix setting gap costs at 9 to open gaps and 1 to extend gaps for sequences of less than 30 residues (these are the default parameters for BLASTP in the BLAST suite available at https://blast.ncbi.nlm.nih.gov); CLUSTALW with the Smith-Waterman homology search algorithm parameters with a match of 2, a mismatch of −1, and a gap of −1; MUSCLE with default parameters; MAFFT with parameters of a retree of 2 and max iterations of 1000; Novafold with default parameters; HMMER hmmalign with default parameters.

[0310] The term “optimally aligned” in the context of two or more nucleic acids or polypeptide sequences, generally refers to two (e.g., in a pairwise alignment) or more (e.g., in a multiple sequence alignment) sequences that have been aligned to maximal correspondence of amino acids residues or nucleotides, for example, as determined by the alignment producing a highest or “optimized” percent identity score.

[0311] Included in the current disclosure are variants of any of the enzymes described herein with one or more conservative amino acid substitutions. Such conservative substitutions can be made in the amino acid sequence of a polypeptide without disrupting the three-dimensional structure or function of the polypeptide. Conservative substitutions can be accomplished by substituting amino acids with similar hydrophobicity, polarity, and R chain length for one another. Additionally, or alternatively, by comparing aligned sequences of homologous proteins from different species, conservative substitutions can be identified by locating amino acid residues that have been mutated between species (e.g., non-conserved residues) without altering the basic functions of the encoded proteins. Such conservatively substituted variants may include variants with at least about 20%, at least about 25%, at least about 30%, at least about 35%, at least about 40%, at least about 45%, at least about 50%, at least about 55%, at least about 60%, at least about 65%, at least about 70%, at least about 75%, at least about 80%, at least about 85%, at least about 90%, at least about 91%, at least about 92%, at least about 93%, at least about 94%, at least about 95%, at least about 96%, at least about 97%, at least about 98%, at least about 99% sequence identity to any one of the endonuclease protein sequences described herein (e.g. MG11, MG13, MG26, MG28, MG29, MG30, MG31, MG32, MG37, MG53, MG54, MG55, MG56, MG57, MG58, MG59, MG60, MG61, MG62, MG70, MG82, MG83, MG84 or MG85 family endonucleases described herein, or any other family nuclease described herein). In some embodiments, such conservatively substituted variants are functional variants. Such functional variants can encompass sequences with substitutions such that the activity of one or more critical active site residues or guide RNA binding residues of the endonuclease are not disrupted. In some embodiments, a functional variant of any of the proteins described herein lacks substitution of at least one of the conserved or functional residues called out in FIG. 17, 18, 10, 20, or 25 or a residue described in Table 1B. In some embodiments, a functional variant of any of the proteins described herein lacks substitution of all of the conserved or functional residues called out in FIG. 17, 18, 10, 20, or 25 or a residue described in Table 1B.

[0312] Also included in the current disclosure are variants of any of the enzymes described herein with substitution of one or more catalytic residues to decrease or eliminate activity of the enzyme (e.g. decreased-activity variants). In some embodiments, a decreased activity variant as a protein described herein comprises a disrupting substitution of at least one, at least two, or all three catalytic residues identified in Table 1B.

[0313] Conservative substitution tables providing functionally similar amino acids are available from a variety of references (see, for e.g., Creighton, Proteins: Structures and Molecular Properties (W H Freeman & Co.; 2nd edition (December 1993)). The following eight groups each contain amino acids that are conservative substitutions for one another:
[0314] 1) Alanine (A), Glycine (G);
[0315] 2) Aspartic acid (D), Glutamic acid (E);
[0316] 3) Asparagine (N), Glutamine (Q);
[0317] 4) Arginine (R), Lysine (K);
[0318] 5) Isoleucine (I), Leucine (L), Methionine (M), Valine (V);
[0319] 6) Phenylalanine (F), Tyrosine (Y), Tryptophan (W);
[0320] 7) Serine (S), Threonine (T); and
[0321] 8) Cysteine (C), Methionine (M)

### Overview

[0322] The discovery of new Cas enzymes with unique functionality and structure may offer the potential to further disrupt deoxyribonucleic acid (DNA) editing technologies, improving speed, specificity, functionality, and ease of use. Relative to the predicted prevalence of Clustered Regularly Interspaced Short Palindromic Repeats (CRISPR) systems in microbes and the sheer diversity of microbial species, relatively few functionally characterized CRISPR/Cas enzymes exist in the literature. This is partly because a huge number of microbial species may not be readily cultivated in laboratory conditions. Metagenomic sequencing from natural environmental niches containing large numbers of microbial species may offer the potential to drastically increase the number of new CRISPR/Cas systems characterized and speed the discovery of new oligonucleotide editing functionalities. A recent example of the fruitfulness of such an approach is demonstrated by the 2016 discovery of CasX/CasY CRISPR systems from metagenomic analysis of natural microbial communities.

[0323] CRISPR/Cas systems are RNA-directed nuclease complexes that have been described to function as an adaptive immune system in microbes. In their natural context, CRISPR/Cas systems occur in CRISPR (clustered regularly interspaced short palindromic repeats) operons or loci, which generally comprise two parts: (i) an array of short repetitive sequences (30-40 bp) separated by equally short spacer sequences, which encode the RNA-based targeting element; and (ii) ORFs encoding the Cas encoding the nuclease polypeptide directed by the RNA-based targeting element alongside accessory proteins/enzymes. Efficient nuclease targeting of a particular target nucleic acid sequence generally requires both (i) complementary hybridization between the first 6-8 nucleic acids of the target (the target seed) and the crRNA guide; and (ii) the presence of a protospacer-adjacent motif (PAM) sequence within a defined vicinity of the target seed (the PAM usually being a sequence not commonly represented within the host genome). Depending on the exact function and organization of the system, CRISPR-Cas systems are commonly organized into 2 classes, 5 types and 16 subtypes based on shared functional characteristics and evolutionary similarity (see FIG.).

[0324] Class I CRISPR-Cas systems have large, multi-subunit effector complexes, and comprise Types I, III, and IV. Class II CRISPR-Cas systems generally have single-polypeptide multidomain nuclease effectors, and comprise Types II, V and VI.

[0325] Type II CRISPR-Cas systems are considered the simplest in terms of components. In Type II CRISPR-Cas systems, the processing of the CRISPR array into mature crRNAs does not require the presence of a special endonuclease subunit, but rather a small trans-encoded crRNA (tracrRNA) with a region complementary to the array repeat sequence; the tracrRNA interacts with both its corresponding effector nuclease (e.g. Cas9) and the repeat sequence to form a precursor dsRNA structure, which is cleaved by endogenous RNAse III to generate a mature effector enzyme loaded with both tracrRNA and crRNA. Cas II nucleases are identified as DNA nucleases. Type 2 effectors generally exhibit a structure comprising a RuvC-like endonuclease domain that adopts the RNase H fold with an unrelated HNH nuclease domain inserted within the folds of the RuvC-like nuclease domain. The RuvC-like domain is responsible for the cleavage of the target (e.g., crRNA complementary) DNA strand, while the HNH domain is responsible for cleavage of the displaced DNA strand.

[0326] Type V CRISPR-Cas systems are characterized by a nuclease effector (e.g. Cas12) structure similar to that of Type II effectors, comprising a RuvC-like domain. Similar to Type II, most (but not all) Type V CRISPR systems use a tracrRNA to process pre-crRNAs into mature crRNAs; however, unlike Type II systems which requires RNAse III to cleave the pre-crRNA into multiple crRNAs, type V systems are capable of using the effector nuclease itself to cleave pre-crRNAs. Like Type-II CRISPR-Cas systems, Type V CRISPR-Cas systems are again identified as DNA nucleases. Unlike Type II CRISPR-Cas systems, some Type V enzymes (e.g., Cas12a) appear to have a robust single-stranded nonspecific deoxyribonuclease activity that is activated by the first crRNA directed cleavage of a double-stranded target sequence.

[0327] CRISPR-Cas systems have emerged in recent years as the gene editing technology of choice due to their targetability and ease of use. The most commonly used systems are the Class 2 Type II SpCas9 and the Class 2 Type V-A Cas12a. The Type V-A systems in particular are becoming more widely used since their reported specificity in cells is higher than other nucleases, with fewer or no off-target effects. The V-A systems are also advantageous in that the guide RNA is small (42-44 nucleotides compared with approximately 100 nt for SpCas9) and is processed by the nuclease itself following transcription from the CRISPR array, simplifying multiplexed applications with multiple gene edits. Furthermore, the V-A systems have staggered cut sites, which may facilitate directed repair pathways, such as microhomology-dependent targeted integration (MITI).

[0328] The most commonly used Type V-A enzymes require a 5′ protospacer adjacent motif (PAM) next to the chosen target site: 5′-TTV-3′ for Lachnospiraceae bacterium ND2006 LbCas12a and Acidaminococcus sp. AsCas12a; and 5′-TTV-3′ for Francisella novicida FnCas12a. Recent exploration of orthologs has revealed proteins with less restrictive PAM sequences that are also active in mammalian cell culture, for example YTV, YYN or TTN. However, these enzymes do not fully encompass V-A biodiversity and targetability, and may not represent all possible activities and PAM sequence requirements. Here, thousands of genomic fragments were mined from numerous metagenomes for Type V-A nucleases. The diversity of identified V-A enzymes may have been expanded and novel systems may have been developed into highly targetable, compact, and precise gene editing agents.

### MG Enzymes

[0329] Type V-A CRISPR systems are quickly being adopted for use in a variety of genome editing applications. These programmable nucleases are part of adaptive microbial immune systems, the natural diversity of which has been largely unexplored. Novel families of Type V-A CRISPR enzymes were identified through a large-scale analysis of metagenomes collected from a variety of complex environments, and developed representatives of these systems into gene-editing platforms. The nucleases are phylogenetically diverse (see FIG. 4A) and recognize a single guide RNA with specific motifs. The majority of these systems come from uncultivated organisms, some of which encode a divergent Type V effector within the same CRISPR operon. Biochemical analysis uncovered unexpected PAM diversity (see FIG. 4B), indicating that these systems will facilitate a variety of genome engineering applications. The simplicity of guide sequences and activity in human cell lines suggest utility in gene and cell therapies.

[0330] In some aspects, the present disclosure provides for novel Type V-L candidates (see FIGS. 27A-B). Type V-L may be a novel subtype and some sub-families may have been identified. These nucleases are about 1000-1100 amino acids in length. Type V-L may be found in the same CRISPR locus as Type V-A effectors. RuvC catalytic residues may have been identified for Type V-L candidates and these Type V-L candidates may not require tracrRNA. One example of a Type V-L are the MG60 nucleases described herein (see FIG. 28 and FIG. 32).

[0331] In some aspects, the present disclosure provides for smaller Type V effectors (see FIG. 30). Such effectors may be small putative effectors. These effectors may simplify delivery and may extend therapeutic applications.

[0332] In some aspects, the present disclosure provides for novel type V effector. Such an effector may be MG70 as described herein (see FIG. 29). MG70 may be an ultra-small enzyme of about 373 amino acids in length. MG 70 may have a single transposase domain at the N-terminus and may have a predicted tracrRNA (see FIG. 30 and FIG. 32).

[0333] In some aspects, the present disclosure provides for a smaller Type V effector (see FIG. 31). Such an effector may be MG81 described herein. MG81 may be about 500-700 amino acids in length and may contain RuvC, and HTH DNA binding domains.

[0334] In one aspect, the present disclosure provides for an engineered nuclease system discovered through metagenomic sequencing. In some cases, the metagenomic sequencing is conducted on samples. In some cases, the samples may be collected from a variety of environments. Such environments may be a human microbiome, an animal microbiome, environments with high temperatures, environments with low temperatures. Such environments may include sediment. An example of the types of such environments of the engineered nuclease systems described herein may be found in FIG.

[0335] In one aspect, the present disclosure provides for an engineered nuclease system comprising (a) an endonuclease. In some cases, the endonuclease is a Cas endonuclease. In some cases, the endonuclease is a class 2, type V Cas endonuclease. In some cases, the endonuclease is a class 2, type V-A Cas endonuclease. In some cases, the endonuclease is derived from an uncultivated microorganism. The endonuclease may comprise a RuvC domain. In some cases, the engineered nuclease system comprises (b) an engineered guide RNA. In some cases, the engineered guide RNA is configured to form a complex with the endonuclease. In some cases, the engineered guide RNA comprises a spacer sequence. In some cases, the spacer sequence is configured to hybridize to a target nucleic acid sequence.

[0336] In one aspect, the present disclosure provides for an engineered nuclease system comprising (a) an endonuclease. In some cases, the endonuclease has at least about 70% sequence identity to any one of SEQ ID NOs: 1-3470. In some cases, the endonuclease has at least about 20%, at least about 25%, at least about 30%, at least about 35%, at least about 40%, at least about 45%, at least about 50%, at least about 55%, at least about 60%, at least about 65%, at least about 70%, at least about 75%, at least about 80%, at least about 85%, at least about 90%, at least about 91%, at least about 92%, at least about 93%, at least about 94%, at least about 95%, at least about 96%, at least about 97%, at least about 98%, or at least about 99% identity to any one of SEQ ID NOs: 1-3470.

[0337] In some cases, the endonuclease comprises a variant having at least about 20%, at least about 25%, at least about 30%, at least about 35%, at least about 40%, at least about 45%, at least about 50%, at least about 55%, at least about 60%, at least about 65%, at least about 70%, at least about 75%, at least about 80%, at least about 85%, at least about 90%, at least about 91%, at least about 92%, at least about 93%, at least about 94%, at least about 95%, at least about 96%, at least about 97%, at least about 98%, or at least about 99% identity to any one of SEQ ID NOs: 1-3470. In some cases, the endonuclease may be substantially identical to any one of SEQ ID NOs: 1-3470.

[0338] In some cases, the engineered nuclease system comprises an engineered guide RNA. In some cases, the engineered guide RNA is configured to form a complex with the endonuclease. In some cases, the engineered guide RNA comprises a spacer sequence. In some cases, the spacer sequence is configured to hybridize to a target nucleic acid sequence.

[0339] In one aspect, the present disclosure provides an engineered nuclease system comprising (a) an endonuclease. In some cases, the endonuclease is configured to bind to a protospacer adjacent motif (PAM) sequence. In some cases, the PAM sequence is substantially identical to any one of Sequence Numbers: A3863-A3889 or any one of SEQ ID Nos: 3890-3913. In some cases, the PAM sequence is any one of Sequence Numbers: A3863-A3889 or any one of SEQ ID NOs: 3890-3913. In some cases, the endonuclease is a Cas endonuclease. In some cases, the endonuclease is a class 2 Cas endonuclease. In some cases, the endonuclease is a class 2, type V Cas endonuclease. In some cases, the endonuclease is a class 2, type V-A Cas endonuclease. In some cases, the engineered nuclease system comprises (b) an engineered guide RNA. In some cases, the engineered guide RNA is configured to form a complex with the endonuclease. In some cases, the engineered guide RNA comprises a spacer sequence. In some cases, the spacer sequence is configured to hybridize to a target nucleic acid sequence.

[0340] In some cases, the endonuclease is not a Cpf1 or Cms1 endonuclease. In some cases, the endonuclease further comprises a zinc finger-like domain.

[0341] In some cases, the guide RNA comprises a sequence with at least 80% sequence identity to the first 19 nucleotides or the non-degenerate nucleotides of SEQ ID NO: 3471, 3551-3559, 3608-3609, 3612, 3636-3637, 3640-3641, 3644-3645, 3648-3649, 3652-3653, 3656-3657, 3660-3661, 3664-3667, 3671-3672, 3678, 3695-3696, 3729-3730, 3734-3735, or 3851-3857. In some cases, the guide RNA comprises a sequence with at least about 20%, at least about 25%, at least about 30%, at least about 35%, at least about 40%, at least about 45%, at least about 50%, at least about 55%, at least about 60%, at least about 65%, at least about 70%, at least about 75%, at least about 80%, at least about 85%, at least about 90%, at least about 91%, at least about 92%, at least about 93%, at least about 94%, at least about 95%, at least about 96%, at least about 97%, at least about 98%, or at least about 99% identity to the first 19 nucleotides or the non-degenerate nucleotides of SEQ ID NO: 3471, 3551-3559, 3608-3609, 3612, 3636-3637, 3640-3641, 3644-3645, 3648-3649, 3652-3653, 3656-3657, 3660-3661, 3664-3667, 3671-3672, 3678, 3695-3696, 3729-3730, 3734-3735, or 3851-3857. In some cases, the guide RNA comprises a variant having at least about 20%, at least about 25%, at least about 30%, at least about 35%, at least about 40%, at least about 45%, at least about 50%, at least about 55%, at least about 60%, at least about 65%, at least about 70%, at least about 75%, at least about 80%, at least about 85%, at least about 90%, at least about 91%, at least about 92%, at least about 93%, at least about 94%, at least about 95%, at least about 96%, at least about 97%, at least about 98%, or at least about 99% identity to the first 19 nucleotides or the non-degenerate nucleotides of SEQ ID NO: 3471, 3551-3559, 3608-3609, 3612, 3636-3637, 3640-3641, 3644-3645, 3648-3649, 3652-3653, 3656-3657, 3660-3661, 3664-3667, 3671-3672, 3678, 3695-36%, 3729-3730, 3734-3735, or 3851-3857. In some cases, the guide RNA comprises a sequence which is substantially identical to the first 19 nucleotides or the non-degenerate nucleotides of SEQ ID NO: 3471, 3551-3559, 3608-3609, 3612, 3636-3637, 3640-3641, 3644-3645, 3648-3649, 3652-3653, 3656-3657, 3660-3661, 3664-3667, 3671-3672, 3678, 3695-36%, 3729-3730, 3734-3735, or 3851-3857.

[0342] In some cases, the guide RNA comprises a sequence with at least about 20%, at least about 25%, at least about 30%, at least about 35%, at least about 40%, at least about 45%, at least about 50%, at least about 55%, at least about 60%, at least about 65%, at least about 70%, at least about 75%, at least about 80%, at least about 85%, at least about 90%, at least about 91%, at least about 92%, at least about 93%, at least about 94%, at least about 95%, at least about %%, at least about 97%, at least about 98%, or at least about 99% identity to the first 19 nucleotides or the non-degenerate nucleotides of SEQ ID NO: 3471, 3551-3559, 3608-3609, 3612, 3636-3637, 3640-3641, 3644-3645, 3648-3649, 3652-3653, 3656-3657, 3660-3661, 3664-3667, 3671-3672, 3678, 3695-36%, 3729-3730, 3734-3735, or 3851-3857. In some cases, the endonuclease is configured to bind to the engineered guide RNA. In some cases, the Cas endonuclease is configured to bind to the engineered guide RNA. In some cases, the class 2 Cas endonuclease is configured to bind to the engineered guide RNA. In some cases, the class 2, type V Cas endonuclease is configured to bind to the engineered guide RNA. In some cases, the class 2, type V-A Cas endonuclease is configured to bind to the engineered guide RNA.

[0343] In some cases, the endonuclease is configured to bind to a protospacer adjacent motif (PAM) sequence comprising any one of Sequence Numbers: A3863-A3889 or any one of SEQ ID NOs: 3890-3913.

[0344] In some cases, the guide RNA comprises a sequence complementary to a eukaryotic, fungal, plant, mammalian, or human genomic polynucleotide sequence. In some cases, the guide RNA comprises a sequence complementary to a eukaryotic genomic polynucleotide sequence. In some cases, the guide RNA comprises a sequence complementary to a fungal genomic polynucleotide sequence. In some cases, the guide RNA comprises a sequence complementary to a plant genomic polynucleotide sequence. In some cases, the guide RNA comprises a sequence complementary to a mammalian genomic polynucleotide sequence. In some cases, the guide RNA comprises a sequence complementary to a human genomic polynucleotide sequence.

[0345] In some cases, the guide RNA is 30-250 nucleotides in length. In some cases, the guide RNA is 42-44 nucleotides in length. In some cases, the guide RNA is 42 nucleotides in length. In some cases, the guide RNA is 43 nucleotides in length. In some cases, the guide RNA is 44 nucleotides in length. In some cases, the guide RNA is 85-245 nucleotides in length. In some cases, the guide RNA is more than 90 nucleotides in length. In some cases, the guide RNA is less than 245 nucleotides in length.

[0346] In some cases, the endonuclease may comprise a variant having one or more nuclear localization sequences (NLSs). The NLS may be proximal to the N- or C-terminus of the endonuclease. The NLS may be appended N-terminal or C-terminal to any one of SEQ ID NOs: 3938-3953, or to a variant having at least about 20%, at least about 25%, at least about 30%, at least about 35%, at least about 40%, at least about 45%, at least about 50%, at least about 55%, at least about 60%, at least about 65%, at least about 70%, at least about 75%, at least about 80%, at least about 85%, at least about 90%, at least about 91%, at least about 92%, at least about 93%, at least about 94%, at least about 95%, at least about 96%, at least about 97%, at least about 98%, or at least about 99% identity to any one of SEQ ID NOs: 3938-3953. In some cases, the NLS may comprise a sequence substantially identical to any one of SEQ ID NOs: 3938-3953.

TABLE 1
Example NLS Sequences that may be used with Cas Effectors according to the
disclosure.

| | | SEQ ID |
|---|---|---|
| Source | NLS amino acid sequence | NO: |
| SV40 | PKKKRKV | 3938 |
| nucleoplasmin | KRPAATKKAGQAKKKK | 3939 |
| bipartite NLS | | |
| c-myc NLS | PAAKRVKLD | 3940 |
| c-myc NLS | RQRRNELKRSP | 3941 |
| hRNPA1 M9 NLS | NOSSNFGPMKGGNFGGRSSGPYGGGGQYFAKPRNQGGY | 3942 |
| Importin-alpha IBB | RMRIZFKNKGKDTAELRRRRVEVSVELRKAKKDEQILKRRNV | 3943 |
| domain | | |
| Myoma T protein | VSRKRPRP | 3944 |
| Myoma T protein | PPKKARED | 3945 |
| p53 | PQPKKKPL | 3946 |
| mouse c-abl IV | SALIKKKKKMAP | 3947 |
| influenza virus NS1 | DRLRR | 3948 |
| influenza virus NS1 | PKQKKRK | 3949 |
| Hepatitis virus delta | RKLKKKIKKL | 3950 |
| antigen | | |
| mouse Mx1 protein | REKKKELKRR | 3951 |
| human poly (ADP- | KRKGDEVDGVDEVAKKKSKK | 3952 |
| ribose) polymerase | | |
| steroid hormone | RKCLQAGMNLEARKTKK | 3953 |
| receptors (human) | | |
| glucocorticoid | | |

[0347] In some cases, the engineered nuclease system further comprises a single- or double stranded DNA repair template. In some cases, the engineered nuclease system further comprises a single-stranded DNA repair template. In some cases, the engineered nuclease system further comprises a double-stranded DNA repair template. In some cases, the single- or double-stranded DNA repair template may comprise from 5′ to 3′: a first homology arm comprising a sequence of at least 20 nucleotides 5′ to said target deoxyribonucleic acid sequence, a synthetic DNA sequence of at least 10 nucleotides, and a second homology arm comprising a sequence of at least 20 nucleotides 3′ to said target sequence.

[0348] In some cases, the first homology arm comprises a sequence of at least 40, at least 50, at least 60, at least 70, at least 80, at least 90, at least 100, at least 110, at least 120, at least 130, at least 140, at least 150, at least 175, at least 200, at least 250, at least 300, at least 400, at least 500, at least 750, or at least 1000 nucleotides. In some cases, the second homology arm comprises a sequence of at least 40, at least 50, at least 60, at least 70, at least 80, at least 90, at least 100, at least 110, at least 120, at least 130, at least 140, at least 150, at least 175, at least 200, at least 250, at least 300, at least 400, at least 500, at least 750, or at least 1000 nucleotides.

[0349] In some cases, the first and second homology arms are homologous to a genomic sequence of a prokaryote. In some cases, the first and second homology arms are homologous to a genomic sequence of a bacteria. In some cases, the first and second homology arms are homologous to a genomic sequence of a fungus. In some cases, the first and second homology arms are homologous to a genomic sequence of a eukaryote.

[0350] In some cases, the engineered nuclease system further comprises a DNA repair template. The DNA repair template may comprise a double-stranded DNA segment. The double-stranded DNA segment may be flanked by one single-stranded DNA segment. The double-stranded DNA segment may be flanked by two single-stranded DNA segments. In some cases, the single-stranded DNA segments are conjugated to the 5′ ends of the double-stranded DNA segment. In some cases, the single stranded DNA segments are conjugated to the 3′ ends of the double-stranded DNA segment.

[0351] In some cases, the single-stranded DNA segments have a length from 1 to 15 nucleotide bases. In some cases, the single-stranded DNA segments have a length from 4 to 10 nucleotide bases. In some cases, the single-stranded DNA segments have a length of 4 nucleotide bases. In some cases, the single-stranded DNA segments have a length of 5 nucleotide bases. In some cases, the single-stranded DNA segments have a length of 6 nucleotide bases. In some cases, the single-stranded DNA segments have a length of 7 nucleotide bases. In some cases, the single-stranded DNA segments have a length of 8 nucleotide bases. In some cases, the single-stranded DNA segments have a length of 9 nucleotide bases. In some cases, the single-stranded DNA segments have a length of 10 nucleotide bases.

[0352] In some cases, the single-stranded DNA segments have a nucleotide sequence complementary to a sequence within the spacer sequence. In some cases, the double-stranded DNA sequence comprises a barcode, an open reading frame, an enhancer, a promoter, a protein-coding sequence, a miRNA coding sequence, an RNA coding sequence, or a transgene.

[0353] In some cases, the engineered nuclease system further comprises a source of Mg²⁺.

[0354] In some cases, the guide RNA comprises a hairpin comprising at least 8 base-paired ribonucleotides. In some cases, the guide RNA comprises a hairpin comprising at least 9 base-paired ribonucleotides. In some cases, the guide RNA comprises a hairpin comprising at least 10 base-paired ribonucleotides. In some cases, the guide RNA comprises a hairpin comprising at least 11 base-paired ribonucleotides. In some cases, the guide RNA comprises a hairpin comprising at least 12 base-paired ribonucleotides.

[0355] In some cases, the endonuclease comprises a sequence at least 70% identical to a variant of any one of SEQ ID NOs: 141, 215, 229, 261, or 1711-1721 or a variant thereof 141, 215, 229, 261, or 1711-1721 or a variant thereof. In some cases, the endonuclease comprises a sequence at least 75% identical to a variant of any one of SEQ ID NOs: 141, 215, 229, 261, or 1711-1721 or a variant thereof. In some cases, the endonuclease comprises a sequence at least 80% identical to a variant of any one of SEQ ID NOs: 141, 215, 229, 261, or 1711-1721 or a variant thereof. In some cases, the endonuclease comprises a sequence at least 85% identical to a variant of any one of SEQ ID NOs: 141, 215, 229, 261, or 1711-1721 or a variant thereof. In some cases, the endonuclease comprises a sequence at least 90% identical to a variant of any one of SEQ ID NOs: 141, 215, 229, 261, or 1711-1721 or a variant thereof. In some cases, the endonuclease comprises a sequence at least 95% identical to a variant of any one of SEQ ID NOs: 141, 215, 229, 261, or 1711-1721 or a variant thereof.

[0356] In some cases, the guide RNA structure comprises a sequence of at least 70% identical to the first 19 nucleotides or the non-degenerate nucleotides of SEQ ID NO: 3608. In some cases, the guide RNA structure comprises a sequence of at least 75% identical to the first 19 nucleotides or the non-degenerate nucleotides of SEQ ID NO: 3608. In some cases, the guide RNA structure comprises a sequence of at least 80% identical to the first 19 nucleotides or the non-degenerate nucleotides of SEQ ID NO: 3608. In some cases, the guide RNA structure comprises a sequence of at least 85% identical to the first 19 nucleotides or the non-degenerate nucleotides of SEQ ID NO: 3608. In some cases, the guide RNA structure comprises a sequence of at least 90% identical to the first 19 nucleotides or the non-degenerate nucleotides of SEQ ID NO: 3608. In some cases, the guide RNA structure comprises a sequence of at least 95% identical to the first 19 nucleotides or the non-degenerate nucleotides of SEQ ID NO: 3608. In some cases, the endonuclease is configured to bind to a PAM comprising any one of Sequence Numbers: A3863-A3889 or any one of SEQ ID NOs: 3890-3913.

[0357] In some cases, sequence may be determined by a BLASTP, CLUSTALW, MUSCLE, or MAFFT algorithm, or a CLUSTALW algorithm with the Smith-Waterman homology search algorithm parameters. The sequence identity may be determined by said BLASTP homology search algorithm using parameters of a wordlength (W) of 3, an expectation (E) of 10, and a BLOSUM62 scoring matrix setting gap costs at existence of 11, extension of 1, and using a conditional compositional score matrix adjustment.

[0358] In one aspect, the present disclosure provides an engineered guide RNA comprising (a) a DNA-targeting segment. In some cases, the DNA-targeting segment comprises a nucleotide sequence that is complementary to a target sequence. In some cases, the target sequence is in a target DNA molecule. In some cases, the engineered guide RNA comprises (b) a protein-binding segment. In some cases, the protein-binding segment comprises two complementary stretches of nucleotides. In some cases, the two complementary stretches of nucleotides hybridize to form a double-stranded RNA (dsRNA) duplex. In some cases, the two complementary stretches of nucleotides are covalently linked to one another with intervening nucleotides. In some cases, the engineered guide ribonucleic acid polynucleotide is capable of forming a complex with an endonuclease. In some cases, the endonuclease has at least about 20%, at least about 25%, at least about 30%, at least about 35%, at least about 40%, at least about 45%, at least about 50%, at least about 55%, at least about 60%, at least about 65%, at least about 70%, at least about 75%, at least about 80%, at least about 85%, at least about 90%, at least about 91%, at least about 92%, at least about 93%, at least about 94%, at least about 95%, at least about 96%, at least about 97%, at least about 98%, or at least about 99% identity to any one of SEQ ID NOs: 1-3470. In some cases, the complex targets the target sequence of the target DNA molecule.

[0359] In some cases, the DNA-targeting segment is positioned 3′ of both of the two complementary stretches of nucleotides. In some cases, the protein binding segment comprising a sequence having at least about 20%, at least about 25%, at least about 30%, at least about 35%, at least about 40%, at least about 45%, at least about 50%, at least about 55%, at least about 60%, at least about 65%, at least about 70%, at least about 75%, at least about 80%, at least about 85%, at least about 90%, at least about 91%, at least about 92%, at least about 93%, at least about 94%, at least about 95%, at least about 96%, at least about 97%, at least about 98%, or at least about 99% identity to the first 19 nucleotides or the non-degenerate nucleotides of SEQ ID NO: 3608.

[0360] In some cases, the double-stranded RNA (dsRNA) duplex comprises at least 8 ribonucleotides. In some cases, the double-stranded RNA (dsRNA) duplex comprises at least 9 ribonucleotides. In some cases, the double-stranded RNA (dsRNA) duplex comprises at least 10 ribonucleotides. In some cases, the double-stranded RNA (dsRNA) duplex comprises at least 11 ribonucleotides. In some cases, the double-stranded RNA (dsRNA) duplex comprises at least 12 ribonucleotides.

[0361] In some cases, the deoxyribonucleic acid polynucleotide encodes the engineered guide ribonucleic acid polynucleotide.

[0362] In one aspect, the present disclosure provides a nucleic acid comprising an engineered nucleic acid sequence. In some cases, the engineered nucleic acid sequence is optimized for expression in an organism. In some cases, the nucleic acid encodes an endonuclease. In some cases, the endonuclease is a Cas endonuclease. In some cases, the endonuclease is a class 2 endonuclease. In some cases, the endonuclease is a class2, type V Cas endonuclease. In some cases, the endonuclease is a class2, type V-A Cas endonuclease. In some cases, the endonuclease is derived from an uncultivated microorganism. In some cases, the organism is not the uncultivated organism.

[0363] In some cases, the endonuclease comprises a variant having at least about 20%, at least about 25%, at least about 30%, at least about 35%, at least about 40%, at least about 45%, at least about 50%, at least about 55%, at least about 60%, at least about 65%, at least about 70%, at least about 75%, at least about 80%, at least about 85%, at least about 90%, at least about 91%, at least about 92%, at least about 93%, at least about 94%, at least about 95%, at least about 96%, at least about 97%, at least about 98%, or at least about 99% sequence identity to any one of SEQ ID NOs: 1-3470.

[0364] In some cases, the endonuclease may comprise a variant having one or more nuclear localization sequences (NLSs). The NLS may be proximal to the N- or C-terminus of the endonuclease. The NLS may be appended N-terminal or C-terminal to any one of SEQ ID NOs: 3938-3953, or to a variant having at least about 20%, at least about 25%, at least about 30%, at least about 35%, at least about 40%, at least about 45%, at least about 50%, at least about 55%, at least about 60%, at least about 65%, at least about 70%, at least about 75%, at least about 80%, at least about 85%, at least about 90%, at least about 91%, at least about 92%, at least about 93%, at least about 94%, at least about 95%, at least about 96%, at least about 97%, at least about 98%, or at least about 99% sequence identity to any one of SEQ ID NOs: 3938-3953.

[0365] In some cases, the organism is prokaryotic. In some cases, the organism is bacterial. In some cases, the organism is eukaryotic. In some cases, the organism is fungal. In some cases, the organism is a plant. In some cases, the organism is mammalian. In some cases, the organism is a rodent. In some cases, the organism is human.

[0366] In one aspect, the present disclosure provides an engineered vector. In some cases, the engineered vector comprises a nucleic acid sequence encoding an endonuclease. In some cases, the endonuclease is a Cas endonuclease. In some cases, the endonuclease is a class 2 Cas endonuclease. In some cases, the endonuclease is a class 2, type V Cas endonuclease. In some cases, the endonuclease is a class2, type V-A Cas endonuclease. In some cases, the endonuclease is derived from an uncultivated microorganism.

[0367] In some cases, the engineered vector comprises a nucleic acid described herein. In some cases, the nucleic acid described herein is a deoxyribonucleic acid polynucleotide described herein. In some cases, the vector is a plasmid, a minicircle, a CELiD, an adeno-associated virus (AAV) derived virion, or a lentivirus.

[0368] In one aspect, the present disclosure provides a cell comprising a vector described herein.

[0369] In one aspect, the present disclosure provides a method of manufacturing an endonuclease. In some cases, the method comprises cultivating the cell.

[0370] In one aspect, the present disclosure provides a method for binding, cleaving, marking, or modifying a double-stranded deoxyribonucleic acid polynucleotide. The method may comprise contacting the double-stranded deoxyribonucleic acid polynucleotide with an endonuclease. In some cases, the endonuclease is a Cas endonuclease. In some cases, the endonuclease is a class 2 Cas endonuclease. In some cases, the endonuclease is a class 2, type V Cas endonuclease. In some cases, the endonuclease is a class2, type V-A Cas endonuclease. In some cases, the endonuclease is in complex with an engineered guide RNA. In some cases, the engineered guide RNA is configured to bind to the endonuclease. In some cases, the engineered guide RNA is configured to bind to the double-stranded deoxyribonucleic acid polynucleotide. In some cases, the engineered guide RNA is configured to bind to the endonuclease and to the double-stranded deoxyribonucleic acid polynucleotide. In some cases, the double-stranded deoxyribonucleic acid polynucleotide comprises a protospacer adjacent motif (PAM). In some cases, the PAM comprises a sequence comprising any one of Sequence Numbers: A3863-A3889 or any one of SEQ ID NOs: 3890-3913.

[0371] In some cases, the double-stranded deoxyribonucleic acid polynucleotide comprises a first strand comprising a sequence complementary to a sequence of the engineered guide RNA and a second strand comprising the PAM. In some cases, the PAM is directly adjacent to the 5′ end of the sequence complementary to the sequence of the engineered guide RNA. In some cases, the endonuclease is not a Cpf1 endonuclease or a Cms1 endonuclease. In some cases, the endonuclease is derived from an uncultivated microorganism. In some cases, the double-stranded deoxyribonucleic acid polynucleotide is a eukaryotic, plant, fungal, mammalian, rodent, or human double-stranded deoxyribonucleic acid polynucleotide. In some cases, the PAM comprises any one of Sequence Numbers: A3863-A3889 or any one of SEQ ID NOs: 3890-3913.

[0372] In one aspect, the present disclosure provides a method of modifying a target nucleic acid locus. The method may comprise delivering to the target nucleic acid locus the engineered nuclease system described herein. In some cases, the endonuclease is configured to form a complex with the engineered guide ribonucleic acid structure. In some cases, the complex is configured such that upon binding of the complex to the target nucleic acid locus, the complex modifies the target nucleic acid locus.

[0373] In some cases, modifying the target nucleic acid locus comprises binding, nicking, cleaving, or marking said target nucleic acid locus. In some cases, the target nucleic acid locus comprises deoxyribonucleic acid (DNA) or ribonucleic acid (RNA). In some cases, the target nucleic acid comprises genomic DNA, viral DNA, viral RNA, or bacterial DNA. In some cases, the target nucleic acid locus is in vitro. In some cases, the target nucleic acid locus is within a cell. In some cases, the cell is a prokaryotic cell, a bacterial cell, a eukaryotic cell, a fungal cell, a plant cell, an animal cell, a mammalian cell, a rodent cell, a primate cell, or a human cell.

[0374] In some cases, delivery of the engineered nuclease system to the target nucleic acid locus comprises delivering the nucleic acid described herein or the vector described herein. In some cases, delivery of engineered nuclease system to the target nucleic acid locus comprises delivering a nucleic acid comprising an open reading frame encoding the endonuclease. In some cases, the nucleic acid comprises a promoter. In some cases, the open reading frame encoding the endonuclease is operably linked to the promoter.

[0375] In some cases, delivery of the engineered nuclease system to the target nucleic acid locus comprises delivering a capped mRNA containing the open reading frame encoding the endonuclease. In some cases, delivery of the engineered nuclease system to the target nucleic acid locus comprises delivering a translated polypeptide. In some cases, delivery of the engineered nuclease system to the target nucleic acid locus comprises delivering a deoxyribonucleic acid (DNA) encoding the engineered guide RNA operably linked to a ribonucleic acid (RNA) pol III promoter.

[0376] In some cases, the endonuclease induces a single-stranded break or a double-stranded break at or proximal to the target locus. In some cases, the endonuclease induces a staggered single stranded break within or 3′ to said target locus.

[0377] In some cases, effector repeat motifs are used to inform guide design of MG nucleases. For example, the processed gRNA in Type V-A systems comprises the last 20-22 nucleotides of a CRISPR repeat. This sequence may be synthesized into a crRNA (along with a spacer) and tested in vitro, along with the synthesized nucleases, for cleavage on a library of possible targets. Using this method, the PAM may be determined. In some cases, Type V-A enzymes may use a “universal” gRNA. In some cases, Type V enzymes may utilize a unique gRNA.

### Lipid Nanoparticles

[0378] Lipid nanoparticles as described herein can be 4-component lipid nanoparticles. Such nanoparticles can be configured for delivery of RNA or other nucleic acids (e.g. synthetic RNA, mRNA, or in vitro-synthesized mRNA) and can be generally formulated as described in WO2012135805A2, which is incorporated by reference herein for all purposes. Such nanoparticles can generally comprise: (a) a cationic lipid (e.g. any of the lipids described in FIG. 109), (b) a neutral lipid (e.g. DSPC or DOPE), (c) a sterol (e.g. cholesterol or a cholesterol analog), and (d) a PEG-modified lipid (e.g. PEG-DMG).

[0379] The cationic lipid referred to herein as “C12-200” is disclosed by Love et al., Proc Natl Acad Sci USA. 2010 107:1864-1869 and Liu and Huang, Molecular Therapy. 2010 669-670; both of which are herein incorporated by reference in their entirety. Cationic lipid formulations can include particles comprising either 3 or 4 or more components in addition to polynucleotide, primary construct, or RNA (e.g. mRNA). As an example, formulations with certain cationic lipids include, but are not limited to, 98N12-5 (or any of the other structures described in FIG. 109) and may contain 42% lipidoid, 48% cholesterol, and 10% PEG (C14 or greater alkyl chain length). As another example, formulations with certain lipidoids include, but are not limited to, C12-200 and may contain 50% cationic lipid, 10% disteroylphosphatidyl choline, 38.5% cholesterol, and 1.5% PEG-DMG.

[0380] In some embodiments, lipid nanoparticles are formulated as described in U.S. Ser. No. 10/709,779B2, which is incorporated in its entirety by reference herein. In some embodiments, the cationic lipid nanoparticle comprises a cationic lipid, a PEG-modified lipid, a sterol, and a non-cationic lipid. In some embodiments, the cationic lipid is selected from the group consisting of any of the cationic lipids depicted in FIG. 109. In some embodiments, the cationic lipid nanoparticle has a molar ratio of about 20-60% cationic lipid, about 5-25% non-cationic lipid, about 25-55% sterol, and about 0.5-15% PEG-modified lipid. In some embodiments, the cationic lipid nanoparticle comprises a molar ratio of about 50% cationic lipid, about 1.5% PEG-modified lipid, about 38.5% cholesterol, and about 10% non-cationic lipid. In some embodiments, the cationic lipid nanoparticle comprises a molar ratio of about 55% cationic lipid, about 2.5% PEG-modified lipid, about 32.5% cholesterol, and about 10% non-cationic lipid. In some embodiments, the cationic lipid is an ionizable cationic lipid, the non-cationic lipid is a neutral lipid, and the sterol is a cholesterol. In some embodiments, the cationic lipid nanoparticle has a molar ratio of 50:38.5:10:1.5 of cationic lipid: cholesterol: PEG2000-DMG:DSPC or DMG:DOPE. In some embodiments, lipid nanoparticles as described herein can comprise cholesterol, 1,2-dioleoyl-sn-glycero-3-phosphoethanolamine (DOPE), 1,1′-((2-(4-(2-((2-(bis(2-hydroxydodecyl)amino)ethyl)(2-hydroxydodecyl)amino)ethyl)piperazin-1-yl)ethyl)azanediyl)bis(dodecan-2-ol) (C12-200), and DMG-PEG-2000 at molar ratios of 47.5:16:35:1.5.

[0381] Systems of the present disclosure may be used for various applications, such as, for example, nucleic acid editing (e.g., gene editing), binding to a nucleic acid molecule (e.g., sequence-specific binding). Such systems may be used, for example, for addressing (e.g., removing or replacing) a genetically inherited mutation that may cause a disease in a subject, inactivating a gene in order to ascertain its function in a cell, as a diagnostic tool to detect disease-causing genetic elements (e.g. via cleavage of reverse-transcribed viral RNA or an amplified DNA sequence encoding a disease-causing mutation), as deactivated enzymes in combination with a probe to target and detect a specific nucleotide sequence (e.g. sequence encoding antibiotic resistance int bacteria), to render viruses inactive or incapable of infecting host cells by targeting viral genomes, to add genes or amend metabolic pathways to engineer organisms to produce valuable small molecules, macromolecules, or secondary metabolites, to establish a gene drive element for evolutionary selection, to detect cell perturbations by foreign small molecules and nucleotides as a biosensor.

### Examples

### Example 1—A Method of Metagenomic Analysis for New Proteins

[0382] Metagenomic samples were collected from sediment, soil, and animals. Deoxyribonucleic acid (DNA) was extracted with a Zymobiomics DNA mini-prep kit and sequenced on an Illumina HiSeq® 2500. Samples were collected with consent of property owners. Metagenomic sequence data was searched using Hidden Markov Models generated based on identified Cas protein sequences including class II type V Cas effector proteins to identify new Cas effectors (see FIG., which shows distribution of proteins detected in one family, MG29, identified from sample types such as high-temperature samples). Novel effector proteins identified by the search were aligned to identified proteins to identify potential active sites (see e.g. FIG., which shows that all MG29 family effectors identified from various samples have three catalytic residues from RuvCI, RuvCII, and RuvCIII catalytic domains and are predicted to be active). This metagenomic workflow resulted in the delineation of the MG11, MG13, MG19, MG20, MG26, MG28, MG29, MG30, MG31, MG32, MG37, MG53, MG54, MG55, MG56, MG57, MG58, MG59, MG60, MG61, MG62, MG70, MG75, MG77, MG78, MG79, MG80, MG81, MG82, MG83, MG84, MG85, MG90, and MG91 families described herein. Putative spacer sequences were identified by their location adjacent to the genomic loci encoding the effector proteins.

### Example 2—A Method of Metagenomic Analysis for New Proteins

[0383] Thirteen animal microbiome, high temperature biofilm and sediment samples were collected and stored on ice or in Zymo DNA/RNA Shield after collection. DNA was extracted from samples using either the Qiagen DNeasy PowerSoil Kit or the ZymoBIOMICS DNA Miniprep Kit. DNA sequencing libraries were constructed and sequenced on an Illumina HiSeq 4000 or on a Novaseq machine at the Vincent J. Coates Genomics Sequencing Laboratory at UC Berkeley, with paired 150 bp reads with a 400-800 bp target insert size (10 GB of sequencing was targeted per sample). Publicly available metagenomic sequencing data were downloaded from the NCBI SRA. Sequencing reads were trimmed using BBMap (Bushnell B., sourceforge.net/projects/bbmap/) and assembled with Megahit 11. Open reading frames and protein sequences were predicted with Prodigal. HMM profiles of identified Type V-A CRISPR nucleases were built and searched against all predicted proteins using HMMER3 (hmmer.org) to identify potential effectors. CRISPR arrays on assembled contigs were predicted with Minced (https://github.com/ctSkennerton/minced). Taxonomy was assigned to proteins with Kaiju, and contig taxonomy was determined by finding the consensus of all encoded proteins.

[0384] Predicted and reference (e.g., LbCas12a, AsCas12a, FnCas12a) Type V effector proteins were aligned with MAFFT and a phylogenetic tree was inferred using FasTree2. Novel families were delineated by identifying clades composed of sequences recovered from this study. From within families, candidates were selected if they contained the components for laboratory analysis (i.e., they were found on a well-assembled and annotated contig with a CRISPR array) in a manner that sampled as much phylogenetic diversity as possible. Priority was given to small effectors from diverse families (that is, families with representatives sharing a wider range of protein sequences). Selected representative and reference sequences were aligned using MUSCLE and Clustal W to identify catalytic and PAM interacting residues. CRISPR array repeats were searched for a motif associated with Type V-A systems, TCTAC-N-GTAGA (containing between one and eight N residues). From this analysis, families were putatively classified as V-A if representative CRISPR arrays contained one of these motif sequences. This dataset was used to identify HMM profiles associated with V-A families, which were in turn used to classify additional families (see FIG. 33-FIG. 37). Although the convention is to name novel Cas12 nucleases on the basis of the organism that encodes them, it is not possible to do so for the nucleases described herein. Therefore, in order to best adhere to the convention, the systems described herein are named with the prefix MG to indicate they are derived from assembled metagenomic fragments.

[0385] 140,867 Mbp of assembled metagenomic sequencing data was mined from diverse environments (soil, thermophilic, sediments, human and non-human microbiomes). In total, 119 genomic fragments encoded CRISPR effectors distantly related to Type V-A nucleases next to a CRISPR array (see FIG. 43). Type V-A effectors were classified into 14 novel families sharing less than 30% average pairwise amino acid identity between each other, and with reference sequences (e.g., LbCas12a, AsCas12a, FnCas12a). Some effectors contained RuvC and alpha-helical recognition domains, as well as conserved DED nuclease catalytic residues from the RuvCI/CII/CIII domains (identified in multiple sequence alignments, see e.g. Table 1A below), suggesting that these effectors were active nucleases (FIG. 5-FIG. 7). The novel Type V-A nucleases range in size from <800 to 1,400 amino acids in length (see FIG. 5A) and their taxonomic classification spanned a diverse array of phyla (see FIG. 4A) suggesting possible horizontal transfer.

[0386] Some genomic fragments carrying a Type V-A CRISPR system also encoded a second effector, referred to here as Type V-A prime (V-A′, FIG. 7A). For example, Type V-A′ MG26-2, which shared 16.6% amino acid identity with the Type V-A MG26-1, was encoded in the same CRISPR Cas operon, and may share the same crRNA with MG26-1 (FIG. 7B). Although no nuclease domains were predicted, MG26-2 contained three RuvC catalytic residues identified from multiple sequence alignments (FIG. 7B).

TABLE 1A
Catalytic residues of Enzymes Described Herein
Identified by Alignment

| MGID | RuvC-I (D) | RuvC-II (E) | RuvC-III (D) |
|---|---|---|---|
| MG84-16 | 238 | 337 | 413 |
| MG84-15 | 238 | 337 | 413 |
| MG84-3 | 230 | 329 | 405 |
| MG84-2 | 230 | 329 | 405 |
| MG84-1 | 230 | 329 | 405 |
| MG84-13 | 233 | 332 | 408 |
| MG84-14 | 233 | 332 | 408 |
| MG84-12 | 233 | 332 | 408 |
| MG84-11 | 233 | 332 | 408 |
| MG84-10 | 233 | 332 | 408 |
| MG84-9 | 233 | 332 | 408 |
| MG84-8 | 233 | 332 | 408 |
| MG84-7 | 233 | 332 | 408 |
| MG84-4 | 233 | 332 | 408 |
| MG84-5 | 233 | 332 | 408 |
| MG84-6 | 233 | 332 | 408 |
| MG81-18 | 296 | 399 | 497 |
| MG81-17 | 296 | 399 | 497 |
| MG81-9 | 297 | 400 | 498 |
| MG81-6 | 297 | 400 | 498 |
| MG81-11 | 297 | 400 | 498 |
| MG81-7 | 297 | 400 | 498 |
| MG81-8 | 297 | 400 | 498 |
| MG81-13 | 297 | 400 | 498 |
| MG81-5 | 300 | 403 | 501 |
| MG81-12 | 300 | 403 | 501 |
| MG81-1 | 300 | 403 | 502 |
| MG81-4 | 310 | 413 | 501 |
| MG81-3 | 310 | 413 | 511 |
| MG81-15 | 388 | 491 | 589 |
| MG81-10 | 310 | 413 | 511 |
| MG81-2 | 306 | 409 | 507 |
| MG90-2 | 388 | 548 | 661 |
| MG91-1 | 444 | 560 | 653 |
| MG91-2 | 245 | 358 | 453 |
| MG91-3 | 297 | 404 | 499 |
| MG37-1 | 763 | 1167 | 1335 |
| MG37-2 | 169 | 538 | 689 |
| MG37-3 | 745 | 1202 | 1350 |
| MG37-4 | 811 | 1230 | 1377 |
| MG37-5 | 775 | 1173 | 1319 |
| MG37-6 | 698 | 1058 | 1229 |
| MG37-7 | 752 | 1135 | 1273 |
| MG53-1 | — | 775 | 920 |
| MG54-1 | — | 612 | 722 |

### Example 3—(General Protocol) PAM Sequence Identification/Confirmation

[0387] PAM sequences that can be cleaved in vitro by a CRISPR effector were identified by incubating an effector with a crRNA and a plasmid library having 8 randomized nucleotides located adjacent to the 5′ end of a sequence complementary to the spacer of the crRNA. The plasmid is configured such that if the 8 randomized nucleotides formed a functional PAM sequence, the plasmid was cleaved. Functional PAM sequences were then identified by ligating adapters to the ends of cleaved plasmids and then sequencing DNA fragments comprising the adapters. Putative endonucleases were expressed in an E. coli lysate-based expression system (myTXTL, Arbor Biosciences). An E. coli codon optimized nucleotide sequence encoding the putative nuclease was transcribed and translated in vitro from a PCR fragment under control of a T7 promoter. A second PCR fragment with a minimal CRISPR array composed of a T7 promoter followed by a repeat-spacer-repeat sequence was transcribed in the same reaction. Successful expression of the endonuclease and repeat-spacer-repeat sequence followed by CRISPR array processing provided active in vitro CRISPR nuclease complexes.

[0388] A library of target plasmids containing a spacer sequence matching that in the minimal array preceded by 8N (degenerate) bases (potential PAM sequences) was incubated with the output of the TXTL reaction. After 1-3 hours, the reaction was stopped and the DNA was recovered via a DNA clean-up kit, e.g., Zymo DCC, AMPure XP beads, QiaQuick etc. Adapter sequences were blunt-end ligated to DNA fragments with active PAM sequences that had been cleaved by the endonuclease, whereas DNA that had not been cleaved was inaccessible for ligation. DNA segments comprising active PAM sequences were then amplified by PCR with primers specific to the library and the adapter sequence. The PCR amplification products were resolved on a gel to identify amplicons that corresponded to cleavage events. The amplified segments of the cleavage reaction were also used as templates for preparation of an NGS library or as a substrate for Sanger sequencing. Sequencing this resulting library, which was a subset of the starting 8N library, revealed sequences with PAM activity compatible with the CRISPR complex. For PAM testing with a processed RNA construct, the same procedure was repeated except that an in vitro transcribed RNA was added along with the plasmid library and the minimal CRISPR array template was omitted. The following sequences were used as targets in these assays:

(SEQ ID NO: 3860)
CGTGAGCCACCACGTCGCAAGCCT;
(SEQ ID NO: 3861)
GTCGAGGCTTGCGACGTGGTGGCT;
(SEQ ID NO: 3858)
GTCGAGGCTTGCGACGTGGTGGCT;
and
(SEQ ID NO: 3859)
TGGAGATATCTTGAACCTTGCATC.

### Example 4—PAM Sequence Identification/Confirmation for Endonucleases Described Herein

[0389] PAM requirements were determined via an E. coli lysate-based expression system (myTXTL, Arbor Biosciences), with modifications. Briefly, the E. coli codon optimized effector protein sequences were expressed under control of a T7 promoter at 29° C. for 16 hours. This crude protein stock was then used in an in vitro digest reaction at a concentration of 20% of the total reaction volume. The reaction was incubated for 3 hours at 37° C. with 5 nM of a plasmid library comprising a constant target sequence preceded by 8N mixed bases, and 50 nM of in vitro transcribed crRNA derived from the same CRISPR locus as the effector linked to a sequence complementary to the target sequence in NEB buffer 2.1 (New England Biolabs; NEB buffer 2.1 was selected in order to compare candidates with commercially available proteins). Protein concentration was not normalized in PAM discovery assays (PCR amplification signal provides high sensitivity for low expression or activity). The cleavage products from the TXTL reactions were recovered via clean up with AMPure SPRI beads (Beckman Coulter). The DNA was blunted via addition of Klenow fragments and dNTPs (New England Biolabs). Blunt-end products were ligated with a 100-fold excess of double stranded adapter sequences and used as template for the preparation of an NGS library, from which PAM requirements were determined from sequence analysis.

[0390] Raw NGS reads were filtered by Phred quality score >20. The 28 bp representing the identified DNA sequence from the backbone adjacent to the PAM was used as a reference to find the PAM-proximal region and the 8 bp adjacent were identified as the putative PAM. The distance between the PAM and the ligated adapter was also measured for each read. Reads that did not have an exact match to the reference sequence or adapter sequence were excluded. PAM sequences were filtered by cut site frequency such that PAMs with the most frequent cut site f2 bp were included in the analysis. This correction removed low levels of background cleavage that may occur at random positions due to the use of crude E. coli lysate. This filtering stage can remove between 2% and 40% of the reads depending on the signal to noise ratio of the candidate protein, where less active proteins have more background signal. For reference MG29-1, 2% of reads were filtered out at this stage. The filtered list of PAMs was used to generate a sequence logo using Logomaker. These sequence logo depictions of PAMs are presented in FIGS. 20-24.

### Example 5—tracrRNA Prediction and Guide Design

[0391] The crystal structure of a ternary complex of AacC2c1 (Cas12b) bound to a sgRNA and a target DNA reveals two separate repeat-anti-repeat (R-AR) motifs in the bound sgRNA, denoted R-AR duplex 1 and R-AR duplex 2 (see FIG. 8 and FIG. 9 herein and Yang, Hui, Pu Gao, Kanagalaghatta R. Rajashankar, and Dinshaw J. Patel. 2016. “PAM-Dependent Target DNA Recognition and Cleavage by C2c1 CRISPR-Cas Endonuclease.” Cell 167 (7): 1814-28.e12 and Liu, Liang, Peng Chen, Min Wang, Xueyan Li, Jiuyu Wang, Maolu Yin, and Yanli Wang. 2017. “C2c1-sgRNA Complex Structure Reveals RNA-Guided DNA Cleavage Mechanism.” Molecular Cell 65 (2): 310-22, each of which is incorporated by reference herein in its entirety). Putative tracrRNA sequences for the CRISPR effectors disclosed herein were identified by searching for anti-repeat sequences in the surrounding genomic context of native CRISPR arrays, where the R-AR duplex 2 anti-repeat sequence occurs ˜20-90 nucleotides upstream of (closer to the 5′ end of the tracrRNA than) the R-AR duplex 1 anti-repeat sequence. Following tracrRNA sequence identification, two guide sequences were designed for each enzyme. The first included both R-AR duplexes 1 & 2 (see for example SEQ ID NOs: 3636, 3640, 3644, 3648, 3652, 3656, 3660, 3671, and 3672), and the second was a shorter guide sequence with the R-AR duplex 1 region deleted (see e.g., SEQ ID NOs: 3637, 3641, 3645, 3649, 3653, 3657, and 3661), as this region may not be essential for cleavage.

### Example 6—Protocol for Predicted RNA Folding

[0392] Predicted RNA folding of RNA sequences at 37° C. was computed using the method of Andronescu 2007 (which is entirely incorporated by reference herein).

### Example 7—RNA Guide Identification

[0393] For contigs that encoded a Type V-A effector and a CRISPR array, secondary structure folding of repeats indicated that the novel Type V-A systems require a single guide crRNA (sgRNA, FIGS. 10A-D). No tracrRNA sequences were identified. The sgRNA contained ˜19-22 nt from the 3′ end of the CRISPR repeat. A multiple sequence alignment of CRISPR repeats from six of the Type V-A candidates that were tested for in-vitro activity shows a highly conserved motif at the 3′ end of the repeat, which formed the stem-loop structure of the sgRNA (FIG. 10C). The motif, UCUAC[N3-5]GUAGAU, comprised short palindromic repeats (the stem) separated by between three and five nucleotides (the loop).

[0394] The conservation of the sgRNA motif was used to uncover novel effectors that may not show similarity to classified Type V-A nucleases. Motifs were searched in repeats from 69,117 CRISPR arrays. The most common motif contained a 4-nucleotide loop, while 3- and 5-nucleotide loops were less common (see FIG. 12, FIG. 13, FIG. 14, FIG. 15, and FIG. 16). Inspection of the genomic context surrounding the CRISPR arrays containing the repeat motif revealed numerous effectors of varying lengths. For example, effectors of the family MG57 were the largest of the Type V-A nucleases identified (average ˜1400 aa), and encoded a repeat with a 4-bp loop. Another family identified from HMM analysis contained a different repeat motif, CCUGC[N₃₋₄]GCAGG (see FIGS. 5C,5D). Although differing in sequence, the structure was predicted to fold into a highly similar stem-loop structure.

### Example 8—In Vitro Cleavage Efficiency of MG CRISPR Complexes

[0395] Endonucleases are expressed as His-tagged fusion proteins from an inducible T7 promoter in a protease deficient E. coli B strain. Cells expressing the His-tagged proteins are lysed by sonication and the His-tagged proteins purified by Ni-NTA affinity chromatography on a HisTrap FF column (GE Lifescience) on an AKTA Avant FPLC (GE Lifescience). The eluate is resolved by SDS-PAGE on acrylamide gels (Bio-Rad) and stained with InstantBlue Ultrafast coomassie (Sigma-Aldrich). Purity is determined using densitometry of the protein band with ImageLab software (Bio-Rad). Purified endonucleases are dialyzed into a storage buffer composed of 50 mM Tris-HCl, 300 mM NaCl, 1 mM TCEP, 5% glycerol; pH 7.5 and stored at −80° C. Target DNAs containing spacer sequences and PAM sequences (determined for example as in either Example 3 or Example 4) are constructed by DNA synthesis. A single representative PAM is chosen for testing when the PAM has degenerate bases. The target DNAs are comprised of 2200 bp of linear DNA derived from a plasmid via PCR amplification with a PAM and spacer located 700 bp from one end. Successful cleavage results in fragments of 700 and 1500 bp. The target DNA, in vitro transcribed single RNA, and purified recombinant protein are combined in cleavage buffer (10 mM Tris, 100 mM NaCl, 10 mM MgCl₂) with an excess of protein and RNA and are incubated for 5 minutes to 3 hours, usually 1 hr. The reaction is stopped via addition of RNAse A and incubation at 60 minutes. The reaction is then resolved on a 1.2% TAE agarose gel and the fraction of cleaved target DNA is quantified in ImageLab software.

### Example 9—Testing of Genome Cleavage Activity of MG CRISPR Complexes in E. coli

[0396] E. coli lacks the capacity to efficiently repair double-stranded DNA breaks. Thus, cleavage of genomic DNA can be a lethal event. Exploiting this phenomenon, endonuclease activity is tested in E. coli by recombinantly expressing an endonuclease and a guide RNA (determined for example as in Example 6) in a target strain with spacer/target and PAM sequences integrated into its genomic DNA (determined for example as in Example 4) integrated into their genomic DNA are transformed with DNA encoding the endonuclease. Transformants are then made chemocompetent and are transformed with 50 ng of guide RNAs (e.g., crRNAs) either specific to the target sequence (“on target”), or non-specific to the target (“non target”). After heat shock, transformations were recovered in SOC for 2 hours at 37° C. Nuclease efficiency is then determined by a 5-fold dilution series grown on induction media. Colonies are quantified from the dilution series in triplicate. A reduction in the number of colonies transformed with an on-target guide RNA compared to the number of colonies transformed with an off-target guide RNA indicates specific genome cleavage by the endonuclease.

### Example 10—Generic Procedure: Testing of Genome Cleavage Activity of MG CRISPR Complexes in Mammalian Cells

[0397] Two types of mammalian expression vectors are used to detected targeting and cleavage activity in mammalian cells. In the first, the MG Cas effector is fused to a C-terminal SV40 NLS and a viral 2A consensus cleavable peptide sequence linked to a GFP tag (the 2A-GFP tag to monitor expression of the protein). In the second, the MG Cas effector is fused to two SV40 NLS sequences, one on the N-terminus and the other on the C-terminus. The NLS sequences comprise any of the NLS sequences described herein (for example SEQ ID NOs: 3938-3953). In some instances, nucleotide sequences encoding the endonucleases are codon-optimized for expression in mammalian cells.

[0398] A single guide RNA with a crRNA sequence fused to a sequence complementary to a mammalian target DNA is cloned into a second mammalian expression vector. The two plasmids are co-transfected into HEK293T cells. 72 hours after co-transfection, DNA is extracted from the transformed HEK293T cells and used for the preparation of an NGS-library. Percent NHEJ is measured by quantifying indels at the target site to demonstrate the targeting efficiency of the enzyme in mammalian cells. At least 10 different target sites are chosen to test each protein's activity.

### Example 11—Testing of Genome Cleavage Activity of MG CRISPR Complexes in Mammalian Cells

[0399] To show targeting and cleavage activity in mammalian cells, the MG Cas effector protein sequences were cloned into a mammalian expression vector with flanking N and C-terminal SV40 NLS sequences, a C-terminal His tag, and a 2A-GFP (e.g. a viral 2A consensus cleavable peptide sequence linked to a GFP) tag at the C terminus after the His tag (Backbone 1). In some instances, nucleotide sequences encoding the endonucleases were the native sequence, codon-optimized for expression in E. coli cells or codon-optimized for expression in mammalian cells.

[0400] The single guide RNA sequence (sgRNA) with a gene target of interest was also cloned into a mammalian expression vector. The two plasmids are co-transfected into HEK293T cells. 72 hours after co-transfection of the expression plasmid and a sgRNA targeting plasmid into HEK293T cells, the DNA was extracted and used for the preparation of an NGS-library. Percent NHEJ was measured via indels in the sequencing of the target site to demonstrate the targeting efficiency of the enzyme in mammalian cells. 7-12 different target sites were chosen for testing each protein's activity. An arbitrary threshold of 5% indels was used to identify active candidates. Genome editing efficiency in human cells was assessed from the NGS reads with CRISPResso using parameters: cleavage offset=−4 and window=10. All post cleavage events from the CRISPResso output were summed for ±1 bp indels/mutations, and ≥2 bp deletions, insertions, and mutations. All outcomes were normalized to total sequences aligned to the expected amplicon (see FIGS. 18A-E)

### Example 12—Characterization of Mg29 Family

[0401] PAM Specificity, tracrRNA/sgRNA Validation

[0402] The targeted endonuclease activity of MG29 family endonuclease systems was confirmed using the myTXTL system described in Example 3 and Example 8. In this assay, PCR amplification of cleaved target plasmids yields a product that migrates at approximately 170 bp in the gel, as shown in FIGS. 17A-B. Amplification products were observed for MG29-1 with crRNA corresponding to SEQ ID NO: 3609 (see FIG. 17A, lane 7). Sequencing the PCR products revealed active PAM sequences for these enzymes as shown in Table 2 below.

TABLE 2
Activity of MG29-1 at various target sites

| target | | 5′ sequence | | %NHEJ |
|---|---|---|---|---|
| ID | target sequence | including PAM | locus | (mean ± std) |
| target1 | TGTCAGAAGCAAATGTAAGCAATA | AACACAGTTG | HBB | 2.185 ± 0.007 |
| | (SEQ ID NO: 3914) | (SEQ ID NO: 3890) | | |
| target2 | CTGAAAGGTTATTGTTGTGTTTGT | TACAGTTTTG | Fibrinogen | 10.5 ± 8.74 |
| | (SEQ ID NO: 3915) | (SEQ ID NO: 3891) | | |
| target3 | CTAGTGAACACAGTTGTGTCAGAA | TTTGAGGTTG | HBB | 2.14 ± 2.83 |
| | (SEQ ID NO: 3916) | (SEQ ID NO: 3892) | | |
| target4 | TGAAGTCTTACAAGGTTATCTTAT | TTTGTATTTG | Albumin | 13.757 ± 5.46 |
| | (SEQ ID NO: 3917) | (SEQ ID NO: 3893) | | |
| target5 | CACTTTCCTTAGTGCGCAAAAGAA | AGTTACTTTG | Albumin | 17.937 ± 8.27 |
| | (SEQ ID NO: 3918) | (SEQ ID NO: 3894) | | |
| target6 | GTGGTGAGGCCCTGGGCAGGTTGG | GATGAAGTTG | HBB | 12.545 ± 1.73 |
| | (SEQ ID NO: 3919) | (SEQ ID NO: 3895) | | |
| target7 | GGAGGTCAGAAATAGGGGGTCCAG | TAGCTGTTTG | VEGFA | 23.56 ± 7.04 |
| | (SEQ ID NO: 3920) | (SEQ ID NO: 3896) | | |
| target8 | GAAAGGGGGTGGGGGGAGTTTGCT | ATGGGCTTTG | VEGFA | 30.147 ± 10.17 |
| | (SEQ ID NO: 3921) | (SEQ ID NO: 3897) | | |
| target9 | GTATCAAGGTTACAAGACAGGTTT | GGGCAGGTTG | HBB | 10.935 ± 1.56 |
| | (SEQ ID NO: 3922) | (SEQ ID NO: 3898) | | |
| target10 | TGTGAGGGAGCACCGTTCTCTAGA | TACATAGTTG | Apolipoprotein | 30.43 ± 1.57 |
| | (SEQ ID NO: 3923) | (SEQ ID NO: 3899) | | |
| target11 | GGTAGTTTTCTGTGGTCCTATTAT | TACGCATTTG | Apolipoprotein | 18.173 ± 6.28 |
| | (SEQ ID NO: 3924) | (SEQ ID NO: 3900) | | |
| target12 | CCAGGAAAGTTGATGTGGTCTGCG | CCGCAAGTTG | Apolipoprotein | 7.47 ± 10.52 |
| | (SEQ ID NO: 3925) | (SEQ ID NO: 3901) | | |

### Targeted Endonuclease Activity in Mammalian Cells

[0403] MG29-1 target loci were chosen to test locations in the genome with the PAM YYn (Sequence Number: A3871). The spacers corresponding to the chosen target sites were cloned into the sgRNA scaffold in the mammalian vector system backbone 1 described in Example 9. The sites are listed in Table 3 below. The activity of MG29-1 at various target sites is shown in Table 2 and FIG. 19.

TABLE 3
5′ PAM Sequences and crRNAs for Enzymes Described Herein

| | Enzyme | | PAM | crRNA |
|---|---|---|---|---|
| | SEQ ID | | Sequence | SEQ ID |
| Enzyme | NO: | 5′ PAM | Number: | NO: |
| MG29-1 | 215 | KTTG | A3870 | 3608 |

### Example 13—High-Replicate PAM Determination Via NGS

[0404] Type V endonucleases (e.g. MG28, MG29, MG30, MG31 endonucleases) were tested for cleavage activity using E. coli lysate-based expression in the myTXTL kit as described in Example 3 and Example 8. Upon incubation with a crRNA and a plasmid library containing a spacer sequencing matching the crRNA preceded by 8 degenerated (“N”) bases (a 5′ PAM library), the subset of the plasmid library with a functional PAM was cleaved. Ligation to this cut site and PCR amplification provided evidence of activity, demonstrated by the bands observed in the gel at 170 bp (FIG. 17B). Gel 1 (top panel, A) lanes are as follows: 1 (ladder; darkest band corresponds to 200 bp); 2: positive control (previously verified library); 3 (n/a); 4 (n/a); 5 (MG28-1); 6 (MG29-1); 7 (MG30-1); 8 (MG31-1); 9 (MG32-1); and 10 (Ladder). Gel 2 (bottom panel, B) lanes are as follows: 1 (ladder; darkest band corresponds to 200 bp); 2 (LbCpf1 positive control); 3 (LbCpf1 positive control); 4 (negative control); 5 (n/a); 6 (n/a); 7 (MG28-1); 8 (MG29-1); 9 (MG30-1); 10 (MG31-1); 11 (MG32-1).

[0405] The PCR products were further subjected to NGS sequencing and the PAMs were collated into seqLogo (see e.g., Huber et al. Nat Methods. 2015 Feb.; 12(2):115-21, which is incorporated by reference herein) representations (FIG. 20). The seqLogo representation shows the 8 bp which are upstream (5′) of the spacer labeled as positions 0-7. As shown in the FIG. 20, the PAMs are pyrimidine rich (C and T), with most sequence requirements 2-4 bp upstream of the spacer (positions 4-6 in the SeqLogo).

[0406] The PAMs for the MG candidates are shown in Table 4 below.

TABLE 4
5′ PAM Sequences and crRNAs for Enzymes Described Herein

| | Enzyme | | PAM | crRNA |
|---|---|---|---|---|
| | SEQ ID | | Sequence | SEQ ID |
| Enzyme | NO: | 5′ PAM | Number: | NO: |
| MG28-1 | 141 | TTTn | A3868 | 3609 |
| MG29-1 | 215 | YYn | A3871 | 3609 |
| MG31-1 | 229 | YTTn | A3875 | 3609 |
| MG32-1 | 261 | TTTn | A3877 | 3609 |

[0407] In some cases, the position immediately adjacent to the spacer may have a weaker specificity, e.g. for “m” or “v” instead of “n”.

### Example 14—Targeted Endonuclease Activity in Mammalian Cells with MG31 Nucleases

### Targeted Endonuclease Activity in Mammalian Cells

[0408] MG31-1 target loci were chosen to test locations in the genome with the PAM TTTR (Sequence Number: A3875). The spacers corresponding to the chosen target sites were cloned into the sgRNA scaffold in the mammalian vector system backbone 1 described in Example 11. The sites are listed in Table 5 below. The activity of MG31-1 at various target sites is shown in Table 5 and FIG. 25.

TABLE 5
Activity of MG31-1 at various target sites

| | | | | %NHEJ |
|---|---|---|---|---|
| target ID | target sequence | PAM | locus | (mean = std) |
| target1 | GTTATTAATTTCTTGCTACTTGTC | GTTTTCTTTA | Fibrinogen | 1.005 ± 0.516 |
| | (SEQ ID NO: 3926) | (SEQ ID NO: | | |
| | | 3902) | | |
| target2 | CTGAAAGGTTATTGTTGTGTTTGT | TACAGTTTTG | Fibrinogen | 2.417 ± 1.47 |
| | (SEQ ID NO: 3927) | (SEQ ID NO: | | |
| | | 3903) | | |
| target3 | GTGTTAGTACAGTTTTGCTGAAAG | AGAACTTTTA | Fibrinogen | 2.925 ± 0.516 |
| | (SEQ ID NO: 3928) | (SEQ ID NO: | | |
| | | 3904) | | |
| target4 | TGAAGTCTTACAAGGTTATCTTAT | TTTGTATTTG | Albumin | 7.053 ± 2.72 |
| | (SEQ ID NO: 3929) | (SEQ ID NO: | | |
| | | 3905) | | |
| target5 | CACTTTCCTTAGTGCGCAAAAGAA | AGTTACTTTG | Albumin | 0.927 ± 0.50 |
| | (SEQ ID NO: 3930) | (SEQ ID NO: | | |
| | | 3906) | | |
| target6 | CCTAGGATGTTTGAATTTTATTAA | TTTTTTTTTA | Albumin | 1.125 ± 0.43 |
| | (SEQ ID NO: 3931) | (SEQ ID NO: | | |
| | | 3907) | | |
| target7 | GGAGGTCAGAAATAGGGGGTCCAG | TAGCTGTTTG | VEGFA | 17.39 ± 8.67 |
| | (SEQ ID NO: 3932) | (SEQ ID NO: | | |
| | | 3908) | | |
| target8 | GAAAGGGGGTGGGGGGAGTTTGCT | ATGGGCTTTG | VEGFA | 4.01 ± 1.29 |
| | (SEQ ID NO: 3933) | (SEQ ID NO: | | |
| | | 3909) | | |
| target9 | GCCAGAGCCGGGGTGTGCAGACGG | TCCCTCTTTA | VEGFA | 6.72 ± 1.92 |
| | (SEQ ID NO: 3934) | (SEQ ID NO: | | |
| | | 3910) | | |
| target10 | CTTGGACCTTGTTTTGCTTACTGT | ACAAATTTTA | Apolipoprotein | −0.32 ± 0.75 |
| | (SEQ ID NO: 3935) | (SEQ ID NO: | | |
| | | 3911) | | |
| target11 | GGTAGTTTTCTGTGGTCCTATTAT | TACGCATTTG | Apolipoprotein | 2.593 ± 1.33 |
| | (SEQ ID NO: 3936) | (SEQ ID NO: | | |
| | | 3912) | | |
| target12 | ATCATAAGAAGTTAGCTTGACGCA | GAAAAATTTA | Apolipoprotein | 3.095 |
| | (SEQ ID NO: 3937) | (SEQ ID NO: | | |
| | | 3913) | | |

### Example 3—In Vitro Activity

[0409] Promising candidates from the bioinformatic analysis and preliminary screens were selected for further biochemical analysis as described in this example. Using the conserved 3′ sgRNA structure, a “universal” sgRNA was designed comprising the 3′ 20 nt of the CRISPR repeat and a 24 nt spacer (FIGS. 10A-D). Of the seven tested candidates, six showed activity in vitro against the 8N PAM library (FIG. 26A). The remaining inactive candidate (30-1) showed activity when tested with its predicted endogenous trimmed CRISPR repeat (SEQ ID NO: 3608, see FIG. 26B), but was not included in NGS library assays. (FIG. 26C)

[0410] The majority of identified PAMs are thymine-rich sequences of 2-3 bases (FIG. 18A). However, two enzymes, MG26-1 (PAM YYn) and MG29-1 (PAM YYn), had PAM specificity for either pyrimidine base, thymine or cytosine, allowing for broader sequence targeting. Analysis of putative PAM-interacting residues indicated that the active Type V-A nucleases contain a conserved Lysine and a GWxxxK motif, which were shown to be important in recognition and interaction with different PAMs in FnCas12a.

[0411] As our PAM detection assay required ligation to create blunt-end fragments before PAM enrichment, this suggested that these enzymes created a staggered double strand DNA break, similar to reported Type V-A nucleases. The cut site on the target strand can be identified by analysis of the NGS reads used for indel detection (FIG. 18B) and showed cl^{ea}vage after the 22nd PAM-distal base

[0412] In vitro cleavage by MG29-1 was further investigated by sequencing the cleavage products. The cut position on the target strand was 22 nucleotides away from the PAM in most sequences, and 21 or 23 nucleotides less frequently (FIGS. 56A-C). The cut position on the non-target strand was 17 to 19 nucleotides from the PAM. In combination, these results indicate a 3-5 bp overhang.

### Example 4—Genome Editing

[0413] After confirmation of the PAM, novel proteins described herein were tested in HEK293T cells for gene targeting activity. All candidates showed activity of over 5% NHEJ (background corrected) on at least one of ten tested target loci. MG29-1 showed the highest overall activity in NHEJ modification outcomes (FIG. 18B) and was active on the highest number of targets. Thus, this nuclease was selected for purified ribonucleoprotein complex (RNP) testing in HEK293 cells. RNP transfection of MG29-1 holoenzyme showed higher editing levels with RNP than plasmid-based transfection on 4 out of 9 targets, in some cases over 80% editing efficiency (FIG. 18C). Analysis of editing profiles for MG29-1 indicates that this nuclease produces deletions of more than two bp more frequently than other types of edits at their target site (FIG. 18D). At some targets (5 and 8) the indel frequency for MG29-1 was twice that of AsCpf1 (FIG. 18E).

### Example 17—Discussion

[0414] Type V-A CRISPR were identified from metagenomes collected from a variety of complex environments and arranged into families. These novel Type V-A nucleases had diverse sequences and phylogenetic origins within and across families and cleaved targets with diverse PAM sites. Similar to other Type V-A nucleases (e.g. LbCas12a, AsCas12a, and FnCas12a), the effectors described herein utilized a single guide CRISPR RNA (sgRNA) to target staggered double stranded cleavage of DNA, simplifying guide design and synthesis, which will facilitate multiplexed editing. Analysis of CRISPR repeat motifs that formed the stem-loop structure of the crRNA suggested that the Type V-A effectors described herein have a 4-nt loop guide more frequently than shorter or longer loops. The sgRNA motif of LbCpf1 has a less common 5-nt, although the 4-nt loop was also observed for 16 Cpf1 orthologs already identified. An unusual stem-loop CRISPR repeat motif sequence, CCUGC[N3.4]GCAGG, was identified for the MG61 family of Type V-A effectors. The high degree of conservation of the sgRNA with variable loop lengths in Type V-A may afford flexible levels of activity, as shown for proteins described herein. Taken together, these effectors are not close homologs to previously studied enzymes, and greatly expand the diversity of Type V-A-like sgRNA nucleases.

[0415] Additional Type V effectors described herein may have evolved from duplications of Type V-A-like nucleases, referred to here as Type V-A prime effectors (V-A′) which may be encoded next to Cas12a nucleases. Both Type V-A and these Type V-A′ systems may share a CRISPR sgRNA but the Type V-A′ systems are divergent from Cas12a (FIG. 4). The CRISPR repeat associated with these prime effectors also folded into single guide crRNA with the UCUAC[N₃₋₅]GUAGAU motif. One report identified a Type V cms1 effector encoded next to a Type V-A nuclease, which required a single guide crRNA for cleavage activity in plant cells. Different CRISPR arrays were reported for each effector, while the Type V-A′ system described herein suggested that both Type V-A and V-A′ may require the same crRNA for DNA targeting and cleavage. As described recently in Roizmanbacterial genomes (see e.g., Chen et al. Front Microbiol. 2019 May 3; 10:928), both Type V-A and V-A′ effectors are distantly related based on sequence homology and phylogenetic analysis. Therefore, the prime effectors do not belong within the Type V-A classification, and warrant a separate Type V sub-classification

[0416] PAMs determined for active Type V-A nucleases were generally thymine-rich, similar to PAMs described for other Type V-A nucleases. In contrast, MG29-1 requires a shorter YYN PAM sequence, which increases target flexibility compared to the four nucleotide TTTV PAM of LbCpf1. Additionally, RNPs containing MG29-1 had higher activity in HEK293 cells compared to sMbCas12a, which has a three-nucleotide PAM.

[0417] When testing the novel nucleases for in-vitro editing activity, MG29-1 exhibited comparable or better activity to other reported enzymes of the class. Reports of plasmid transfection editing efficiencies in mammalian cells using Cas12a orthologs indicate between 21% and 26% indel frequencies for guides with T-rich PAMs, and one out of 18 guides with CCN PAMs showed ˜10% activity in Mb3Cas12a (Moraxella bovoculi AAX11_00205 Cas12a, see e.g. Wang et al. Journal of Cell Science 2020 133: jcs240705). Notably, MG29-1 activity in plasmid transfections appears greater than that reported for Mb3Cas12a for targets with TTN and CCN PAMs (see e.g. FIGS. 18A-E). Because the target sites for plasmid transfections have the same TTG PAM on all experiments, the difference in editing efficiency may be attributed to genomic accessibility differences at different target genes. MG29-1 editing as RNP is much more efficient than via plasmid and is more efficient than AsCas12a on two of seven target loci. Therefore, MG29-1 may be a highly active and efficient gene editing nuclease. These findings increase the diversity of identified single guide Type V-A CRISPR nucleases, and demonstrate the genome editing potential of novel enzymes from uncultivated microbes. Seven novel nucleases showed in-vitro activity with diverse PAM requirements, and RNP data showed editing efficiency surpassing 80% for therapeutically relevant targets in human cell lines. These novel nucleases expand the toolkit of CRISPR-associated enzymes and enable diverse genome engineering applications.

### Example 18—MG29-1 Induced Editing of TRAC Locus in T-Cells

[0418] The three exons of the T cell receptor alpha chain constant region (TRACA) were scanned for sequences matching an initial predicted 5′-TTN-3′ PAM specificity of MG29-1 and single-guide RNAs with proprietary Alt-R modifications were ordered from IDT. All guide spacer sequences were 22 nt long. Guides (80 pmol) were mixed with purified MG29-1 protein (63 pmol), incubated for 15 minutes at room temperature. T cells were purified from PBMCs by negative selection using (Stemcell Technologies Human T cell Isolation Kit #17951) and activated by CD2/3/28 beads (Miltenyi T cell Activation/Expansion Kit #130-091-441). After four days of cell growth, each MG29-1/guide RNA mixture was electroporated into 200,000 T cells with a Lonza 4-D Nucleofector, using program EO-115 and P3 buffer. The cells were harvested seventy-two hours post-transfection, genomic DNA was isolated, and PCR amplified for analysis using high-throughput DNA sequencing using primers targeting the TRACA locus. The creation of insertions and deletions characteristic of NHEJ-based gene editing was quantified using a proprietary Python script (see FIG. 39).

TABLE 5A
Guide sequences used in Example 18

| Entity Name | Sequence | SEQ ID NO: |
|---|---|---|
| MG29-1 Guide 1 | ACCGATTTTGATTCTCAAACAA | 4316 |
| Target Sequence | | |
| MG29-1 Guide 2 | TGATTCTCAAACAAATGTGTCA | 4317 |
| Target Sequence | | |
| MG29-1 Guide 3 | GATTCTCAAACAAATGTGTCAC | 4318 |
| Target Sequence | | |
| MG29-1 Guide 4 | ATTCTCAAACAAATGTGTCACA | 4319 |
| Target Sequence | | |
| MG29-1 Guide 5 | TCAAACAAATGTGTCACAAAGT | 4320 |
| Target Sequence | | |
| MG29-1 Guide 6 | TGATGTGTATATCACAGACAAA | 4321 |
| Target Sequence | | |
| MG29-1 Guide 7 | AAGAGCAACAGTGCTGTGGCCT | 4322 |
| Target Sequence | | |
| MG29-1 Guide 8 | GCATGTGCAAACGCCTTCAACA | 4323 |
| Target Sequence | | |
| MG29-1 Guide 9 | CATGTGCAAACGCCTTCAACAA | 4324 |
| Target Sequence | | |
| MG29-1 Guide 10 | AACAACAGCATTATTCCAGAAG | 4325 |
| Target Sequence | | |
| MG29-1 Guide 11 | TTCCAGAAGACACCTTCTTCCC | 4326 |
| Target Sequence | | |
| MG29-1 Guide 12 | CAGAAGACACCTTCTTCCCCAG | 4327 |
| Target Sequence | | |
| MG29-1 Guide 13 | TGGAATAATGCTGTTGTTGAAG | 4328 |
| Target Sequence | | |
| MG29-1 Guide 14 | TTGAAGGCGTTTGCACATGCAA | 4329 |
| Target Sequence | | |
| MG29-1 Guide 15 | AAGGCGTTTGCACATGCAAAGT | 4330 |
| Target Sequence | | |
| MG29-1 Guide 16 | GCACATGCAAAGTCAGATTTGT | 4331 |
| Target Sequence | | |
| MG29-1 Guide 17 | CACATGCAAAGTCAGATTTGTT | 4332 |
| Target Sequence | | |
| MG29-1 Guide 18 | GTTGCTCCAGGCCACAGCACTG | 4333 |
| Target Sequence | | |
| MG29-1 Guide 19 | TTGCTCCAGGCCACAGCACTGT | 4334 |
| Target Sequence | | |
| MG29-1 Guide 20 | CTCCAGGCCACAGCACTGTTGC | 4335 |
| Target Sequence | | |
| MG29-1 Guide 21 | CTCTTGAAGTCCATAGACCTCA | 4336 |
| Target Sequence | | |
| MG29-1 Guide 22 | AAGTCCATAGACCTCATGTCTA | 4337 |
| Target Sequence | | |
| MG29-1 Guide 23 | TGTCTGTGATATACACATCAGA | 4338 |
| Target Sequence | | |
| MG29-1 Guide 24 | GTCTGTGATATACACATCAGAA | 4339 |
| Target Sequence | | |
| MG29-1 Guide 25 | TCTGTGATATACACATCAGAAT | 4340 |
| Target Sequence | | |
| MG29-1 Guide 26 | CTTTGTGACACATTTGTTTGAG | 4341 |
| Target Sequence | | |
| MG29-1 Guide 27 | GTGACACATTTGTTTGAGAATC | 4342 |
| Target Sequence | | |
| MG29-1 Guide 28 | TGACACATTTGTTTGAGAATCA | 4343 |
| Target Sequence | | |
| MG29-1 Guide 29 | GTTTGAGAATCAAAATCGGTGA | 4344 |
| Target Sequence | | |
| MG29-1 Guide 30 | TTTGAGAATCAAAATCGGTGAA | 4345 |
| Target Sequence | | |
| MG29-1 Guide 31 | GAGAATCAAAATCGGTGAATAG | 4346 |
| Target Sequence | | |
| MG29-1 Guide 32 | AGAATCAAAATCGGTGAATAGG | 4347 |
| Target Sequence | | |
| MG29-1 Guide 33 | TCACTGGATTTAGAGTCTCTCA | 4348 |
| Target Sequence | | |
| MG29-1 Guide 34 | AGAGTCTCTCAGCTGGTACACG | 4349 |
| Target Sequence | | |
| MG29-1 Guide 35 | GAGTCTCTCAGCTGGTACACGG | 4350 |
| Target Sequence | | |
| MG29-1 Guide 36 | CTGTGATGTCAAGCTGGTCGAG | 4351 |
| Target Sequence | | |
| MG29-1 Guide 37 | CAAAGCTTTTCTCGACCAGCTT | 4352 |
| Target Sequence | | |
| MG29-1 Guide 38 | AAAGCTTTTCTCGACCAGCTTG | 4353 |
| Target Sequence | | |
| MG29-1 Guide 39 | TCTCGACCAGCTTGACATCACA | 4354 |
| Target Sequence | | |
| MG29-1 Guide 40 | CTCGACCAGCTTGACATCACAG | 4355 |
| Target Sequence | | |
| MG29-1 Guide 41 | TCGACCAGCTTGACATCACAGG | 4356 |
| Target Sequence | | |
| MG29-1 Guide 42 | CAAAACCTGTCAGTGATTGGGT | 4357 |
| Target Sequence | | |
| MG29-1 Guide 43 | AAAACCTGTCAGTGATTGGGTT | 4358 |
| Target Sequence | | |
| MG29-1 Guide 44 | GGTTCCGAATCCTCCTCCTGAA | 4359 |
| Target Sequence | | |
| MG29-1 Guide 45 | CGAATCCTCCTCCTGAAAGTGG | 4360 |
| Target Sequence | | |
| MG29-1 Guide 46 | AATCTGCTCATGACGCTGCGGC | 4361 |
| Target Sequence | | |
| MG29-1 Guide 47 | ATCTGCTCATGACGCTGCGGCT | 4362 |
| Target Sequence | | |
| MG29-1 Guide 48 | AACCCGGCCACTTTCAGGAGGA | 4363 |
| Target Sequence | | |
| MG29-1 Guide 49 | CAGGAGGAGGATTCGGAACCCA | 4364 |
| Target Sequence | | |
| MG29-1 Guide 50 | AGGAGGAGGATTCGGAACCCAA | 4365 |
| Target Sequence | | |
| MG29-1 Guide 51 | GGAACCCAATCACTGACAGGTT | 4366 |
| Target Sequence | | |
| MG29-1 Guide 52 | TGAAAGTTTAGGTTCGTATCTG | 4367 |
| Target Sequence | | |
| MG29-1 Guide 53 | GAAAGTTTAGGTTCGTATCTGT | 4368 |
| Target Sequence | | |
| MG29-1 Guide 54 | AAAGTTTAGGTTCGTATCTGTA | 4369 |
| Target Sequence | | |
| MG29-1 Guide 1 | /AltR1/rUrArArUrUrUrCrUrArCrUrGrUrUrGrUrArGrA | 4370 |
| sgRNA synthesized | rUrArCrCrGrArUrUrUrUrGrArUrUrCrUrCrArArArCr | |
| | ArA/AltR2/ | |
| MG29-1 Guide 2 | /AltR1/rUrArArUrUrUrCrUrArCrUrGrUrUrGrUrArGrA | 4371 |
| sgRNA synthesized | rUrUrGrArUrUrCrUrCrArArArCrArArArUrGrUrGrUr | |
| | CrA/AltR2/ | |
| MG29-1 Guide 3 | /AltR1/rUrArArUrUrUrCrUrArCrUrGrUrUrGrUrArGrA | 4372 |
| sgRNA synthesized | rUrGrArUrUrCrUrCrArArArCrArArArUrGrUrGrUrCr | |
| | ArC/AltR2/ | |
| MG29-1 Guide 4 | /AltR1/rUrArArUrUrUrCrUrArCrUrGrUrUrGrUrArGrA | 4373 |
| sgRNA synthesized | rUrArUrUrCrUrCrArArArCrArArArUrGrUrGrUrCrAr | |
| | CrA/AltR2/ | |
| MG29-1 Guide 5 | /AltR1/rUrArArUrUrUrCrUrArCrUrGrUrUrGrUrArGrA | 4374 |
| sgRNA synthesized | rUrUrCrArArArCrArArArUrGrUrGrUrCrArCrArArAr | |
| | GrU/AltR2/ | |
| MG29-1 Guide 6 | /AltR1/rUrArArUrUrUrCrUrArCrUrGrUrUrGrUrArGrA | 4375 |
| sgRNA synthesized | rUrUrGrArUrGrUrGrUrArUrArUrCrArCrArGrArCrAr | |
| | ArA/AltR2/ | |
| MG29-1 Guide 7 | /AltR1/rUrArArUrUrUrCrUrArCrUrGrUrUrGrUrArGrA | 4376 |
| sgRNA synthesized | rUrArArGrArGrCrArArCrArGrUrGrCrUrGrUrGrGrCr | |
| | CrU/AltR2/ | |
| MG29-1 Guide 8 | /AltR1/rUrArArUrUrUrCrUrArCrUrGrUrUrGrUrArGrA | 4377 |
| sgRNA synthesized | rUrGrCrArUrGrUrGrCrArArArCrGrCrCrUrUrCrArAr | |
| | CrA/AltR2/ | |
| MG29-1 Guide 9 | /AltR1/rUrArArUrUrUrCrUrArCrUrGrUrUrGrUrArGrA | 4378 |
| sgRNA synthesized | rUrCrArUrGrUrGrCrArArArCrGrCrCrUrUrCrArArCr | |
| | ArA/AltR2/ | |
| MG29-1 Guide 10 | /AltR1/rUrArArUrUrUrCrUrArCrUrGrUrUrGrUrArGrA | 4379 |
| sgRNA synthesized | rUrArArCrArArCrArGrCrArUrUrArUrUrCrCrArGrAr | |
| | ArG/AltR2/ | |
| MG29-1 Guide 11 | /AltR1/rUrArArUrUrUrCrUrArCrUrGrUrUrGrUrArGrA | 4380 |
| sgRNA synthesized | rUrUrUrCrCrArGrArArGrArCrArCrCrUrUrCrUrUrCr | |
| | CrC/AltR2/ | |
| MG29-1 Guide 12 | /AltR1/rUrArArUrUrUrCrUrArCrUrGrUrUrGrUrArGrA | 4381 |
| sgRNA synthesized | rUrCrArGrArArGrArCrArCrCrUrUrCrUrUrCrCrCrCr | |
| | ArG/AltR2/ | |
| MG29-1 Guide 13 | /AltR1/rUrArArUrUrUrCrUrArCrUrGrUrUrGrUrArGrA | 4382 |
| sgRNA synthesized | rUrUrGrGrArArUrArArUrGrCrUrGrUrUrGrUrUrGrAr | |
| | ArG/AltR2/ | |
| MG29-1 Guide 14 | /AltR1/rUrArArUrUrUrCrUrArCrUrGrUrUrGrUrArGrA | 4383 |
| sgRNA synthesized | rUrUrUrGrArArGrGrCrGrUrUrUrGrCrArCrArUrGrCr | |
| | ArA/AltR2/ | |
| MG29-1 Guide 15 | /AltR1/rUrArArUrUrUrCrUrArCrUrGrUrUrGrUrArGrA | 4384 |
| sgRNA synthesized | rUrArArGrGrCrGrUrUrUrGrCrArCrArUrGrCrArArAr | |
| | GrU/AltR2/ | |
| MG29-1 Guide 16 | /AltR1/rUrArArUrUrUrCrUrArCrUrGrUrUrGrUrArGrA | 4385 |
| sgRNA synthesized | rUrGrCrArCrArUrGrCrArArArGrUrCrArGrArUrUrUr | |
| | GrU/AltR2/ | |
| MG29-1 Guide 17 | /AltR1/rUrArArUrUrUrCrUrArCrUrGrUrUrGrUrArGrA | 4386 |
| sgRNA synthesized | rUrCrArCrArUrGrCrArArArGrUrCrArGrArUrUrUrGr | |
| | UrU/AltR2/ | |
| MG29-1 Guide 18 | /AltR1/rUrArArUrUrUrCrUrArCrUrGrUrUrGrUrArGrA | 4387 |
| sgRNA synthesized | rUrGrUrUrGrCrUrCrCrArGrGrCrCrArCrArGrCrArCr | |
| | UrG/AltR2/ | |
| MG29-1 Guide 19 | /AltR1/rUrArArUrUrUrCrUrArCrUrGrUrUrGrUrArGrA | 4388 |
| sgRNA synthesized | rUrUrUrGrCrUrCrCrArGrGrCrCrArCrArGrCrArCrUr | |
| | GrU/AltR2/ | |
| MG29-1 Guide 20 | /AltR1/rUrArArUrUrUrCrUrArCrUrGrUrUrGrUrArGrA | 4389 |
| sgRNA synthesized | rUrCrUrCrCrArGrGrCrCrArCrArGrCrArCrUrGrUrUr | |
| | GrC/AltR2/ | |
| MG29-1 Guide 21 | /AltR1/rUrArArUrUrUrCrUrArCrUrGrUrUrGrUrArGrA | 4390 |
| sgRNA synthesized | rUrCrUrCrUrUrGrArArGrUrCrCrArUrArGrArCrCrUr | |
| | CrA/AltR2/ | |
| MG29-1 Guide 22 | /AltR1/rUrArArUrUrUrCrUrArCrUrGrUrUrGrUrArGrA | 4391 |
| sgRNA synthesized | rUrArArGrUrCrCrArUrArGrArCrCrUrCrArUrGrUrCr | |
| | UrA/AltR2/ | |
| MG29-1 Guide 23 | /AltR1/rUrArArUrUrUrCrUrArCrUrGrUrUrGrUrArGrA | 4392 |
| sgRNA synthesized | rUrUrGrUrCrUrGrUrGrArUrArUrArCrArCrArUrCrAr | |
| | GrA/AltR2/ | |
| MG29-1 Guide 24 | /AltR1/rUrArArUrUrUrCrUrArCrUrGrUrUrGrUrArGrA | 4393 |
| sgRNA synthesized | rUrGrUrCrUrGrUrGrArUrArUrArCrArCrArUrCrArGr | |
| | ArA/AltR2/ | |
| MG29-1 Guide 25 | /AltR1/rUrArArUrUrUrCrUrArCrUrGrUrUrGrUrArGrA | 4394 |
| sgRNA synthesized | rUrUrCrUrGrUrGrArUrArUrArCrArCrArUrCrArGrAr | |
| | ArU/AltR2/ | |
| MG29-1 Guide 26 | /AltR1/rUrArArUrUrUrCrUrArCrUrGrUrUrGrUrArGrA | 4395 |
| sgRNA synthesized | rUrCrUrUrUrGrUrGrArCrArCrArUrUrUrGrUrUrUrGr | |
| | ArG/AltR2/ | |
| MG29-1 Guide 27 | /AltR1/rUrArArUrUrUrCrUrArCrUrGrUrUrGrUrArGrA | 4396 |
| sgRNA synthesized | rUrGrUrGrArCrArCrArUrUrUrGrUrUrUrGrArGrArAr | |
| | UrC/AltR2/ | |
| MG29-1 Guide 28 | /AltR1/rUrArArUrUrUrCrUrArCrUrGrUrUrGrUrArGrA | 4397 |
| sgRNA synthesized | rUrUrGrArCrArCrArUrUrUrGrUrUrUrGrArGrArArUr | |
| | CrA/AltR2/ | |
| MG29-1 Guide 29 | /AltR1/rUrArArUrUrUrCrUrArCrUrGrUrUrGrUrArGrA | 4398 |
| sgRNA synthesized | rUrGrUrUrUrGrArGrArArUrCrArArArArUrCrGrGrUr | |
| | GrA/AltR2/ | |
| MG29-1 Guide 30 | /AltR1/rUrArArUrUrUrCrUrArCrUrGrUrUrGrUrArGrA | 4399 |
| sgRNA synthesized | rUrUrUrUrGrArGrArArUrCrArArArArUrCrGrGrUrGr | |
| | ArA/AltR2/ | |
| MG29-1 Guide 31 | /AltR1/rUrArArUrUrUrCrUrArCrUrGrUrUrGrUrArGrA | 4400 |
| sgRNA synthesized | rUrGrArGrArArUrCrArArArArUrCrGrGrUrGrArArUr | |
| | ArG/AltR2/ | |
| MG29-1 Guide 32 | /AltR1/rUrArArUrUrUrCrUrArCrUrGrUrUrGrUrArGrA | 4401 |
| sgRNA synthesized | rUrArGrArArUrCrArArArArUrCrGrGrUrGrArArUrAr | |
| | GrG/AltR2/ | |
| MG29-1 Guide 33 | /AltR1/rUrArArUrUrUrCrUrArCrUrGrUrUrGrUrArGrA | 4402 |
| sgRNA synthesized | rUrUrCrArCrUrGrGrArUrUrUrArGrArGrUrCrUrCrUr | |
| | CrA/AltR2/ | |
| MG29-1 Guide 34 | /AltR1/rUrArArUrUrUrCrUrArCrUrGrUrUrGrUrArGrA | 4403 |
| sgRNA synthesized | rUrArGrArGrUrCrUrCrUrCrArGrCrUrGrGrUrArCrAr | |
| | CrG/AltR2/ | |
| MG29-1 Guide 35 | /AltR1/rUrArArUrUrUrCrUrArCrUrGrUrUrGrUrArGrA | 4404 |
| sgRNA synthesized | rUrGrArGrUrCrUrCrUrCrArGrCrUrGrGrUrArCrArCr | |
| | GrG/AltR2/ | |
| MG29-1 Guide 36 | /AltR1/rUrArArUrUrUrCrUrArCrUrGrUrUrGrUrArGrA | 4405 |
| sgRNA synthesized | rUrCrUrGrUrGrArUrGrUrCrArArGrCrUrGrGrUrCrGr | |
| | ArG/AltR2/ | |
| MG29-1 Guide 37 | /AltR1/rUrArArUrUrUrCrUrArCrUrGrUrUrGrUrArGrA | 4406 |
| sgRNA synthesized | rUrCrArArArGrCrUrUrUrUrCrUrCrGrArCrCrArGrCr | |
| | UrU/AltR2/ | |
| MG29-1 Guide 38 | /AltR1/rUrArArUrUrUrCrUrArCrUrGrUrUrGrUrArGrA | 4407 |
| sgRNA synthesized | rUrArArArGrCrUrUrUrUrCrUrCrGrArCrCrArGrCrUr | |
| | UrG/AltR2/ | |
| MG29-1 Guide 39 | /AltR1/rUrArArUrUrUrCrUrArCrUrGrUrUrGrUrArGrA | 4408 |
| sgRNA synthesized | rUrUrCrUrCrGrArCrCrArGrCrUrUrGrArCrArUrCrAr | |
| | CrA/AltR2/ | |
| MG29-1 Guide 40 | /AltR1/rUrArArUrUrUrCrUrArCrUrGrUrUrGrUrArGrA | 4409 |
| sgRNA synthesized | rUrCrUrCrGrArCrCrArGrCrUrUrGrArCrArUrCrArCr | |
| | ArG/AltR2/ | |
| MG29-1 Guide 41 | /AltR1/rUrArArUrUrUrCrUrArCrUrGrUrUrGrUrArGrA | 4410 |
| sgRNA synthesized | rUrUrCrGrArCrCrArGrCrUrUrGrArCrArUrCrArCrAr | |
| | GrG/AltR2/ | |
| MG29-1 Guide 42 | /AltR1/rUrArArUrUrUrCrUrArCrUrGrUrUrGrUrArGrA | 4411 |
| sgRNA synthesized | rUrCrArArArArCrCrUrGrUrCrArGrUrGrArUrUrGrGr | |
| | GrU/AltR2/ | |
| MG29-1 Guide 43 | /AltR1/rUrArArUrUrUrCrUrArCrUrGrUrUrGrUrArGrA | 4412 |
| sgRNA synthesized | rUrArArArArCrCrUrGrUrCrArGrUrGrArUrUrGrGrGr | |
| | UrU/AltR2/ | |
| MG29-1 Guide 44 | /AltR1/rUrArArUrUrUrCrUrArCrUrGrUrUrGrUrArGrA | 4413 |
| sgRNA synthesized | rUrGrGrUrUrCrCrGrArArUrCrCrUrCrCrUrCrCrUrGr | |
| | ArA/AltR2/ | |
| MG29-1 Guide 45 | /AltR1/rUrArArUrUrUrCrUrArCrUrGrUrUrGrUrArGrA | 4414 |
| sgRNA synthesized | rUrCrGrArArUrCrCrUrCrCrUrCrCrUrGrArArArGrUr | |
| | GrG/AltR2/ | |
| MG29-1 Guide 46 | /AltR1/rUrArArUrUrUrCrUrArCrUrGrUrUrGrUrArGrA | 4415 |
| sgRNA synthesized | rUrArArUrCrUrGrCrUrCrArUrGrArCrGrCrUrGrCrGr | |
| | GrC/AltR2/ | |
| MG29-1 Guide 47 | /AltR1/rUrArArUrUrUrCrUrArCrUrGrUrUrGrUrArGrA | 4416 |
| sgRNA synthesized | rUrArUrCrUrGrCrUrCrArUrGrArCrGrCrUrGrCrGrGr | |
| | CrU/AltR2/ | |
| MG29-1 Guide 48 | /AltR1/rUrArArUrUrUrCrUrArCrUrGrUrUrGrUrArGrA | 4417 |
| sgRNA synthesized | rUrArArCrCrCrGrGrCrCrArCrUrUrUrCrArGrGrArGr | |
| | GrA/AltR2/ | |
| MG29-1 Guide 49 | /AltR1/rUrArArUrUrUrCrUrArCrUrGrUrUrGrUrArGrA | 4418 |
| sgRNA synthesized | rUrCrArGrGrArGrGrArGrGrArUrUrCrGrGrArArCrCr | |
| | CrA/AltR2/ | |
| MG29-1 Guide 50 | /AltR1/rUrArArUrUrUrCrUrArCrUrGrUrUrGrUrArGrA | 4419 |
| sgRNA synthesized | rUrArGrGrArGrGrArGrGrArUrUrCrGrGrArArCrCrCr | |
| | ArA/AltR2/ | |
| MG29-1 Guide 51 | /AltR1/rUrArArUrUrUrCrUrArCrUrGrUrUrGrUrArGrA | 4420 |
| sgRNA synthesized | rUrGrGrArArCrCrCrArArUrCrArCrUrGrArCrArGrGr | |
| | UrU/AltR2/ | |
| MG29-1 Guide 52 | /AltR1/rUrArArUrUrUrCrUrArCrUrGrUrUrGrUrArGrA | 4421 |
| sgRNA synthesized | rUrUrGrArArArGrUrUrUrArGrGrUrUrCrGrUrArUrCr | |
| | UrG/AltR2/ | |
| MG29-1 Guide 53 | /AltR1/rUrArArUrUrUrCrUrArCrUrGrUrUrGrUrArGrA | 4422 |
| sgRNA synthesized | rUrGrArArArGrUrUrUrArGrGrUrUrCrGrUrArUrCrUr | |
| | GrU/AltR2/ | |
| MG29-1 Guide 54 | /AltR1/rUrArArUrUrUrCrUrArCrUrGrUrUrGrUrArGrA | 4423 |
| sgRNA synthesized | rUrArArArGrUrUrUrArGrGrUrUrCrGrUrArUrCrUrGr | |
| | UrA/AltR2/ | |

### Example 19—Re-Testing of Lead Guides of MG29-1

[0419] An experiment retesting the lead guides for MG29-1 was performed. The three exons of the T cell receptor alpha chain constant region were scanned for sequences matching 5′-TTN-3′ and single-guide RNAs ordered from IDT using Alt-R modifications. All guide spacer sequences 22 nt long. Guides were mixed with purified MG29-1 protein (80 pmol gRNA+63 pmol MG29-1; or 160 pmol gRNA with 126 pmol MG29-1), incubated for 15 minutes at room temperature. T cells were purified from PBMCs by negative selection using (Stemcell Technologies Human T cell Isolation Kit #17951) and activated by CD2/3/28 beads (Miltenyi T cell Activation/Expansion Kit #130-091-441). After four days of cell growth, each MG29-1/guide RNA mixture was electroporated into 200,000 T cells with a Lonza 4-D Nucleofector, using program EO-115 and P3 buffer. Seventy-two hours post-transfection, genomic DNA was harvested, and PCR amplified for analysis using high-throughput DNA sequencing. The creation of insertions and deletions characteristic of NHEJ-based gene editing was quantified using a proprietary Python script (see FIG. 40).

### Example 20—Testing Length of Guide Spacer for MG29-1

[0420] An experiment was performed to determine the optimal guide spacer length. The three exons of the T cell receptor alpha chain constant region were scanned for sequences matching 5′-TTN-3′ and single-guide RNAs ordered from IDT using Alt-R modifications. Guides were mixed with purified MG29-1 protein (80 pmol gRNA+60 pmol effector; 160 pmol gRNA+120 pmol effector; or 320 pmol gRNA+240 pmol effector), incubated for 15 minutes at room temperature. T cells were purified from PBMCs by negative selection using (Stemcell Technologies Human T cell Isolation Kit #17951) and activated by CD2/3/28 beads (Miltenyi T cell Activation/Expansion Kit #130-091-441). After four days of cell growth, each MG29-1/guide RNA mixture was electroporated into 200,000 T cells with a Lonza 4-D Nucleofector, using program EO-115 and P3 buffer. Seventy-two hours post-transfection, genomic DNA was harvested, and PCR amplified for analysis using high-throughput DNA sequencing. The creation of insertions and deletions characteristic of NHEJ-based gene editing was quantified using a proprietary Python script. The results are shown in FIG. 41, which demonstrates that guide spacer lengths of 20-24 nt work well, with a dropoff at 19 nt.

### Example 21—Determination of MG29-1 Indel Generation Versus TCR Expression

[0421] Cells from FIG. 41 were analyzed for TCR expression by flow cytometry using the APC-labeled anti-human TCRα/β Ab (Biolegend #306718, clone IP26) and an Attune NxT flow cytometer (Thermo Fisher). Indel data are taken from FIG. 41.

### Example 22—Targeted CAR Integration with MG29-1

[0422] The three exons of the T cell receptor alpha chain constant region were scanned for sequences matching 5′-TTN-3′ and single-guide RNAs ordered from IDT using IDT's proprietary Alt-R modifications. Guides (80 pmol) were mixed with purified MG29-1 protein (63 pmol), incubated for 15 minutes at room temperature. T cells were purified from PBMCs by negative selection using (Stemcell Technologies Human T cell Isolation Kit #17951) and activated by CD2/3/28 beads (Miltenyi T cell Activation/Expansion Kit #130-091-441). After four days of cell growth, each MG29-1/guide RNA mixture was electroporated into 200,000 T cells with a Lonza 4-D Nucleofector, using program EO-115 and P3 buffer. 100,000 vector genomes of a serotype 6 adeno-associated virus (AAV-6) containing the coding sequence for a customized chimeric antigen receptor flanked by 5′ and 3′ homology arms (5′ arm SEQ ID NO: 4424 being about 500 nt in length and 3′ arm SEQ ID NO: 4425 being about 500 nt in length) targeting the TRAC gene were added to the cells immediately following transfection. Replicates were analyzed for TCR expression versus TRAC indels (FIG. 42), showing that indels in the TRAC gene correlated with loss of expression of TCR Cells were also analyzed by flow cytometry simultaneously for TCR expression as in Example 21 (FIG. 42) and for binding of the target antigen to the CAR (FIG. 43, in which the plots are gated on single, live cells). The results of the flow analysis in FIG. 43 indicated that while the guide RNAs alone were effective in eliminating TCR expression (“RNP only”), addition of guide RNA plus AAV resulted in a new population of cells binding the CAR antigen (top left of plots “AAV+MG29-1-19-22” and “AAV+MG29-1-35-22”). The sgRNA 35 (SEQ ID NO: 4404) was somewhat more effective in inducing integration of the CAR than sgRNA 19 (SEQ ID NO: 4388). One possible explanation for the difference is that the predicted nuclease cut site for Guide 19 is −160 bp away from the end of the right homology arm.

TABLE 5B
Guide RNAs used in Example 22

| Entity Name | Sequence | SEQ ID NO: |
|---|---|---|
| MG29-1 TRAC | TTGCTCCAGGCCACAGCACTGT | 4334 |
| Guide 19 | | |
| Target- | | |
| binding | | |
| Sequence | | |
| MG29-1 TRAC | /AltR1/rUrArArUrUrUrCr | 4388 |
| Guide 19 | UrArCrUrGrUrUrGrUrArGr | |
| full sgRNA | ArUrUrUrGrCrUrCrCrArGr | |
| synthesized | GrCrCrArCrArGrCrArCrUr | |
| | GrU/AltR2/ | |
| MG29-1 | GAGTCTCTCAGCTGGTACACGG | 4350 |
| TRAC Guide | | |
| 35 Target- | | |
| binding | | |
| Sequence | | |
| MG29-1 TRAC | /AltR1/rUrArArUrUrUrCrUr | 4404 |
| Guide 35 | ArCrUrGrUrUrGrUrArGrArUr | |
| full sgRNA | GrArGrUrCrUrCrUrCrArGrCr | |
| synthesized | UrGrGrUrArCrArCrGrG/AltR2/ | |

/AltR1/ and /AltR2/ refer to IDT's proprietary Alt-R 5′ and 3′ modifications; m; 2′-O-methyl base (for example an A base with 2′-O-methyl modification is written as mA), i2F; internal 2′-flourine base (for example an internal C with 2′-flourine modification is written as /12FC/), 52F; 2′-flourine base at the 5′ end of the sequence (for example a 5′ C with 2′-flourine modification is written as /52FC/), 32F; 2′-flourine base at the 3′ end of the sequence (for example a 3′ A base with 2′-flourine modification is written as /32FA/), r; native RNA linkage comprising the sugar ribose (for example the ribose or RNA form of the A base is written rA), d; deoxyribose sugar (DNA) linkage (for example a deoxyribose form of the A base is written dA), *; between bases in which one of the oxygen molecules in the phosphodiester bond is replaced with sulfur

### Example 5—MG29-1 TRAC Editing in HSCs

[0423] Hematopoietic stem cells were purchased from Allcells and thawed per the supplier's instructions, washed in DMEM+10% FBS, and resuspended in Stemspan II medium plus CC110 cytokines. One million cells were cultured for 72 hours in a 6-well dish in 4 mL medium. MG29-1 RNPs were made, transfected, and gene editing analyzed as in Example 18 except for use of the EO-100 nucleofection program. The results are shown in FIG. 61, which shows gene editing at TRAC in hematopoietic stem cells using the #19 (SEQ ID NO:4388) and #35 (SEQ ID NO: 4404) sgRNAs in Table 5B below. The results again indicate that the #35 sgRNA is highly effective at targeting the TRAC locus.

TABLE 5C
Guide RNAs used in Example 23

| | | SEQ |
|---|---|---|
| | | ID |
| Entity Name | Sequence | NO: |
| MG29-1 | TTGCTCCAGGCCACAGCACTGT | 4334 |
| TRAC Guide | | |
| 19 Target- | | |
| binding | | |
| Sequence | | |
| MG29-1 TRAC | /AltR1/rUrArArUrUrUrCr | 4388 |
| Guide 19 | UrArCrUrGrUrUrGrUrArGr | |
| full sgRNA | ArUrUrUrGrCrUrCrCrArGr | |
| synthesized | GrCrCrArCrArGrCrArCrUr | |
| | GrU/AltR2/ | |
| MG29-1 | GAGTCTCTCAGCTGGTACACGG | 4350 |
| TRAC Guide | | |
| 35 Target- | | |
| binding | | |
| Sequence | | |
| MG29-1 | /AltR1/rUrArArUrUrUrCr | 4404 |
| TRAC Guide | UrArCrUrGrUrUrGrUrArGr | |
| 35 | ArUrGrArGrUrCrUrCrUrCr | |
| full sgRNA | ArGrCrUrGrGrUrArCrArCr | |
| synthesized | GrG/AltR2/ | |

/AltR1/ and /AltR2/ refer to IDT's proprietary Alt-R 5′ and 3′ modifications; m; 2′-O-methyl base (for example a A base with 2′-O-methyl modification is written as mA), i2F; internal 2′-flourine base (for example an internal C with 2′-flourine modification is written as /i2FC/), 52F; 2′-flourine base at the 5′ end of the sequence (for example a 5′ C with 2′-flourine modification is written as /52FC/), 32F; 2′-flourine base at the 3′ end of the sequence (for example a 3′ A base with 2′-flourine modification is written as /32FA/), r; native RNA linkage comprising the sugar ribose (for example the ribose or RNA form of the A base is written rA), d; deoxyribose sugar (DNA) linkage (for example a deoxyribose form of the A base is written dA), *; between bases in which one of the oxygen molecules in the phosphodiester bond is replaced with sulfur

### Example 6—Further Analysis of PAM Specificity Associated with MG29-1

[0424] Further analysis was performed to determine more precisely the PAM specificity of MG29-1. Guide RNAs were designed using a 5′-NTTN-3′ PAM sequence and then sorted according to the gene editing activity observed (FIG. 45, in which the identity of the underlined base—the 5′-proximal N is shown for each bin). All of the guides with activity greater than 10% had a T at this position in the genomic DNA indicating that the MG29-1 PAM may be better described as 5′-TTTN-3′. The statistical significance of the over-representation of T at this position is shown for each bin. In FIG. 45, the various bins (High, medium, low, >1%, <1%) signify:

$$High : > 50 \% indels ( N = 4 )$$

$$Medium : 10 - 50 \% indels ( N = 15 )$$

$$Low : 5 - 10 \% indels ( N = 5 )$$

$$> 1 \% : 1 - 5 \% indels ( N = 12 )$$

$$< 1 \% ( N = 82 )$$

TABLE 2
p-values for nucleotide specificity analysis in Example 24

| | chi\hat{ }2 p-value |
|---|---|
| high/med | 0.000005 |
| low | 0.035110 |
| >1% | 0.005416 |
| <1% | 0.126751 |

### Example 7—Determining MG29-1 Indel Induction Ability Vs Spacer Base Composition

[0425] Further analysis was conducted of gene editing activity versus the base composition of MG29-1 spacer sequences. The correlation was modest (R\hat{ }=0.23) but there is a trend towards better activity with higher GC content (see FIG. 46, in which correlation between indels induced in cultured cells versus GC content of spacer sequences is presented as a dot plot).

### Example 26—MG29-1 Guide Chemistry Modifications

[0426] An experiment to optimize chemical modifications for targeting of the VEGF-A locus using MG29-1 was performed, using the procedure of Example 18 but with the indicated guide RNAs targeting VEGF-A (see Table 7 below). The experiment used 126 pmol MG29-1 and 160 pmol guide RNA. The results are presented in FIG. 47. Guides #4, 5, 6, 7, and 8 showed improved activity versus the unmodified guide #1, indicating that the corresponding modifications in these sequences improved the activity of these guide RNAs versus an unmodified RNA sequence.

TABLE 7
MG29-1 guide modifications

| | MG29-1 guide with targeting | |
|---|---|---|
| MG29- | sequence in bold and | SEQ |
| 1 Test | modifications per | ID |
| No. | legend below | NO: |
| 1 | UAAUUUCUACUCUUGUAGAU | 3985 |
| | GAAAGGGGGTGGGGGGAGTT | |
| | TGCT | |
| 2 | mU*mA*mA*UUUCUACUCUU | 3986 |
| | GUAGAUGAAAGGGGGTGGGG | |
| | GGAGTTT*mG*mC*mT | |
| 3 | mU*mA*AUUUCUACUCUUGU | 3987 |
| | AGAUGAAAGGGGGTGGGGGG | |
| | AGTTT*mG*mC*mT | |
| 4 | mU*AAUUUCUACUCUUGUAG | 3988 |
| | AUGAAAGGGGGTGGGGGGAG | |
| | TTT*mG*mC*mT | |
| 5 | mU*AAUUUCUACUCUUGUAG | 3989 |
| | AUGAAAGGGGGTGGGGGGAG | |
| | TTTGC*mT | |
| 6 | mC*UAAUUUCUACUCUUGUA | 3990 |
| | GAUGAAAGGGGGTGGGGGGA | |
| | GTTT*mG*mC*mT | |
| 7 | mC*U*AAUUUCUACUCUUGU | 3991 |
| | AGAUGAAAGGGGGTGGGGGG | |
| | AGTTTG*C*mT | |
| 8 | /AltR1/UAAUUUCUACUCU | 3992 |
| | UGUAGAUGAAAGGGGGTGGG | |
| | GGGAGTTTGCT/AltR2/ | |

Legend:
/AltR1/ and /AltR2/ refer to IDT's proprietary Alt-R 5′ and 3′ modifications; m; 2′-O-methyl base (for example a base with 2′-O-methyl modification is written as mA), i2F; internal 2′-flourine base (for example an internal C with 2′-flourine modification is written as /12FC/), 52F; 2′-flourine base at the 5′ end of the sequence (for example a 5′ C with 2′-flourine modification is written as /52FC/), 32F; 2′-flourine base at the 3′ end of the sequence (for example a 3′ A base with 2′-flourine modification is written as /32FA/), r; native RNA linkage comprising the sugar ribose (for example the ribose or RNA form of the A base is written rA), d; deoxyribose sugar (DNA) linkage (for example a deoxyribose form of the A base is written dA), *; between bases in which one of the oxygen molecules in the phosphodiester bond is replaced with sulfur

### Example 27—Titration of Modified MG29-1 Guides from Example 26

[0427] A further experiment was performed to determine the dose dependence of the activity of the modified guides used in Example 26 to identify possible dose-dependent toxicity effects. The experiment was performed as in Example 26 but with ¼th (B), ⅛th (C), 1/16th (D), and 1/32nd (E) of the starting dose (A, 126 pmol MG29-1 and 160 pmol guide RNA). The results are presented in FIG. 48).

### Example 28—Large Scale Synthesis of Nucleases Described Herein

### Project Overview

[0428] Production of Metagenomi's Type V-A CRISPR nuclease, MG29-1, is scaled up to an initial culture volume of 10 L. An expression screen, scaled-up expression, downstream development, a formulation study, and delivery of purified protein >=90% by SDS-PAGE are performed.

### Expression and Purfication Screen

### Expression:

[0429] Expression of MG29-1 from the pMG450 vector depicted in FIG. 49 is tested in a screen varying the following conditions: host strain, expression media, inducer, induction time, and temperature.

[0430] After screening, E. coli is transformed with the appropriate expression plasmid, the culture is grown to a suitable density shake flasks, and the culture is induced using materials and methods according to the optimal expression conditions identified during the expression screen. The cell paste is harvested and expression is verified by SDS-PAGE. For these experiments, the cell culture volume is limited to 20 L. Up to 1 gram of protein is purified using the following method, formulated into storage buffer, and yield and concentration by A280 and purity by SDS-PAGE is assessed.

### Purification:

[0431] Total soluble protein extracted from E. coli cell paste is analyzed by SDS-PAGE for all conditions. Immobilized metal affinity chromatography (IMAC) pull-down followed by SDS-PAGE is performed on the top three expression conditions to estimate yield and purity and to identify the optimal expression condition. A scaled-up method is developed for lysis. Critical parameters are identified for purification by IMAC and subtractive IMAC (including tobacco etch virus protease (TEV) cleavage). Column fractions are tested using SDS-PAGE. Elution pools are tested using SDS-PAGE and photometric absorbance at 280 nm (A280). A method for buffer exchange and concentration by tangential flow filtration (TFF) is developed.

[0432] An additional chromatography stage is developed to achieve ≥90% purity, if purity is lower than 90%. One chromatography mode is tested (e.g., ceramic hydroxyapatite chromatography). Up to 8 unique conditions are tested (e.g., 2-6 resins each with 2-3 buffer systems). Column fractions are tested using SDS-PAGE. Elution pools are tested using SDS-PAGE and A280. One condition is selected, and a three-condition load study is performed. Column fractions and elution pools are analyzed as described above. A method for buffer exchange may be developed and concentration by TFF.

### Formulation Study

[0433] Using purified protein, a formulation study is conducted to determine the optimal storage conditions for the purified protein. Study may explore concentration, storage buffer, storage temperature, maximum freeze/thaw cycles, storage time, or other conditions.

### Example 29—Demonstration of the Ability of Nucleases Described Herein to Edit an Intronic Region in Cultured Mouse Liver Cells

[0434] Intronic regions of expressed genes are attractive genomic targets to integrate a coding sequence of a therapeutic protein of interest with the goal of expressing that protein to treat or cure a disease. Integration of a protein coding sequence may be accomplished by creating a double strand break within the intron using a sequence specific nuclease in the presence of an exogenously supplied donor template. The donor template may be integrated into the double strand break via one of two main cellular repair pathways called homology directed repair (HDR) and non-homologous end joining (NHEJ) resulting in targeted integration of the donor template. The NHEJ pathway is dominant in non-dividing cells while the HDR pathway is primarily active in dividing cells. The liver is a particularly attractive tissue for targeted integration of a protein coding sequence due to the availability of in vivo delivery systems and the ability of the liver to express and secrete proteins with high efficiency.

[0435] To evaluate the potential of MG29-1 to create double strand breaks at intronic regions the intron 1 of serum albumin was selected as the target locus. Single guide RNA (sgRNA) with a spacer length of 22 nt targeted to mouse albumin intron 1 were identified using the guide finding algorithm in the Geneious Prime nucleic acid analysis software (https://www.geneious.com/prime/). Using a PAM of KTTG (Sequence Number: A3870) located 5′ to the spacer, a total of 112 potential sgRNA were identified within mouse albumin intron 1. Guides that spanned the intron/exon boundaries were excluded. Using Geneious Prime the spacer sequences of these 112 guides were searched against the mouse genome and a specificity score was assigned by the software based on the alignment to additional sites in the genome. Spacer sequences with 4 or more contiguous bases of the same base were excluded due to concerns about specificity. A total of 12 spacers with the highest specificity scores were selected for testing. To create the sgRNA the backbone sequence of “TAATTTCTACTGTTGTAGAT” was added to the 3′ end of the spacer sequence. The sgRNA was chemically synthesized incorporating chemically modified bases identified to improve the performance of sgRNA for cpf1 guides (AltR1/AltR2 chemistry available from Integrated DNA Technologies). The spacer sequences of these guides are listed in Table 8 below.

TABLE 8
Activity of MG29-1 sgRNA targeting mouse albumin intron 1 in Hepa1-6 cells
nucleofected with MG29-1/sgRNA RNP or transfected with MG29-1 mRNA and sgRNA
using Messenger Max

| | | | | | | Activity | |
|---|---|---|---|---|---|---|---|
| | | | | | | (INDEL %) | |
| | | | | | | in | |
| | | | | | | Hepa1-6 | |
| | | | | | | cells | mRNA/s |
| | Spacer | SEQ | | Se- | | RNP | gRNA |
| sgRNA | (DNA sequence, | ID | | quence | Specificity | nucleo- | lipid |
| name | no PAM) | NO: | PAM | Number | score | fection | transfection |
| mAlb29-1-1 | GTATAGCATGGTCGAGCAG | 3993 | TTTA | A4012 | 98.5 | 86.5 | 43 |
| | GCA | | | | | | |
| mAlb29-1-2 | CCGATCGTTACAGGAAAAT | 3994 | GTTC | A4013 | 98.4 | 0 | 0 |
| | CTG | | | | | | |
| mAlb29-1-3 | AATTTATTACGGTCTCATA | 3995 | GTTG | A4014 | 98.2 | 0 | 0 |
| | GGG | | | | | | |
| mAlb29-1-4 | TTACGGTCTCATAGGGCCT | 3996 | TTTA | A4015 | 97.6 | 43.5 | 44 |
| | GCC | | | | | | |
| mAlb29-1-5 | CCTGTAACGATCGGGAACT | 3997 | TTTT | A4016 | 97.2 | 3 | 0 |
| | GGC | | | | | | |
| mAlb29-1-7 | AGTATAGCATGGTCGAGCA | 3998 | TTTT | A4017 | 96.8 | 11 | 15 |
| | GGC | | | | | | |
| mAlb29-1-8 | CTGTAACGATCGGGAACTG | 3999 | TTTC | A4018 | 95.9 | 77 | 45 |
| | GCA | | | | | | |
| mAlb29-1-9 | GATACAGTTGAATTTATTA | 4000 | GTTG | A4019 | 95.3 | 0 | 0 |
| | CGG | | | | | | |
| mAlb29-1- | TAGTATAGCATGGTCGAGC | 4001 | TTTT | A4020 | 95.2 | 18 | 35 |
| 10 | AGG | | | | | | |
| mAlb29-1- | CATCTGAGAACCCTTAGGT | 4002 | TTTG | A4021 | 95.0 | 7 | 2 |
| 11 | GGT | | | | | | |
| mAlb29-1- | AGTGTAGCAGAGAGGAACC | 4003 | TTTG | A4022 | 93.8 | NT | 47 |
| 12 | ATT | | | | | | |
| mAlb29-1- | CTAGTAATGGAAGCCTGGT | 4004 | TTTT | A4023 | 92.4 | 8 | 24 |
| 13 | ATT | | | | | | |
| mAlb29-1- | GGTATCTTTGATGACAATA | 4005 | TTTT | A4024 | 91.8 | 0 | 13 |
| 14 | ATG | | | | | | |
| mAlb29-1- | TCTAGTAATGGAAGCCTGG | 4006 | TTTT | A4025 | 91.8 | 0 | 0 |
| 15 | TAT | | | | | | |
| mAlb29-1- | TAGTAATGGAAGCCTGGTA | 4007 | TTTC | A4026 | 89.8 | 90.5 | 51 |
| 16 | TTT | | | | | | |
| mAlb29-1- | GTATCTTTGATGACAATAA | 4008 | TTTG | A4027 | 87.8 | 10 | NT |
| 17 | TGG | | | | | | |
| mAlb29-1- | AAGATTGATGAAGACAACT | 4009 | TTTA | A4028 | 87.4 | 76 | NT |
| 18 | AAC | | | | | | |
| mAlb29-1- | CTCTCTGCTACACTCAAAG | 4010 | GTTC | A4029 | 85.7 | 0 | 0 |
| 19 | TTA | | | | | | |
| mAlb29-1- | AAACCCGTTAAGTGTTTAT | 4011 | TTTA | A4030 | 87.3 | 0 | 4 |
| 20 | ATC | | | | | | |

[0436] Hepa1-6 cells, a transformed mouse liver cell line, were cultured under standard conditions (DMEM media with 10% FBS in 5% CO2 incubator) and nucleofected with ribonuclear proteins formed by mixing the sgRNA and purified MG29-1 protein in PBS buffer. Hepa1-6 cells (1×10⁵) in suspension in complete SF nucleofection reagent (Lonza) were nucleofected using a 4D nucleofection device (Lonza) with RNP formed by mixing 50 pmol of MG29-1 protein and 100 pmol of sgRNA. After nucleofection the cells were plated in 24 well plates in DMEM plus 10% FBS and incubated in a 5% CO2 incubator for 48 to 72 h. Genomic DNA was then extracted from the cells using a column-based purification kit (Purelink genomic DNA mini kit, ThermoFisher Scientific) and quantified by absorbance at 260 nm. The albumin intron 1 region was PCR amplified from 50 ng of the genomic DNA in a reaction containing 0.5 micro molar each of the primers mA1b90F (CTCCTCTTCGTCTCCGGC) (SEQ ID NO: 4031) and mA1b1073R (CTGCCACATTGCTCAGCAC) (SEQ ID NO: 4032) and 1× Pfusion Flash PCR Master Mix.

[0437] The resulting 984 bp PCR product which spans the entire intron 1 of mouse albumin was purified using a column-based purification kit (DNA Clean and Concentrator, Zymo Research) and sequenced using primers located within 150 to 350 bp of the predicted target site for each sgRNA. A PCR product generated using primers mA1b90F (SEQ ID NO: 4031) and mA1b1073R (SEQ ID NO: 4032) from un-transfected Hepa1-6 cells was sequenced in parallel as a control. The Sanger sequencing chromatograms were analyzed using Inference of CRISPR Edits (ICE) that determines the frequency of INDELS as well as the INDEL profile (Hsiau et. al, Inference of CRISPR Edits from Sanger Trace Data. BioArxiv. 2018 https://www.biorxiv.org/content/early/2018/01/20/251082).

[0438] When a nuclease creates a double strand break (DSB) in DNA inside a living cell the DSB is repaired by the cellular DNA repair machinery. In actively dividing cells such as transformed mammalian cells in culture, and in the absence of a repair template, this repair occurs by the NHEJ pathway. The NHEJ pathway is an error prone process that introduces insertions or deletions of bases at the site of the double strand break (Lieber, M. R, Annu Rev Biochem. 2010; 79: 181-211). These insertions and deletions are therefore a hallmark of a double strand break that occurred and was subsequently repaired, is widely used as a readout of the editing or cutting efficiency of the nuclease. The profile of insertions and deletions depends on the characteristics of the nuclease that created the double strand break but also upon the sequence context at the cleavage site. Based on in vitro assays, the MG29-1 nuclease creates a staggered cut located 3′ of the PAM. Staggered cuts will often lead to larger deletions due to the trimming of the single stranded ends before end-joining. Table 8 lists the total INDEL frequency generated by each of the 19 sgRNA targeting mouse albumin intron 1 that were tested in Hepa1-6 cells. Eleven of the 18 sgRNA resulted in detectable INDELS at the target site with 5 sgRNA resulting in INDEL frequencies greater than 50% and 4 sgRNA resulted in indel frequencies greater than 75%. These data demonstrate that the MG29-1 nuclease can edit the genome of cultured mouse liver cells at the predicted target site for the sgRNA with efficiencies greater than 75%.

[0439] The editing efficiencies of the same set of sgRNA were evaluated by co-transfection of the sgRNA and a mRNA encoding the MG29-1 nuclease using a commercial lipid-based transfection reagent (Lipofectamine MessengerMAX, Invitrogen). The mRNA encoding MG29-1 was generated by in vitro transcription using T7 polymerase from a plasmid in which the coding sequence of MG29-1 was cloned. The MG29-1 coding sequence was codon optimized using human codon usage tables and flanked by nuclear localization signals derived from SV40 at the N-terminus and from Nucleoplasmin at the C-terminus. In addition, a UTR was included at the 3′ end of the coding sequence to improve translation. A 3′ UTR followed by an approximately 90 to 110 nucleotide poly A tract was included at the 3′ end of the coding sequence to improve mRNA stability in vivo (see e.g. SEQ ID NO: 4426 for wild-type MG29-1 and SEQ ID NO: 3327 for the S168R variant). The in vitro transcription reaction included the Clean Cap® capping reagent (Trilink BioTechnologies) and the resulting RNA was purified using the MEGAClear™ Transcription Clean-Up kit (Invitrogen) and purity was evaluated using the TapeStation (Agilent) and found to be composed of >90% full length RNA. As seen in Table 1, the editing efficiencies after mRNA/sgRNA lipid transfection of Hepa1-6 cells were similar but not identical to those seen with nucleofection of RNP but confirm that the MG29-1 nuclease is active in cultured liver cells when delivered in the form of an mRNA.

[0440] FIG. 50 is a representative example of the indel profile of MG29-1 as determined by ICE analysis using mALb29-1-8 as the guide (SEQ ID NO: 3999) and demonstrates that deletion of 4 bases was the most frequent event (25% of total sequences) and deletions of 1, 5, 6, or 7 bases each accounting for about 10 to 15% of the sequences. Longer deletions of up to 13 bases were also detected, but insertions were undetectable. By contrast, spCas9 with a guide targeting mouse albumin intron 1 generated primarily 1 base insertions or deletions.

[0441] FIG. 51 is a representative example of the indel profile of MG29-1 and sgRNA mA1b29-1-8 as determined by next generation sequencing (NGS) of the PCR product of the mouse albumin intron 1 region. In total approximately 15,000 sequence reads were obtained. By NGS deletion of 4 bases was the most frequent indel (about 20% of total) with deletions of 1, 5, 6 and 7 bases each accounting for about 10% of the indels. Larger deletions of up to 19 bp were also detected. The profile observed by NGS analysis matches closely that measured by ICE. These results demonstrate that MG29-1 generates large deletions at the target site consistent with the staggered cleavage observed in vitro.

### Example 8—Demonstration of the Ability of a Nuclease Described Herein to Target an Intronic Region in Cultured Human Liver Cells (HepG2)

[0442] To evaluate the potential of MG29-1 to create double strand breaks at intronic regions in human cells, the intron 1 of human serum albumin was selected as the target locus. Single guide RNA (sgRNA) with a spacer length of 22 nt targeted to human albumin intron 1 were identified using the guide finding algorithm in the Geneious Prime nucleic acid analysis software (https://www.geneious.com/prime/). Using a PAM of KTTG (Sequence Number: A3870) located 5′ to the spacer, a total of 90 potential sgRNA were identified within human albumin intron 1. Guides that spanned the intron/exon boundaries were excluded. Using Geneious Prime the spacer sequences of these guides were searched against the mouse genome and a specificity score was assigned by the software based on the alignment to additional sites in the genome. Spacer sequences with 4 or more contiguous bases of the same base were excluded due to concerns about specificity. A total of 23 spacers with the highest specificity scores were selected for testing. To create the sgRNA the backbone sequence of “TAATTTCTACTGTTGTAGAT” was added to the 3′ end of the spacer sequence. The sgRNA was chemically synthesized incorporating chemically modified bases identified to improve the performance of sgRNA for cpf1 guides (AltR1/AltR2 chemistry available from Integrated DNA Technologies). The spacer sequences of these guides are listed in Table 9.

TABLE 9
Spacer sequences of MG29-1 sgRNA targeting human albumin intron 1 and
activity in HepG2 cells nucleofected with MG29-1/sgRNA RNP

| | | | | | | Activity |
|---|---|---|---|---|---|---|
| | | | | | | (INDEL |
| | | SEQ | | | | %) in |
| sgRNA | | ID | | Sequence | Specificity | HepG2 |
| name | Spacer (DNA sequence, no PAM) | NO: | PAM | Number: | score | cells |
| hAlb_g63 | GTAAACTCTGCATCTTTAAAGA | 4033 | TTTA | A4056 | 91.25% | 0 |
| hAlb_g59 | TTTCAAAATATTGGGCTCTGAT | 4034 | TTTG | A4057 | 90.64% | 0 |
| hAlb_g58 | AGTAAACTCTGCATCTTTAAAG | 4035 | TTTT | A4058 | 90.46% | 0 |
| hAlb_g56 | AAGATGCAGAGTTTACTAAAAC | 4036 | TTTA | A4059 | 90.23% | 0 |
| hAlb_g72 | AAAATATTGGGCTCTGATTCCT | 4037 | TTTC | A4060 | 93.26% | 0 |
| hAlb_g70 | AAATAAAGCATAGTGCAATGGA | 4038 | TTTT | A4061 | 92.31% | 63 |
| hAlb_g74 | AATAAAGCATAGTGCAATGGAT | 4039 | TTTA | A4062 | 95.41% | 93 |
| hAlb_g83 | TGAGATCAACAGCACAGGTTTT | 4040 | TTTA | A4063 | 98.39% | 93 |
| hAlb_g85 | TGTAGGAATCAGAGCCCAATAT | 4041 | TTTC | A4064 | 99.20% | 55 |
| hAlb_g89 | CTGTAGGAATCAGAGCCCAATA | 4042 | TTTT | A4065 | 100.00% | 43 |
| hAlb_g88 | TCTGTAGGAATCAGAGCCCAAT | 4043 | TTTT | A4066 | 100.00% | 45 |
| hAlb_g77 | GTGACTGTAATTTTCTTTTGCG | 4044 | TTTA | A4067 | 96.77% | 0 |
| hAlb_g69 | CTTTTGCGCACTAAGGAAAGTG | 4045 | TTTT | A4068 | 92.18% | 3 |
| hAlb_g66 | TGAAGTCTTACAAGGTTATCTT | 4046 | TTTG | A4069 | 91.80% | 19 |
| hAlb_g75 | AGTGTCTATCAACAGCAACCAA | 4047 | TTTT | A4070 | 95.96% | 13 |
| hAlb_g79 | CTTAGTGCGCAAAAGAAAATTA | 4048 | TTTC | A4071 | 97.45% | 60 |
| hAlb_g82 | TAGCCTTATATTCAAACTTAGA | 4049 | TTTA | A4072 | 98.32% | 0 |
| hAlb_g80 | GGATAGTTATGAATTCAATCTT | 4050 | TTTG | A4073 | 97.46% | 23 |
| hAlb_g84 | CACTTTCCTTAGTGCGCAAAAG | 4051 | TTTG | A4074 | 98.85% | 96 |
| hAlb_g81 | GTATTTGTGAAGTCTTACAAGG | 4052 | TTTT | A4075 | 98.07% | 17 |
| hAlb_g90 | GTGTCTATCAACAGCAACCAAG | 4053 | TTTA | A4076 | 100.00% | 91 |
| hAlb_g87 | CGCACTAAGGAAAGTGCAAAGT | 4054 | TTTG | A4077 | 100.00% | 97 |
| hAlb_g86 | GCGCACTAAGGAAAGTGCAAAG | 4055 | TTTT | A4078 | 100.00% | 42 |

[0443] HepG2 cells, a transformed human liver cell line, were cultured under standard conditions (MEM media with 10% FBS in 5% CO2 incubator) and nucleofected with ribonuclear proteins formed by mixing the sgRNA and purified MG29-1 protein in PBS buffer. A total of 1 e5 HepG2 cells in suspension in complete SF nucleofection reagent (Lonza) were nucleofected using a 4D nucleofection device (Lonza) with RNP formed by mixing 80 pmol of MG29-1 protein and 160 pmol of sgRNA. After nucleofection the cells were plated in 24 well plates in DMEM plus 10% FBS and incubated in a 5% CO₂ incubator for 48 to 72 h. Genomic DNA was then extracted from the cells using a column-based purification kit (Purelink genomic DNA mini kit, ThermoFisher Scientific) and quantified by absorbance at 260 nm. The albumin intron 1 region was PCR amplified from 50 ng of the genomic DNA in a reaction containing 0.5 micro molar each of the primers hA1b 11F (TCTTCTGTCAACCCCACACGCC) (SEQ ID NO: 4079) and hA1b834R (CTGTCTGGGCAAGGGAAGA) (SEQ ID NO: 4080) and 1× Pfusion Flash PCR Master Mix. The resulting 826 bp PCR product which spans the entire intron 1 of mouse albumin was purified using a column-based purification kit (DNA Clean and Concentrator, Zymo Research) and sequenced using primers located within 150 to 350 bp of the predicted target site for the sgRNA.

[0444] The PCR product generated using primers hA1b 11F (TCTTCTGTCAACCCCACACGCC) (SEQ ID NO: 4079) and hA1b834R (CTTGTCTGGGCAAGGGAAGA) (SEQ ID NO: 4080) from un-transfected HepG2 cells was sequenced in parallel as a control. The Sanger sequencing chromatograms were analyzed using Inference of CRISPR Edits (ICE) that determines the frequency of INDELS as well as the INDEL profile. When a nuclease creates a double strand break (DSB) in DNA inside a living cell the DSB is repaired by the cellular DNA repair machinery. In actively dividing cells such as transformed mammalian cells in culture, and in the absence of a repair template, this repair occurs by the NHEJ pathway. The NHEJ pathway is an error prone process that introduces insertions or deletions of bases at the site of the double strand break (Lieber, M. R, Annu Rev Biochem. 2010; 79: 181-211).

[0445] These insertions and deletions are therefore a hallmark of a double strand break that occurred and was subsequently repaired, and is widely used as a readout of the editing or cutting efficiency of the nuclease. The profile of insertions and deletions depends on the characteristics of the nuclease that created the double strand break but also upon the sequence context at the cleavage site. Based on in vitro assays, the MG29-1 nuclease cleaves the target strand at 22 nucleotides from the PAM (less frequently at 21 nucleotides from the PAM) and cleaves the non-target strand at 18 nucleotides from the PAM which therefore creates 4 nucleotide staggered end located 3′ of the PAM. Staggered cuts will often lead to larger deletions due to the trimming of the single stranded ends before end-joining.

[0446] Table 9 lists the total indel frequency generated by each of the 23 sgRNA targeting human albumin intron 1 that were tested in HepG2 cells. Sixteen of the 23 sgRNA resulted in detectable indel at the target site with 8 sgRNA resulting in INDELS greater than 50% and 5 sgRNA resulted in indel frequencies than 90%. These data demonstrate that the MG29-1 nuclease can edit the genome of a cultured human liver cell line at the predicted target site for the sgRNA with efficiencies greater than 90%.

### Example 9—Demonstration of the Ability of Nucleases Described Herein to Edit Exonic Regions in Cultured Mouse Liver Cells

[0447] Sequence specific nucleases can be used to disrupt the coding sequences of genes and thereby create a functional knockout of a protein of interest. This can be of therapeutic use when the knockdown of a specific protein has a beneficial effect in a particular disease. One way to disrupt the coding sequence of a gene is to make a double strand break within the exonic regions of the gene using a sequence specific nuclease. These double strand breaks will be repaired via error prone repair pathways to generate insertions or deletions which can result in either frameshift mutations or changes to the amino acid sequence which disrupt the function of the protein.

[0448] To evaluate the potential of MG29-1 to create double strand breaks at exonic regions of a gene expressed in liver cells the gene encoding glycolate oxidase (hao-1) was selected as the target locus. Single guide RNA (sgRNA) with a spacer length of 22 nt targeted to exons 1 to 4 of mouse hao-1 were identified using the guide finding algorithm in the Geneious Prime nucleic acid analysis software (https://www.geneious.com/prime/). The first 4 exons of the hao-1 gene comprise approximately the N-terminal 50% of the hao-1 coding sequence. The first 4 exons were chosen because INDELS created towards the N-terminus of the coding sequence of a gene are more likely to create a frameshift or missense mutation that disrupts the activity of the protein. Using a PAM of KTTG (Sequence Number: A3870) located 5′ to the spacer, a total of 45 potential sgRNAs were identified within mouse hao-1 exons 1 through 4. Guides that spanned the intron/exon boundaries were included because such guides may create INDELS that interfere with splicing. Using Geneious Prime, the spacer sequences of these 45 guides were searched against the mouse genome and a specificity score was assigned by the software based on the alignment to additional sites in the mouse genome. Spacer sequences with 4 or more contiguous bases of the same base were excluded due to concerns about specificity. A total of 45 spacers with the highest specificity scores were selected for testing.

[0449] To create the sgRNA the backbone sequence of “TAATTTCTACTGTTGTAGAT” was added to the 3′ end of the spacer sequence. The sgRNA was chemically synthesized incorporating chemically modified bases identified to improve the performance of sgRNA for cpf1 guides (A1tR1/A1tR2 chemistry available from Integrated DNA Technologies). The spacer sequences of these guides are listed in Table 3.

TABLE 3
Spacer sequences of MG29-1 sgRNA targeting mouse hao-1 exons 1 to 4 and
activity in Hepa1-6 cells nucleofected with MG29-1/sgRNA RNP

| | | | | | | Activity |
|---|---|---|---|---|---|---|
| | | | | | | (INDEL |
| | Spacer | SEQ | | | | %) in |
| sgRNA | (DNA sequence, no | ID | | Sequence | Specificity | Hepa1-6 |
| name | PAM) | NO: | PAM | Number: | score | cells |
| mH29-1 | CCCCAGACCTGTAATAGTCATA | 4081 | TTTG | A4126 | 100.00% | 92.2 |
| mH29-2 | AGGACAGAGAGTCAGCATGCCA | 4082 | TTTT | A4127 | 100.00% | 0 |
| mH29-3 | GGAGACAACAGTGGACTTGCTG | 4083 | TTTT | A4128 | 100.00% | 0 |
| mH29-4 | CCCTACCCTGCCACAATGTTGC | 4084 | GTTG | A4129 | 100.00% | 0 |
| mH29-5 | CTTACCTAGAAAATGCTTGGAT | 4085 | GTTT | A4130 | 100.00% | 0 |
| mH29-6 | ACAGATCGATATCAGCAACGTT | 4086 | GTTG | A4131 | 100.00% | 0 |
| mH29-7 | CGAAGCATCCGTGGATAGAGCT | 4087 | GTTG | A4132 | 100.00% | 0 |
| mH29-8 | TTGGGCTACCTCCTCAATAGAA | 4088 | GTTC | A4133 | 100.00% | 0 |
| mH29-9 | AAGCTGCCACCACAACTCAGGT | 4089 | GTTC | A4134 | 100.00% | 0 |
| mH29-10 | TGGTGGCAGCTTGAACCTGTTC | 4090 | GTTG | A4135 | 100.00% | 0 |
| mH29-11 | CGCACGTCATCAATGCGGTTGC | 4091 | GTTC | A4136 | 100.00% | 0 |
| mH29-12 | CCCAGGTAAGGGGTGTCCACAG | 4092 | GTTG | A4137 | 100.00% | 0 |
| mH29-13 | CATCCAGCGAAGTGCCTCTGGG | 4093 | GTTG | A4138 | 100.00% | 0 |
| mH29-14 | AAATTCCAGATGGAAGCTCTAT | 4094 | TTTT | A4139 | 99.04% | 0 |
| mH29-15 | TGACTGTGGACACCCCTTACCT | 4095 | TTTG | A4140 | 99.04% | 97.5 |
| mH29-16 | ATTACAGCCTGTCAGACCATGG | 4096 | TTTC | A4141 | 99.30% | 91 |
| mH29-17 | GAGACAACAGTGGACTTGCTGA | 4097 | TTTG | A4142 | 98.37% | 27.5 |
| mH29-18 | CAACAATAGGCAGTGATGTCAA | 4098 | TTTA | A4143 | 99.22% | 85 |
| mH29-19 | CCTCGACTGGTCTGCATCAGTG | 4099 | GTTG | A4144 | 97.69% | 0 |
| mH29-20 | ATAATCACTGATGCAGACCAGT | 4100 | GTTC | A4145 | 98.07% | 0 |
| mH29-21 | TCAGCTAACGTCTCCTGATCAT | 4101 | GTTA | A4146 | 99.33% | 0 |
| mH29-22 | CTGATATCGATCTGTCAACTTC | 4102 | GTTG | A4147 | 99.22% | 0 |
| mH29-23 | TAAAGGGCATTTTGAGAGGTTT | 4103 | GTTG | A4148 | 99.22% | 0 |
| mH29-24 | AATAGCAAAGTTTCTTACCTAG | 4104 | TTTA | A4149 | 95.75% | 0 |
| mH29-25 | GGACAGAGAGTCAGCATGCCAA | 4105 | TTTA | A4150 | 95.73% | 47 |
| mH29-26 | TCCATTTCATTACAGCCTGTCA | 4106 | TTTC | A4151 | 94.08% | 79 |
| mH29-27 | AGTCTGTGAGATCATACTGACC | 4107 | TTTG | A4152 | 96.85% | 65 |
| mH29-28 | TAGATGTACAGTTGCATCCAGC | 4108 | TTTG | A4153 | 98.20% | 29 |
| mH29-29 | CCTTAGGAGAAAATGCCAAATC | 4109 | TTTC | A4154 | 96.18% | 94.5 |
| mH29-30 | CTCCTAAGGGAAATTTTGGAGA | 4110 | TTTT | A4155 | 98.06% | 0 |
| mH29-31 | GCTGATAACATCCAAGCATTTT | 4111 | GTTA | A4156 | 93.30% | 0 |
| mH29-32 | AAATAGCAAAGTTTCTTACCTA | 4112 | GTTT | A4157 | 97.31% | 0 |
| mH29-33 | TAGGACAGAGAGTCAGCATGCC | 4113 | GTTT | A4158 | 95.84% | 0 |
| mH29-34 | GGGCTACTGCCATGCAGTGCAT | 4114 | GTTG | A4159 | 97.53% | 0 |
| mH29-35 | TCTCCAAAATTTCCCTTAGGAG | 4115 | GTTG | A4160 | 96.94% | 0 |
| mH29-36 | AATTCCAGATGGAAGCTCTATC | 4116 | TTTA | A4161 | 96.74% | 0 |
| mH29-37 | TCCTAAGGGAAATTTTGGAGAC | 4117 | TTTC | A4162 | 97.59% | 53.5 |
| mH29-38 | TTACCTAGAAAATGCTTGGATG | 4118 | TTTC | A4163 | 94.99% | 21.8 |
| mH29-39 | CAAGGCCATATTTGTGACTGTG | 4119 | GTTA | A4164 | 93.57% | 0 |
| mH29-40 | CTCCATTTCATTACAGCCTGTC | 4120 | TTTT | A4165 | 93.71% | 0 |
| mH29-41 | GCATTTTCTCCTAAGGGAAATT | 4121 | TTTG | A4166 | 92.30% | 59 |
| mH29-42 | TTACCTCGCACAGTGGCCAGCT | 4122 | TTTC | A4167 | 77.16% | 32 |
| mH29-43 | TCTCTCTTTTCTTACCTCGCAC | 4123 | TTTG | A4168 | 87.70% | 0 |
| mH29-44 | CTTACCTCGCACAGTGGCCAGC | 4124 | TTTT | A4169 | 95.19% | 0 |
| mH29-45 | AAACCAATGATTTGGCATTTTC | 4125 | TTTG | A4170 | 91.09% | 0 |

[0450] Hepa1-6 cells, a transformed mouse liver cell line, were cultured under standard conditions (DMEM media with 10% FBS in 5% CO₂ incubator) and nucleofected with ribonuclear proteins formed by mixing the sgRNA and purified MG29-1 protein in PBS buffer. A total of 1 e⁵ Hepa1-6 cells in suspension in complete SF nucleofection reagent (Lonza) were nucleofected using a 4D nucleofection device (Lonza) with RNP formed by mixing 50 pmol of MG29-1 protein and 100 pmol of sgRNA. After nucleofection the cells were plated in 24 well plates in DMEM plus 10% FBS and incubated in a 5% CO2 incubator for 48 to 72 h. Genomic DNA was then extracted from the cells using a column-based purification kit (Purelink genomic DNA mini kit, ThermoFisher Scientific) and quantified by absorbance at 260 nm. Exons 1 through 4 of the mouse hao-1 gene 1 were PCR amplified from 40 ng of the genomic DNA in a reaction containing 0.5 micro molar pairs of the primers specific for each exon. The PCR primers used for exon 1 were PCR_mHE1_F_+233 (GTGACCAACCCTACCCGTTT) (SEQ ID NO: 4171), PCR_mHE1_R_-553 (GCAAGCACCTACTGTCTCGT) (SEQ ID NO: 4172). The PCR primers used for exon 2 were HAO1_E2_F5721 (CAACGAAGGTTCCCTCCAGG) (SEQ ID NO: 4173), HAO1_E2_R6271 (GGAAGGGTGTTCGAGAAGGA) (SEQ ID NO: 4174). The PCR primers used for exon 3 were HAO1_E3_F23198 (TGCCCTAGACAAGCTGACAC) (SEQ ID NO: 4175), HAO1_E3_R23879 (CAGATTCTGGAAGTGGCCCA) (SEQ ID NO: 4176). The PCR primers used for exon 4 were HAO1_E4_F31087 (CCTGTAGGTGGCTGAGTACG) (SEQ ID NO: 4177), HAO1_E4_R31650 (AGGTTTGGTTCCCCTCACCT) (SEQ ID NO: 4178).

[0451] In addition to primers and genomic DNA the PCR reactions contained 1× Pfusion Flash PCR Master Mix (Thermo Fisher). The resulting PCR products comprised single bands when analyzed on agarose gels demonstrating that the PCR reaction was specific, and were purified using a column-based purification kit (DNA Clean and Concentrator, Zymo Research). For sequencing, primers complementary to sequences at least 100 nt from each cut site were used. The primer to sequence Exon 1 was Seq_mHE1_F_+139 (GTCTAGGCATACAATGTTTGCTCA) (SEQ ID NO: 4179). The primer to sequence Exon 2 was 5938F Seq_HAO1_E2 (CTATGCAAGGAAAAGATTTGGCC) (SEQ ID NO: 4180). The primers to sequence Exon 3 were HAO1_E3_F23476 (TCTCCCCCTGAATGAAACACT) (SEQ ID NO: 4181) and the reverse PCR primer, HAO1_E3_R23879 (CAGATTCTGGAAGTGGCCCA) (SEQ ID NO: 4182). The primer to sequence Exon 4 was the reverse PCR primer, HAO1_E4_R31650 (AGGTTTGGTTCCCCTCACCT) (SEQ ID NO: 4183).

[0452] Sequencing of the PCR products showed that they contained the expected sequences of the hao-1 exons. PCR products derived from Hepa-16 cells nucleofected with different RNP or untreated controls were sequenced using primers located within 100 to 350 bp of the predicted target site for each sgRNA. The Sanger sequencing chromatograms were analyzed using Inference of CRISPR Edits (ICE) that determines the frequency of INDELS as well as the INDEL profile (Hsiau et. al, Inference of CRISPR Edits from Sanger Trace Data. BioArxiv. 2018 https://www.biorxiv.org/content/early/2018/01/20/251082). When a nuclease creates a double strand break (DSB) in DNA inside a living cell the DSB is repaired by the cellular DNA repair machinery. In actively dividing cells such as transformed mammalian cells in culture, and in the absence of a repair template, this repair occurs by the NHEJ pathway. The NHEJ pathway is an error prone process that introduces insertions or deletions of bases at the site of the double strand break (Lieber, M. R, Annu Rev Biochem. 2010; 79: 181-211). These insertions and deletions are therefore a hallmark of a double strand break that occurred and was subsequently repaired, and is widely used in the art as a readout of the editing or cutting efficiency of the nuclease. As presented in Table 3, 14 guides demonstrated detectable editing at their predicted target sites. Four guides exhibited editing activity greater than 90%. All 14 of the active guides had PAM sequences of TTTN demonstrating that this PAM is more efficient in vivo. However not all guides utilizing a TTTN PAM were active. These data demonstrate that the MG29-1 nuclease can generate RNA guided, sequence specific, double strand breaks in exonic regions in cultured liver cells with high efficiency.

### Example 10—Design of Further sgRNAs for Disruption of Hao-1 Gene

[0453] Further sgRNAs were designed to target exonic parts of the hao-1 gene. These are designed to target the first 4 exons because these comprise approximately 50% of the coding sequence and indels created towards the N-terminus of the coding sequence of a gene are more likely to create a frameshift or missense mutation that disrupts the activity of the protein. Using the more restrictive PAM of KTTG (Sequence Number: A3870) which was shown in Example 9 to be more active in mammalian cells, a total of 42 potential sgRNA were identified within human hao-1 exons 1 through 4 (Table 4).

TABLE 4
Spacer sequences for MG29-1 identified in
exons 1 to 4 of the human hao-1 gene

| sgRNA | Spacer (DNA sequence, | SEQ ID | | Sequence | Specificity |
|---|---|---|---|---|---|
| name | no PAM) | NO: | PAM | Number: | score |
| hH29-1 | GCATGTTGTTCATAATCATTGA | 4184 | TTTA | A4226 | 96.25% |
| hH29-2 | GAAGTACTGATTTAGCATGTTG | 4185 | TTTG | A4227 | 98.37% |
| hH29-3 | TATCAATGATTATGAACAACAT | 4186 | TTTG | A4228 | 87.44% |
| hH29-4 | CCCCAGACCTGTAATAGTCATA | 4187 | TTTG | A4229 | 99.04% |
| hH29-5 | TTCATCATTTGCCCCAGACCTG | 4188 | TTTC | A4230 | 95.59% |
| hH29-6 | TTACCTGGAAAATGCTGCAATA | 4189 | TTTC | A4231 | 80.36% |
| hH29-7 | CTTACCTGGAAAATGCTGCAAT | 4190 | TTTT | A4232 | 79.67% |
| hH29-8 | GCTGATAATATTGCAGCATTTT | 4191 | TTTG | A4233 | 92.20% |
| hH29-9 | AAAAATAAATTTTCTTACCTGG | 4192 | TTTA | A4234 | 58.56% |
| hH29-10 | AAAAAATAAATTTTCTTACCTG | 4193 | TTTT | A4235 | 44.93% |
| hH29-11 | ATTTTATTTTTTAATTCTAGAT | 4194 | TTTT | A4236 | 10.22% |
| hH29-12 | TTTTATTTTTTAATTCTAGATG | 4195 | TTTA | A4237 | 10.64% |
| hH29-13 | ATTTTTTAATTCTAGATGGAAG | 4196 | TTTT | A4238 | 70.62% |
| hH29-14 | TTTTTTAATTCTAGATGGAAGC | 4197 | TTTA | A4239 | 44.69% |
| hH29-15 | TTAATTCTAGATGGAAGCTGTA | 4198 | TTTT | A4240 | 99.13% |
| hH29-16 | TAATTCTAGATGGAAGCTGTAT | 4199 | TTTT | A4241 | 97.06% |
| hH29-17 | AATTCTAGATGGAAGCTGTATC | 4200 | TTTT | A4242 | 96.74% |
| hH29-18 | ATTCTAGATGGAAGCTGTATCC | 4201 | TTTA | A4243 | 98.94% |
| hH29-19 | AGCAACATTCCGGAGCATCCTT | 4202 | TTTC | A4244 | 97.81% |
| hH29-20 | AGGACAGAGGGTCAGCATGCCA | 4203 | TTTT | A4245 | 97.75% |
| hH29-21 | GGACAGAGGGTCAGCATGCCAA | 4204 | TTTA | A4246 | 100.00% |
| hH29-22 | TTTCTCAGCCTGTCAGTCCCTG | 4205 | TTTC | A4247 | 88.19% |
| hH29-23 | TCAGCCTGTCAGTCCCTGGGAA | 4206 | TTTC | A4248 | 100.00% |
| hH29-24 | TGACAGTGGACACACCTTACCT | 4207 | TTTG | A4249 | 100.00% |
| hH29-25 | AATCTGTTACGCACATCATCCA | 4208 | TTTG | A4250 | 100.00% |
| hH29-26 | ATGCATTTCTTATTTTAGGATG | 4209 | TTTT | A4251 | 80.79% |
| hH29-27 | TGCATTTCTTATTTTAGGATGA | 4210 | TTTA | A4252 | 76.81% |
| hH29-28 | TTATTTTAGGATGAAAAATTTT | 4211 | TTTC | A4253 | 52.38% |
| hH29-29 | AGGATGAAAAATTTTGAAACCA | 4212 | TTTT | A4254 | 90.56% |
| hH29-30 | GGATGAAAAATTTTGAAACCAG | 4213 | TTTA | A4255 | 89.17% |
| hH29-31 | CTCAGGAGAAAATGATAAAGTA | 4214 | TTTC | A4256 | 90.51% |
| hH29-32 | CCTCAGGAGAAAATGATAAAGT | 4215 | TTTT | A4257 | 88.16% |
| hH29-33 | GAAACCAGTACTTTATCATTTT | 4216 | TTTT | A4258 | 86.74% |
| hH29-34 | AAACCAGTACTTTATCATTTTC | 4217 | TTTG | A4259 | 91.02% |
| hH29-35 | TCATTTTCTCCTGAGGAAAATT | 4218 | TTTA | A4260 | 83.29% |
| hH29-36 | CTCCTGAGGAAAATTTTGGAGA | 4219 | TTTT | A4261 | 91.88% |
| hH29-37 | TCCTGAGGAAAATTTTGGAGAC | 4220 | TTTC | A4262 | 96.24% |
| hH29-38 | GCCACATATGCAGCAAGTCCAC | 4221 | TTTA | A4263 | 100.00% |
| hH29-39 | GGAGACGACAGTGGACTTGCTG | 4222 | TTTT | A4264 | 90.43% |
| hH29-40 | GAGACGACAGTGGACTTGCTGC | 4223 | TTTG | A4265 | 99.01% |
| hH29-41 | ATATCTTCCCAGCTGATAGATG | 4224 | TTTG | A4266 | 99.18% |
| hH29-42 | CAACAATTGGCAATGATGTCAG | 4225 | TTTG | A4267 | 95.26% |

[0454] Guides that spanned the intron/exon boundaries were included because such guides may create indels that interfere with splicing. Using Geneious Prime the spacer sequences of these 42 guides were searched against the human genome and a specificity score was assigned by the software based on the alignment to the human genome. A higher specificity score indicates a lower probability of that guide recognizing 1 or more sequences in the human genome other than the site to which the spacer was designed. The specificity scores ranged from 10% to 100% with 25 guides having a specificity score greater than 90% and 33 guides having a specificity score greater than 80%. This analysis demonstrates that guides targeting exonic regions of a human gene with high specificity scores can be readily identified and it is expected that a number of highly active guides are to be identified.

### Example 11—Comparison of the Editing Potency of Nucleases Described Herein to that of spCas9 in Mouse Liver Cells

[0455] The CRISPR Cas9 nuclease from the bacterial species Streptococcus pyogenes (spCas9) is widely used for genome editing and is among the most active RNA guided nucleases identified. The relative potency of MG29-1 compared to spCas9 was evaluated by nucleofection of different doses of RNP in the mouse liver cell line Hepa1-6. sgRNA targeting intron 1 of mouse albumin were used for both nucleases. For MG29-1, the sgRNA mA1b29-1-8 identified in Example 29 was selected. Guide mA1b29-1-8 (see Example 29) was chemically synthesized incorporating chemically modifications called AltR1/AltR2 (Integrated DNA Technologies) designed to improve the potency of guides for the Type V nuclease cpf1 that has a similar sgRNA structure as MG29-1. For spCas9 a sgRNA that efficiently edited mouse albumin intron 1 was identified by testing 3 guides selected from an in-silico screen. The spCas9 protein used in these studies was obtained from a commercial supplier (Integrated DNA technologies AltR-sPCas9).

[0456] The sgRNA mA1bR1 (spacer sequence TTAGTATAGCATGGTCGAGC) was chemically synthesized and incorporated chemical modifications comprised of 2′ O methyl bases and phosphorothioate (PS) linkages on the 3 bases on both ends of the guide that improve potency in cells. The mA1bR1 sgRNA generated INDELS at a frequency of 90% when RNP comprised of 20 pmol spCas9 protein/50 pmol of guide was nucleofected into Hepa1-6 cells indicating that this is a highly active guide. RNP formed with a range of nuclease protein from 20 pmoles to 1 pmole and a constant ratio of protein to sgRNA of 1:2.5 were nucleofected into Hepa1-6 cells. INDELS at the target site in mouse albumin intron 1 were quantified using Sanger sequencing of the PCR amplified genomic DNA and ICE analysis. The results shown in FIG. 52 demonstrate that MG29-1 generated a higher percentage of INDELS than spCas9 at lower RNP doses when the editing was not saturating. These data indicate that MG29-1 is at least as active and potentially more active than spCas9 in liver-derived mammalian cells.

### Example 34—Engineering Sequence Variants of Nucleases Described Herein and Evaluation in Mouse Liver Cells

[0457] In order to improve the editing efficiency of MG29-1 a set of mutations substituting one or two amino acids was introduced in the MG29-1 coding region. The set of amino acid substitutions was determined by alignment to Acidaminococcus sp. Cas12a (AsCas12a). Structured-guide engineering (Kleinstiver, et al, Nat Biotechnol. 2019, 37 276-282) substituted different amino acid in AsCas12a with the goal of altering or improving PAM binding. Four amino acid substitutions in AsCas12a: S170R, E174R, N577R and K583R, showed higher editing efficiencies with canonical and non-canonical PAMs. Sites matching these substitutions were identified in MG29-1 by multiple alignment and correspond to: S168R, E172R, N577R and K583R in MG29-1.

[0458] In order to test the single amino acid substitutions a 2-plasmid delivery system was used. Expression plasmids encoding MG29-1 with single amino acid substitutions were constructed using standard molecular cloning techniques. One plasmid encoded for MG29-1 under CMV promoter, the second plasmid contained the mA1b29-1-8 sgRNA (see Table 8), which has high editing efficiency in Hepa 1-6 cells. Transcription of the guide was driven by a human U6 promoter. Confirmation of initial results from single amino acid substitutions using the 2-plasmid system and testing of double amino acid substitutions was done using in vitro transcribed (IVT) mRNA encoding MG29-1 (see Example 11 for details of how the IVT mRNA was made) and chemically synthesized guides incorporating the AltR1/AltR2 chemical modifications that had been optimized by Integrated DNA Technologies for Cpf1 (synthesized at Integrated DNA technologies). For delivery of the 2-plasmid system 100 ng of plasmid encoding MG29-1 and 400 ng of plasmid encoding the guide were mixed with Lipofectamine 3000, added to Hepa1-6 cells and incubated for 3 days before to genomic DNA isolation.

[0459] For delivery of IVT mRNA and synthetic guides, 300 ng of mRNA and 120 ng of synthetic guide were mixed with Lipofectamine Messenger Max, added to cells and incubated for 2 days before to genomic DNA isolation. Synthetic guides screened using IVT mRNA correspond to guides detailed in Table 8 but for simplicity the names of the guides in FIG. 53 have been shortened so that guide “mA1b29-1-1” is represented as g1-1, “mA1b29-1-8” is represented as g1-8 and so on. One guide targeting the human T cell receptor locus (TRAC) was also tested (35 TRAC on FIG. 53D). Guide 35 TRAC spacer is: GAGTCTCTCAGCTGGTACACGG (SEQ ID NO: 4268) with a TTTG PAM. Guide 35 TRAC was ordered with the same modifications as mentioned before. Genomic DNA and PCR amplification was performed as described in the previous example for MG29-1 editing of mouse albumin intron 1. For guide 35 TRAC, the human TRAC locus was amplified with Primer F: TGCTTTGCTGGGCCTTTTTC (SEQ ID NO: 4269), Primer R: ACAGTCTGAGCAAAGGCAGG (SEQ ID NO: 4270). The resulting 957 bp PCR product was purified as described previously. Editing was assessed by Sanger sequencing using primer ATCACGAGCAGCTGGTTTTCT (SEQ ID NO: 4271).

[0460] Editing efficiency for mouse albumin intron 1 and human TRAC locus was quantified using Sanger sequencing of the PCR products followed by Inference of CRISPR Edits (ICE). Data representing up to 4 biological replicates are plotted in FIGS. 53A-D. The single amino acid substitution S168R demonstrated improved editing efficiency when using guide mA1b29-1-8 in the 2-plasmid system (FIG. 53A). Mutation E172R did not provide a major improvement with guide mA1b29-1-8 while the mutation K583R completely prevented editing with the mA1b29-1-8 guide. Transfection with MG29-1 mRNA and synthetic guide mA1b29-1-8 confirmed the results from plasmid transfection (FIG. 53B). The single amino acid substitution S168R conferred higher editing efficiency across the different concentrations of mRNA tested with guide mA1b29-1-8 (FIG. 53B). The double amino acid substitutions of S168R with E172R (substitution that did not impair activity alone as seen in FIG. 53A), or N577R (a substitution not tested in MG29-1 plasmid transfection but conferred higher editing efficiency of cpf1) and Y170R (which it was hypothesized might improve editing efficiency based on the predicted MG29-1 protein structure) were tested and compared to the single S168R mutant.

[0461] None of the double mutations conferred improved editing efficiencies under the conditions tested (FIG. 53C). The editing efficiencies of the S168R variant of MG29-1 and MG29-1 WT were compared in parallel with 12 guides targeting mouse albumin intron 1 and 1 guide targeting the human T cell receptor locus (TRAC). The S168R variant of MG29-1 exhibited improved editing efficiency with all 13 guides with some guides benefiting more than others (FIG. 4d). Importantly S168R did not impair mammalian editing efficiency for any of the guides tested. These results demonstrate that the S168R (serine at amino acid position 168 changed to arginine) variant of MG29-1 has improved editing activity and which is advantageous in identifying highly active guides for therapeutic use.

### Example 35—Identification of Chemical Modifications of the sgRNA of Nucleases Described Herein that Improve Guide Stability and Improve Editing Efficiency in Mammalian Cells

[0462] RNA molecules are inherently unstable in biological systems due to their sensitivity to cleavage by nucleases. Modification of the native chemical structure of RNA has been widely used to improve the stability RNA molecules used for RNA interference (RNAi) in the context for therapeutic drug development (Corey, J Clin Invest. 2007 Dec. 3; 117(12): 3615-3622, J. B. Bramsen, J. Kjems Frontiers in Genetics, 3 (2012), p. 154). The introduction of chemical modifications to the nucleobases or the phosphodiester backbone of RNA have been pivotal in improving the stability and thus the potency of short RNA molecules in vivo. A wide range of chemical modifications with different properties in terms of stability against nucleases and affinity to complementary DNA or RNA have been developed.

[0463] Similar chemical modifications have been applied to the guide RNA for CRISPR Cas9 nucleases (Hendel et al, Nat Biotechnol. 2015 September; 33(9): 985-989, Ryan et al Nucleic Acids Res 2018 Jan. 25;46(2):792-803., Mir et al Nature Communications volume 9, Article number: 2641 (2018), O'Reilly et al Nucleic Acids Res 2019 47, 546-558, Yin et al Nature Biotechnology volume 35, pages 1179-1187(2017), each of which is incorporated by reference herein in its entirety).

[0464] The MG29-1 nuclease is a novel nuclease with limited amino acid sequence similarity to identified Type V CRISPR enzymes such as cpf1. While the sequence of the structural (backbone) component of the guide RNA identified for MG29-1 is similar to that of cpf1 chemical modifications to the MG29-1 guide that enable improved stability while retaining activity had not been identified. A series of chemical modifications of the MG29-1 sgRNA were designed in order to evaluate their impact on sgRNA activity in mammalian cells and stability in the presence of mammalian cell protein extracts.

[0465] We selected the sgRNA mA1b29-1-8 which was highly active in the mouse liver cell line Hepa1-6 when the guide contained a set of proprietary chemical modifications developed by IDT called AltR1/AltR2 that were designed to improve the activity of the guide RNA for cpf1 and are available commercially (IDT). We selected to test 2 chemical modifications of the nucleobase; 2′-O-Methyl in which the 2′ hydroxyl group is replaced with a methyl group, and 2′-fluoro in which the 2′ hydroxyl group is replaced with a fluorine. Both 2′-O-Methyl and 2′-fluoro modifications improve resistance to nucleases. The 2′-O-methyl modification is a naturally occurring post-transcriptional modification of RNA and improves the binding affinity of RNA:RNA duplexes but has little impact on RNA:DNA stability. 2′-fluoro modified bases have reduced immunostimulatory effects and increase the binding affinity of both RNA: RNA and RNA:DNA hybrids (see e.g. Pallan et al Nucleic Acids Res 2011 Apr; 39(8):3482-95, Chen et al Scientific Reports volume 9, Article number: 6078 (2019), Kawasaki, A. M. et al. J Med Chem 36, 831-841 (1993)).

[0466] The inclusion of phosphorothioate (PS) linkages in place of phosphodiester linkages between the bases was also evaluated. PS linkages improve resistance to nucleases (Monia et al Nucleic Acids, Protein Synthesis, and Molecular Genetics| Volume 271, ISSUE 24, P14533-14540, Jun. 14, 1996).

[0467] The predicted secondary structure of the MG29-1 sgRNA with the spacer targeting mouse albumin intron 1 (mA1b29-1-8) is shown in FIG. 54. The stem-loop in the backbone portion of the guide was presumed to be critical for interaction with the MG29-1 protein based on sequence organization of other CRISPR-cas systems. Based on the secondary structure a series of chemical modifications was designed in different structural and functional regions of the guide. A modular approach was taken that allowed initial testing of guides with fewer chemical modifications that inform which structural and functional regions of the guide may tolerate different chemical modifications without significant loss of activity. The structural and functional regions were defined as follows. The 3′ end and 5′ end of the guide are targets for exonucleases and can be protected by various chemical modifications including 2′-O-methyl and PS linkages, an approach that has been used to improve the stability of guides for spCas9 (Hendel et al, Nat Biotechnol. 2015 September; 33(9): 985-989).

[0468] The sequences comprising both halves of the stem and the loop in the backbone region of the guide were selected for modification. The spacer was divided into the seed region (first 6 nucleotides closest to the PAM) and the remaining 16 nucleotides of the spacer (referred as the non-seed region). In total 43 guides were designed and 39 were synthesized. All 43 guides contain the same nucleotide sequence but with different chemical modifications. The editing activity of 39 of the guides was evaluated in Hepa1-6 cells by nucleofection of RNP or by co-transfection of mRNA encoding MG29-1 and guide or by both methods. These two methods of transfection may impact the observed activity of the guide due to differences in the delivery to the cell.

[0469] When nucleofection of a RNP is used the guide and the MG29-1 protein are pre-complexed in a tube and then delivered to the cell using nucleofection in which an electric current is applied to the cells' suspension in the presence of the RNP. The electric current transiently opens pores in the cell membrane (and possibly the nuclear membrane as well) enabling cellular entry of the RNP driven by the charge on the RNP. Whether the RNP enters the nucleus via pores created by the electric current or via the nuclear localization signals engineered in the protein component of the RNP, or a combination of the two is unclear.

[0470] When co-transfection of mRNA and guide with a lipid transfection reagent such as Messenger MAX is used, the mixture of the two RNA forms a complex with the positively charged lipid and the complex enters the cells via endocytosis and eventually reaches the cytoplasm. In the cytoplasm the mRNA is translated into protein. In the case of an RNA guided nucleases such as MG29-1 the resulting MG29-1 protein will presumably form a complex with the guide RNA in the cytoplasm before entering the nucleus in a process mediated by the nuclear localization signals that were engineered into the MG29-1 protein.

[0471] Because translation of the mRNA into sufficient amounts of MG29-1 protein followed by the binding of the MG29-1 protein to the guide RNA takes a finite amount of time, the guide RNA may require increased stability in the cytoplasm for longer than is the case when pre-formed RNP is delivered by nucleofection. Thus lipid-based mRNA/sgRNA co-transfection may require a more stable guide than is the case for RNP nucleofection which may result in some guide chemistries being active as RNP but inactive when co transfected with mRNA using cationic lipid reagents.

[0472] Guides mA1b298-1 to mA1b298-5 contain chemical modifications limited to the 5′ and 3′ ends of the sequence using a mixture of 2′-O-methyl and 2′ fluoro bases plus PS linkages. In comparison to the sgRNA without chemical modifications these guides were 7 to 11-fold more active when delivered via RNP demonstrating that end modifications to the guide improved guide activity, presumably through improved resistance to exonucleases. sgRNA mA1b298-1 to mA1b298-5 exhibited 64 to 114% of the editing activity of the guide containing the commercial chemical modifications (A1tR1/A1tR2). Guide 4, which contains the largest number of chemical modifications, was the least active of the end modified guides but was still 7-fold more active than the un-modified guide. Guide mALB298-30 contains three 2′-O methyl bases and 2 PS linkages at the 5′ end and 4 2′-O methyl bases and 3 PS linkages at the 5′ end and also exhibited activity about 10-fold higher than the unmodified guide and similar or slightly improved in the case of RNA co-transfection compared to mA1b298-1. These data demonstrate that 2′O-methyl combined with PS linkages on both ends of the MG29-1 guide significantly enhanced guide activity compared to an unmodified guide.

[0473] A combination of 2′-fluoro bases and PS linkages were also tolerated at the 3′ end of the guide. Guide mALb298-28 contains three 2′-fluoro bases and 2 PS linkages on the 5′ end and four 2′-fluoro bases and three PS linkages on the 3′ end. This end modified guide retained good editing activity similar to the guides with 2′-O methyl and PS modifications on both ends demonstrating that 2′-fluoro can be used in place of 2′-O methyl to improve guide stability and retain editing activity.

[0474] The sgRNAs mALb298-6, mALb298-7, and mALb298-8 contain the same minimal chemical modifications on the both 5′ and 3′ ends present in mA1b298-1 plus PS linkages in different regions of the stem. PS linkages in the 3′ stem (mALb298-6) and the 5′ stem (mALb298-7) reduced activity by about 30% compared to mA1b298-1 in the RNP nucleofection assay, indicating that these modifications may be tolerated. Larger reductions in activity were observed by lipid-based transfection.

[0475] Introducing PS linkages in both the 3′ and 5′ stems (mALb298-8) reduced activity by about 80% compared to mA1b298-1 in the RNP nucleofection assay and by more than 95% in the lipid transfection assay, indicating that the combination of two PS linkage modifications significantly impaired the function of the guide.

[0476] The sgRNA mA1b298-9 contains the same minimal chemical modifications on the both 5′ and 3′ ends present in mA1b298-1 plus PS linkages in the loop and exhibited similar activity as mA1b298-1 indicating that PS linkages in the loop were well tolerated.

[0477] The sgRNAs mA1b298-10, mA1b298-11, and mA1b298-12 contain the same minimal chemical modifications on the both 5′ and 3′ ends present in mA1b298-1 plus 2′-O methyl bases in different regions of the stem. Including 2′-O methyl bases in either the 3′ stem (mA1b298-11) or the 5′ stem (mA1b298-12) or both halves of the stem (mA1b298-10) was generally well tolerated with small reductions in activity compared to mA1b298-1 with guide mA1b298-12 (5′ stem modified) being the most active.

[0478] Guide mA1b298-14 contains the same minimal chemical modifications on the both 5′ and 3′ ends present in mA1b298-1 plus a combination of 2′-O-methyl bases and PS linkages in both halves of the stem and had no editing activity by RNP nucleofection or by lipid-based RNA co-transfection. This confirms and extends the result with mA1b298-8 that contained only PS linkages in both stems had retained low levels of activity and shows that extensive chemical modification of both halves of the stem makes the guide inactive.

[0479] The sgRNA mA1b298-13 contains the same minimal chemical modifications on the both 5′ and 3′ ends present in mA1b298-1 plus PS linkages spaced every other base throughout the remainder of the backbone and spacer except for in the seed region of the spacer. These modifications resulted in a dramatic loss of editing activity to close to background levels. While the purity of this guide was about 50% compared to >75% for most of the guides, this alone may not account for the complete loss of editing activity. Thus, distributing PS linkages in an essentially random fashion throughout the guide is not an effective approach to improve guide stability while retaining editing activity.

[0480] Guides mALb298-15 and mALb298-16 contain the same minimal chemical modifications on the both 5′ and 3′ ends present in mA1b298-1 plus extensive PS linkages in the backbone. While both guides retained about 35% of the activity of mA1b298-1 by RNP nucleofection they retained 3% of the activity of mA1b298-1 by lipid-based RNA co-transfection indicating that extensive PS modification of the backbone significantly reduced editing activity. Combining the PS linkages in the backbone with PS linkages in the spacer region as in mA1b298-17 and mA1b298-18 resulted in further loss of activity consistent with the observation the random inclusion of PS linkages is blocks the ability of the guide to direct editing by MG29-1.

[0481] Guide mA1b298-19 contains the same chemical modifications in the spacer as mALb298-1 but in the backbone region the 5′ end has additional 4 2′O-methyl bases and an additional 14 PS linkages. The activity of mA1b298-19 was about 40% of that of mA1b298-1 by RNP nucleofection but 22% by RNA co-transfection demonstrating again that extensive chemical modifications in the backbone region of the guide are not well tolerated.

[0482] Guides mA1b298-20, mA1b298-21, mA1b298-22, and mA1b298-23 have identical chemical modifications in the backbone region comprised of a single 2′-O methyl and 2 PS linkages at the 5′ end which are the same 5′ end modifications as in mA1b298-1. The spacer regions of Guides mA1b298-20, mA1b298-21, mA1b298-22, and mA1b298-23 contain combinations of 2′-O-methyl and 2′-fluoro bases as well as PS linkages. The most active of these 4 guides was mA1b298-2 in which 2′-fluoro modifications were made on all bases in the spacer except for the 7 bases closest to the PAM (seed region) and the terminal base at the 3′ end which was modified with a 2′-O-methyl and 2 PS linkages. This demonstrates that including 2′-fluoro modifications on most of the spacer except for the seed region did not significantly reduce activity and thus represents a good strategy to enhance guide stability.

[0483] Guides mA1b298-24, mA1b298-25, mA1b298-26, and mA1b298-8 have identical chemical modifications in the backbone. mA1b298-8 which has PS linkages in both halves on the stem had significantly reduced editing activity with 24% and 2% of guide mA1b298-1 demonstrating that these PS linkages impaired activity. Interestingly, while mALb298-24 and mALb298-25 also had low editing activity the activity of mALb298-26 was improved compared to mA1b298-8 indicating that the additional modifications in mALb298-26 which comprise 2′-fluoro bases in 14 of the bases in the spacer (excluding the seed region) at least partially rescued the reduced editing activity caused by the PS linkages in the stem. This provides additional evidence of the beneficial impact of 2′-fluoro bases in the spacer upon editing activity.

[0484] Guides mA1b298-27 and mA1b298-29 contain extensive base and PS modifications throughout the backbone and spacer regions had no activity again indicating that not all chemical modifications of the guide retain editing activity.

[0485] Based on the structure activity relationships obtained from the analysis of guides mALb298-1 to mALb298-30, an additional set of seven guides were designed and tested by RNP nucleofection and lipid-based RNA co-transfection of Hepa1-6 cells. These guides combined chemical modifications that were observed to retain good editing activity in guides mALb298-1 to mALb298-30. Guides mALb298-31 to mALb298-37 all contain end modifications comprised of at least one 2′-O methyl and 2 PS linkages at the 5′ end and one 2′-O methyl and 1 PS linkage at the 5′ end. In addition to the end modifications, combining 2′-O methyl bases in both halves of the stem with 2′fluoro bases in 14 bases of the spacer (excluding the seed region) as in mA1b298-31 resulted in editing activity that was slightly improved or similar to end modifications alone and 10-fold improved compared to the unmodified guide. Combining 2′-O methyl bases in just the 5′ stem with 2′fluoro bases in 14 bases of the spacer (excluding the seed region) as in mALb298-32 resulted in a guide that was among the most active tested.

[0486] Similarly, combining PS linkages in just the loop with 2′fluoro bases in 14 bases of the spacer (excluding the seed region) as in mALb298-33 resulted in potent activity up to 15-fold higher than the unmodified guide. Guide mA1b298-37 combines more extensive 3′ end modifications with 2′-O methyl bases in the 5′ stem, PS linkages in the loop and 14 2′fluoro bases and 3 PS linkages in the spacer (excluding the seed region) and still retained editing activity similar to that of the AltR1/R2 modifications and significantly improved compared to the unmodified guide. mALb298-37 thus represents a heavily modified MG29-1 guide that retains potent editing activity in mammalian cells. Guide mALb298-38 exhibited potent editing activity when delivered as a RNP but was completely inactive when delivered to cells by lipid-based RNA co-transfection suggesting that thus guide may have some unexpected sensitivity to nucleases. Guide mALb298-39 which is identical to guide mA1b298-37 except that it has 11 fewer 2′-fluoro bases and 1 less PS linkage in the spacer had the highest editing activity when considering both RNP and mRNA transfection methods but has fewer chemical modifications than some of the other guide designs which might be detrimental in terms of performance in vivo.

[0487] Additional combinations of chemical modifications were designed to create mA1b298-40 to mALb298-43 that might also retain good editing activity while having more extensive chemical modifications. For example, in mA1b298-41 which also incorporates some DNA bases, 6 of the bases are un-modified ribonucleotides. Similarly, mA1b298-42 contains 2′-fluorogroups throughout the entire spacer and has 5 un-modified ribonucleotides. We envisage that testing of these and other guide chemical modifications will lead to one or more optimized designs. Nevertheless, within the set of guides mALb298-1 to mALb298-39 and particularly among the set of guides mALb298-31 to mALb298-39 we have identified guides with extensive chemical modifications that retain editing activity similar or superior to that of unmodified guides or guides with just end modifications.

[0488] In order to test the stability of the chemically modified guides compared to the guide with no chemical modification (native RNA), a stability assay using cell crude extracts was used. Crude cell extracts from mammalian cells were selected because they should contain the mixture of nucleases that a guide RNA will be exposed to when delivered to mammalian cells in vitro or in vivo. Hepa 1-6 cells were collected by adding 3 ml of cold PBS per 15 cm dish of confluent cells and releasing the cells from the surface of the dish using a cell scraper. The cells were pelleted at 200 g for 10 min and frozen at −80° C. for future use. For the stability assays, cells were resuspended in 4 volumes of cold PBS (e.g. for a 100 mg pellet cells were resuspended in 400 μl of cold PBS). Triton X-100 was added to a ending concentration of 0.2% (v/v), cells were vortexed for 10 seconds, put on ice for 10 minutes and vortexed again for 10 seconds. Triton X-100 is a mild non-ionic detergent that disrupts cell membranes but does not inactivate or denature proteins at the concentration used.

[0489] Stability reactions were set up on ice and comprised 20 μl of cell crude extract with 100 fmoles of each guide (1 μl of a 100 nM stock). Six reactions were set up per guide comprising: input, 15 min, 30 min, 60 min, 240 min and 540 min (The time in minutes referring to the length of time each sample was incubated). Samples were incubated at 37° C. from 15 minutes up to 540 min while the input control was left on ice for 5 minutes. After each incubation period the reaction was stopped by adding 300 μl of a mixture of phenol and guanidine thiocyanate (Tri reagent, Zymo Research) which immediately denatures all proteins and efficiently inhibits ribonucleases and facilitates the subsequent recovery of RNA. After adding Tri Reagent the samples were vortexed for 15 seconds and stored at −20° C. RNA was extracted from the samples using Direct-zol RNA miniprep kit (Zymo Research) and eluted in 100 μl of nuclease-free water. Detection of the modified guide was performed using Taqman RT-qPCR using the Taqman miRNA Assay technology (Thermo Fisher) and primers and probes designed to specifically detect the sequence in the mA1b298 sgRNA which is the same for all of the guides. Data was plotted as a function of percentage of sgRNA remaining in relation to the input sample. The guide with no chemical modifications was the most rapidly eliminated when incubated with the cell extract (FIG. 55) with more than 90% of the guide degraded within 30 minutes. The guide with the AltR1/AltR2 (AltR in FIG. 55) chemical modifications was slightly more stable in the presence of cell extract than the un-modified guide with about 80% of the guide degraded in 30 minutes. Guide mALb298-31 that contains chemical modifications at both ends as well as 2′ O-methyl bases in both stems and 2′-fluoro bases at all positions of the spacer except for the seed region was significantly more stable than either unmodified guide or the AltR guide.

[0490] Guide mA1b298-34 exhibited improved stability compared to guide mALb298-31. Guide mALb298-34 differs to guide mALb298-31 in the chemical modifications within the spacer. mALb298-34 has 9 fewer 2′-Fluoro bases in the spacer than mALb298-31 but contains 4 PS linkages in the spacer compared to 2 PS linkages in mALb298-31. Because 2′-fluoro bases improve the stability of RNA this suggests that the additional PS linkages in the spacer were responsible for the improved stability of mALb298-34 compared to mALb298-31.

[0491] Guide mALb298-37 was the most stable of all the guides tested and was significantly more stable than mALb298-34 with 80% of the guide remaining after 240 min (4 h) compared to 30% for mALb298-34. The chemical modifications of mALb298-37 differ from guide mALb298-34 in both the spacer and backbone regions. mALb298-37 has an additional two 2′-O-methyl groups and 2 additional PS linkages at the 5′ end. In addition, the loop region of mALb298-37 contains PS linkages and does not contain the 2′-O-methyl groups present in the second half of the stem in mALb298-34. In addition, the spacer of mALb298-37 contains 9 more 2′-fluoro bases but the same number of PS linkages as mALb298-34 albeit in different locations.

[0492] Overall, these data suggest that additional PS linkages at the 5′ end of the spacer and in the loop of the backbone region significantly improve stability of the guide RNA. Guide mALb298-37 which exhibited the greatest stability in the cell extracts among the guides tested also exhibited potent editing activity in Hepa1-6 cells that was similar or improved compared to the AltR1/Altr2 modifications and improved compared to chemical modifications of the 5′ and 3′ ends only.

TABLE 5
Impact of chemical modifications of the MG29-1 sgRNA sequence upon editing
activity in mammalian cells

| | | | Editing activity | |
|---|---|---|---|---|
| | | | (% of | |
| | | | AltR1/AltR2 | |
| | | SEQ ID | control) | |
| sgRNA name | sgRNA sequence | NO: | RNP | mRNA |
| mAlb298-1_ | /AltR1/rCrUrUrArArUrUrUrCrUrArCrUr | N/4272 | 100 | 100 |
| AltR1/R2 | GrUrUrGrUrArGrArUrCrUrGrUrArArCrGr | | | |
| | ArUrCrGrGrGrArArCrUrGrGrCrA/AltR2/ | | | |
| mAlb298-0 | rCrUrUrArArUrUrUrCrUrArCrUrGrUrUrG | 4272 | 13.5 | NT |
| | rUrArGrArUrCrUrGrUrArArCrGrArUrCrG | | | |
| | rGrGrArArCrUrGrGrCrA | | | |
| mAlb298-1 | mC*rU*rUrArArUrUrUrCrUrArCrUrGrUrU | 4273 | 114.7 | 76.2 |
| | rGrUrArGrArUrCrUrGrUrArArCrGrArUrC | | | |
| | rGrGrGrArArCrUrGrG*rC*mA | | | |
| mAlb298-2 | mC*rU*rU*rArArUrUrUrCrUrArCrUrGrUr | 4274 | 111.7 | 70.2 |
| | UrGrUrArGrArUrCrUrGrUrArArCrGrArUr | | | |
| | CrGrGrGrArArCrUrG*rG*rC*mA | | | |
| mAlb298-3 | mC*mU*rU*rArArUrUrUrCrUrArCrUrGrUr | 4275 | 100.2 | 63.7 |
| | UrGrUrArGrArUrCrUrGrUrArArCrGrArUr | | | |
| | CrGrGrGrArArCrUrG*rG*mC*mA | | | |
| mAlb298-4 | mC*mU*mU*rArArUrUrUrCrUrArCrUrGrUr | 4276 | 72.5 | 69.6 |
| | UrGrUrArGrArUrCrUrGrUrArArCrGrArUr | | | |
| | CrGrGrGrArArCrUrG*mG*mC*mA | | | |
| mAlb298-5 | mC*rU*rUrArArUrUrUrCrUrArCrUrGrUrU | 4277 | 76.9 | 87.5 |
| | rGrUrArGrArUrCrUrGrUrArArCrGrArUrC | | | |
| | rGrGrGrArArCrUrG*/12FG//i2FC/*/32F | | | |
| | A/ | | | |
| mAlb298-6 | mC*rU*rUrArArUrUrUrCrUrArCrUrGrUrU | 4278 | 89.4 | 40.4 |
| | rG*rU*rA*rG*rArUrCrUrGrUrArArCrGrA | | | |
| | rUrCrGrGrGrArArCrUrGrG*rC*mA | | | |
| mAlb298-7 | mC*rU*rUrArArUrU*rU*rC*rU*rArCrUrG | 4279 | 83.2 | 24.5 |
| | rUrUrGrUrArGrArUrCrUrGrUrArArCrGrA | | | |
| | rUrCrGrGrGrArArCrUrGrG*rC*mA | | | |
| mAlb298-8 # | mC*rU*rUrArArUrU*rU*rC*rU*rArCrUrG | 4280 | 28.4 | 2.6 |
| | rUrUrG*rU*rA*rG*rArUrCrUrGrUrArArC | | | |
| | rGrArUrCrGrGrGrArArCrUrGrG*rC*mA | | | |
| mAlb298-9 | mC*rU*rUrArArUrUrUrCrUrArCrU*rG*rU | 4281 | 110.9 | 87.5 |
| | *rU*rGrUrArGrArUrCrUrGrUrArArCrGrA | | | |
| | rUrCrGrGrGrArArCrUrGrG*rC*mA | | | |
| mAlb298-10 | mC*rU*rUrArArUrUmUmCmUmArCrUrGrUrU | 4282 | 87.5 | 61.6 |
| | rGmUmAmGmArUrCrUrGrUrArArCrGrArUrC | | | |
| | rGrGrGrArArCrUrGrG*rC*mA | | | |
| mAlb298-11 | mC*rU*rUrArArUrUrUrCrUrArCrUrGrUrU | 4283 | 94.5 | 63.5 |
| | rGmUmAmGmArUrCrUrGrUrArArCrGrArUrC | | | |
| | rGrGrGrArArCrUrGrG*rC*mA | | | |
| mAlb298-12 | mC*rU*rUrArArUrUmUmCmUmArCrUrGrUrU | 4284 | 121.8 | 84.0 |
| | rGrUrArGrArUrCrUrGrUrArArCrGrArUrC | | | |
| | rGrGrGrArArCrUrGrG*rC*mA | | | |
| mAlb298-13 # | mC*rU*rU*rArA*rUrU*rUrC*rUrA*rCrU* | 4285 | 1.0 | 0.0 |
| | rGrUrUrG*rUrA*rGrA*rUrCrUrGrUrArA | | | |
| | *rCrG*rArU*rCrG*rGrG*rArA*rCrU*rGr | | | |
| | G*mC*mA | | | |
| mAlb298-14 | mC*rU*rUrArArUrU*mU*mC*mU*mArCrUrG | 4286 | 0.0 | 0.0 |
| | rUrUrG*mU*mA*mG*mArUrCrUrGrUrArArC | | | |
| | rGrArUrCrGrGrGrArArCrUrGrG*rC*mA | | | |
| mAlb298-15 # | mC*rU*rU*rArArU*rU*rU*rC*rU*rA*rC* | 4287 | 39.3 | 2.4 |
| | rU*rG*rU*rU*rG*rU*rA*rG*rA*rUrCrUr | | | |
| | GrUrArArCrGrArUrCrGrGrGrArArCrUrGr | | | |
| | G*rC*mA | | | |
| mAlb298-16 | mC*rU*rU*rArArU*rU*rU*rC*rUrArCrU* | 4288 | 41.6 | 3.7 |
| | rG*rU*rU*rG*rU*rA*rG*rA*rUrCrUrGrU | | | |
| | rArArCrGrArUrCrGrGrGrArArCrUrGrG*r | | | |
| | C*mA | | | |
| mAlb298-17 # | mC*rU*rU*rArArU*rU*rU*rC*rUrArCrU* | 4289 | 0.0 | 1.2 |
| | rG*rU*rU*rG*rU*rA*rG*rA*rUrCrUrGrU | | | |
| | rArA*rCrG*rArU*rCrG*rGrG*rArA*rCrU | | | |
| | *rGrG*mC*mA | | | |
| mAlb298-18 | mC*rU*rU*rA*rA*rU*rU*rU*rC*rU*rA*r | 4290 | 5.2 | 1.2 |
| | C*rU*rG*rU*rU*rG*rU*rA*rG*rA*rUrCr | | | |
| | UrGrUrArA*rCrG*rArU*rCrG*rGrG*rArA | | | |
| | *rCrU*rGrG*mC*mA | | | |
| mAlb298-19 | mG*mU*mA*mG*mC*rU*rU*rArA*rUrU*rUr | 4291 | 50.1 | 17.4 |
| | C*rUrA*rCrU*rGrU*rUrG*rUrA*rGrA*rU | | | |
| | rCrUrGrUrArArCrGrArUrCrGrGrGrArArC | | | |
| | rUrGrG*rC*mA | | | |
| mAlb298-20 | mC*rU*rUrArArUrUrUrCrUrArCrUrGrUrU | 4292 | 33.6 | 86.3 |
| | rGrUrArGrArUrCrUrGrUrArArCrGrArUrC | | | |
| | rGrGrGrArArC*/12FU//i2FG/*/12FG//i | | | |
| | 2FC/*/32FA/ | | | |
| mAlb298-21 | mC*rU*rUrArArUrUrUrCrUrArCrUrGrUrU | 4293 | 119.0 | 80.6 |
| | rGrUrArGrArUrCrUrGrUrArArC/i2FG//i | | | |
| | 2FA//12FU//12FC//12FG//12FG//12FG/ | | | |
| | /12FA//12FA//12FC//12FU//12FG//12F | | | |
| | G/*/12FC/*mA | | | |
| mAlb298-22 | mC*rU*rUrArArUrUrUrCrUrArCrUrGrUrU | 4294 | 25.1 | 98.8 |
| | rGrUrArGrArUrCrUrGrUrArArCrGrArUrC | | | |
| | rGrGrGrA*rA/i2FC/*/12FU//12FG/*/12 | | | |
| | FG//12FC/*mA | | | |
| mAlb298-23 | mC*rU*rUrArArUrUrUrCrUrArCrUrGrUrU | 4295 | 22.6 | 61.9 |
| | rGrUrArGrArUrCrUrGrUrArArCrGrArUrC | | | |
| | rGrGrGrA/i2FA//12FC//12FU//12FG//i | | | |
| | 2FG/*mC*mA | | | |
| mAlb298-24 | mC*rU*rUrArArUrU*rU*rC*rU*rArCrUrG | 4296 | 7.4 | 12.2 |
| | rUrUrG*rU*rA*rG*rArUrCrUrGrUrArArC | | | |
| | rGrArUrCrGrGrGrArArC*/12FU//12FG/* | | | |
| | /12FG//12FC/*/32FA/ | | | |
| mAlb298-25 | mC*rU*rUrArArUrU*rU*rC*rU*rArCrUrG | 4297 | 0.0 | 0.0 |
| | rUrUrG*rU*rA*rG*rArUrCrUrGrUrArArC | | | |
| | rGrArUrCrGrG/12FG//12FA/*/12FA//12 | | | |
| | FC/*/12FU//i2FG/*rGrC*mA | | | |
| mAlb298-26 | mC*rU*rUrArArUrU*rU*rC*rU*rArCrUrG | 4298 | 55.5 | 29.8 |
| | rUrUrG*rU*rA*rG*rArUrCrUrGrUrArArC | | | |
| | /12FG//12FA//12FU//12FC//12FG//12F | | | |
| | G//12FG//12FA//12FA//12FC//12FU//i | | | |
| | 2FG//12FG/*/12FC/*mA | | | |
| mAlb298-27 | /52FC/*/12FU/*/12FU/*rUrUrArArU/i2 | 4299 | NT | 0 |
| | FU//12FU/rC*rU/i2FA/*/12FC/rU/i2FG | | | |
| | /*/12FU//12FU/rG/12FU//12FA//12FG/ | | | |
| | /i2FA/rU/i2FC/rUrG*rUrA/i2FA/rc/i2 | | | |
| | FG/*/12FA/*/12FU/*/12FC/*/12FG/rG* | | | |
| | rGrA*rA/i2FC/*rU*/12FG//12FG/*/12F | | | |
| | C/*/32FA | | | |
| mAlb298-28 | /52FC/*/12FU/*/12F/rUrUrUrArArUrUr | 4300 | NT | 84.8 |
| | UrCrUrArCrUrGrUrUrGrUrArGrArUrCrUr | | | |
| | GrUrArArCrGrArUrCrGrGrGrArArCrU*/i | | | |
| | 2FG//12FG/*/12FC/*/52FA/ | | | |
| mAlb298-29 | mC*mU*mU*rUrUrArArUmUmUrC*rUmA*mCr | 4301 | 0.0 | 0.0 |
| | UmG*mUmUrGmUmAmGmArUmCrUrG*rUrAmAr | | | |
| | CmG*mA*mU*mC*mGrG*rGrA*rAmC*rU*mGm | | | |
| | G*mC*mA | | | |
| mAlb298-30 | mC*mU*mUrUrUrArArUrUrUrCrUrArCrUrG | 4302 | 101.1 | 105.4 |
| | rUrUrGrUrArGrArUrCrUrGrUrArArCrGrA | | | |
| | rUrCrGrGrGrArArCrU*mGmG*mC*mA | | | |
| mAlb298-31 | mC*rU*rUrArArUrUmUmCmUmArCrUrGrUrU | 4303 | 140.5 | 74.4 |
| | rGmUmAmGmArUrCrUrGrUrArArC/i2FG//i | | | |
| | 2FA//12FU//12FC//12FG//12FG//12FG/ | | | |
| | /12FA//12FA//12FC//12FU//12FG//12F | | | |
| | G/*/12FC/*mA | | | |
| mAlb298-32 | mC*rU*rUrArArUrUmUmCmUmArCrUrGrUrU | 4304 | 170.3 | 93.1 |
| | rGrUrArGrArUrCrUrGrUrArArC/i2FG//i | | | |
| | 2FA//12FU//12FC//12FG//12FG//12FG/ | | | |
| | /12FA//12FA//12FC//12FU//12FG//12F | | | |
| | G*/12FC/*mA | | | |
| mAlb298-33 | mC*rU*rUrArArUrUrUrCrUrArCrU*rG*rU | 4305 | 202.7 | 64.4 |
| | *rU*rGrUrArGrArUrCrUrGrUrArArC/i2F | | | |
| | G//12FA//12FU//12FC//12FG//12FG//i | | | |
| | 2FG//12FA//12FA//12FC//12FU//12FG/ | | | |
| | /12FG/*/12FC/*mA | | | |
| mAlb298-34 | mC*rU*rUrArArUrUmUmCmUmArCrUrGrUrU | 4306 | 83.8 | 107.0 |
| | rGmUmAmGmArUrCrUrGrUrArArCrGrArUrC | | | |
| | rGrGrGrA*rA/i2FC/*/12FU//12FG/*/12 | | | |
| | FG//12FC/*mA | | | |
| mAlb298-35 | mC*rU*rUrArArUrUrUrCrUrArCrU*rG*rU | 4307 | 24.3 | 67.9 |
| | *rU*rGrUrArGrArUrCrUrGrUrArArCrGrA | | | |
| | rUrCrGrGrGrA*rA/i2FC/*/12FU//12FG/ | | | |
| | */12FG//12FC/*mA | | | |
| mAlb298-36 | mC*rU*rUrArArUrUmUmCmUmArCrUrGrUrU | 4308 | 43.2 | 116.2 |
| | rGrUrArGrArUrCrUrGrUrArArCrGrArUrC | | | |
| | rGrGrGrA*rA/i2FC/*/12FU//12FG/*/12 | | | |
| | FG//12FC/*mA | | | |
| mAlb298-37 | mC*mU*mU*U*rUrArArUrUmUmCmUmArCrU* | 4309 | 164.9 | 84.5 |
| | rG*rU*rU*rGrUrArGrArUrCrUrGrUrArAr | | | |
| | C/12FG//12FA//12FU//12FC//12FG//12 | | | |
| | FG//12FG//12FA//12FA//12FC/*/12FU/ | | | |
| | */12FG//12FG/*/12FC/*mA | | | |
| mAlb298-38 | mC*mU*mU*rU*rUrArArUrUmUmCmUmArCrU | 4310 | 140.5 | 0.0 |
| | *rG*rU*rU*rGmUmAmGmArUrCrUrGrUrArA | | | |
| | rC/12FG//12FA//12FU//12FC//12FG//i | | | |
| | 2FG//12FG//12FA//12FA//12FC/*/12FU | | | |
| | /*/12FG//12FG/*/12FC/*mA | | | |
| mAlb298-39 | mC*mU*mU*rU*rUrArArUrUmUmCmUmArCrU | 4311 | 135.1 | 114.0 |
| | *rG*rU*rU*rGrUrArGrArUrCrUrGrUrArA | | | |
| | rCrGrArUrCrGrGrGrArArCrU*/12FG//i2 | | | |
| | FG/*/12FC/*mA | | | |
| mAlb298-40 | mC*mU*mU*U*UAAUUmUmCmUmACU*G*U*U*G | 4312 | NT | NT |
| | UAGAU/12FC//12FU//12FG//12FU//i2FA | | | |
| | //12FA//12FC//12FG//12FA//12FU//12 | | | |
| | FC//12FG//12FG//12FG//12FA//12FA// | | | |
| | 12FC/*/12FU/*/12FG//12FG/*/12FC/*m | | | |
| | A | | | |
| mAlb298-41 | mC*mU*mU*U*UAAUUmUmCmUmACU*G*U*U*d | 4313 | NT | NT |
| | GdTdAdGdAdT/i2FC//12FU//12FG//12FU | | | |
| | //12FA//12FA//12FC//12FG//12FA//12 | | | |
| | FU//12FC//12FG//12FG//12FG//12FA// | | | |
| | 12FA//12FC/*/12FU/*/12FG//12FG/*/i | | | |
| | 2FC/*mA | | | |
| mAlb298-42 | mC*mU*mU*U*UAAUUmUmCmUmACU*G*U*U*/ | 4314 | NT | NT |
| | 12FG//12FU//12FA//12FG//12FA//12FU | | | |
| | //12FC//12FU//12FG//12FU//12FA//12 | | | |
| | FA//12FC//12FG//12FA//12FU//12FC// | | | |
| | 12FG//12FG//12FG//12FA//12FA//12FC | | | |
| | /*/12FU/*/12FG//12FG/*/12FC/*mA | | | |
| mAlb298-43 | mC*mU*mU*U*UAAUUmUmCmUmAmCU*G*U*U* | 4315 | NT | NT |
| | GUAGAU/12FC//12FU//12FG//12FU//12F | | | |
| | A//12FA//12FC//12FG//12FA//12FU//i | | | |
| | 2FC//12FG//12FG//12FG//12FA//12FA/ | | | |
| | /12FC/*/12FU/*/12FG//12FG/*/12FC/* | | | |
| | mA | | | |

#: these guides had less than 75% purity based on analytical HPLC with purity ranging from 54 to 64%. All other guides exceeded 75% purity
NT: not tested
Nomenclature of chemical modifications: a “/” is used to separate bases with 2′-flourine modifications, m; 2′-O-methyl base (for example a A base with 2′-O-methyl modification is written as mA), i2F; internal 2′-flourine base (for example an internal C with 2′-flourine modification is written as /12FC/), 52F; 2′-flourine base at the 5′ end of the sequence (for example a 5′ C with 2′-flourine modification is written as /52FC/), 32F; 2′-flourine base at the 3′ end of the sequence (for example a 3′ A base with 2′-flourine modification is written as /32FA/), r; native RNA linkage comprising the sugar ribose (for example the ribose or RNA form of the A base is written rA), d; deoxyribose sugar (DNA) linkage (for example a deoxyribose form of the A base is written dA), *; between bases in which one of the oxygen molecules in the phosphodiester bond is replaced with sulfur; AltR1 and AltR2 refer to IDT technologies' proprietary 5′ and 3′ AltR modifications

### Example 12—Therapeutic Gene Editing in Mice Using Nucleases Described Herein

[0493] Gene editing platforms described herein have the potential to effect reparative alterations in vivo. Liver tissue is an example of a tissue that can be advantageously targeted using the gene editing compositions and systems described herein for in vivo gene editing, for example by introduction of indels that function to knock down expression of deleterious genes or that are used to replace defective genes. For example, several inherited diseases arise from defects in proteins expressed primarily in the liver, and in vivo delivery to the liver has been proven safe and effective in clinical trials of adeno-associated virus (AAV) vectors. Lipid nanoparticles have also been shown to deliver nucleic acids and approved drugs for RNAi strategies. Liver tissue also includes appropriate cellular machinery for efficient secretion of proteins into the systemic circulation.

[0494] Subjects having a condition in Table 13 or Table 14 are selected for gene editing therapy. For example, a human or mouse model subject having hemophilia A is identified for treatment with gene replacement therapy using a gene editing platform.

TABLE 6
Some Indications for Subject Selection in Therapeutic Gene Replacement

| Hemophilia A | Factor VIII | | 1 in 5,000 males |
|---|---|---|---|
| Hemophilia A | Factor VIII | Secreted | 1 in 5,000 males |
| Hemophilia B | Factor IX | Secreted | 1 in 20,000 |
| Hereditary | C1 inhibitor | Secreted | 1 in 25,000 |
| Angioedema | protein | | |
| Argininosuccinate | Argininosuccinate | Intracellular | 1 in 70,000 |
| Lyase deficiency | Lyase | | |
| Mucopolysaccharidosis | Arylsulfatase B | Intracellular | 1 in 200,000 |
| type IV (MPS IV), | | | |
| Hemophilia A | Factor VIII | | 1 in 5,000 males |
| Progressive familial | ATP binding | Intracellular | 1 in 50,000 |
| intrahepatic | cassette family B | | |
| cholestasis type 2 | | | |
| Classical galactosemia | Galactose-1- | Intracellular | 1 in 50,000 |
| | phosphate | | |
| | uridyltransferase | | |

TABLE 7
Some Indications for Subject Selection in Therapeutic Gene Knockdown

| Indication | Target Gene | Prevalence |
|---|---|---|
| Primary Hyperoxluria type I | Glyoxylate oxidase | Est 1 in 100,000, up to |
| | (HA01) | 5,000 patient in US + EU |
| Familial ATTR Amyloidoisis | Transthyretin | 1 in 100,000 in US, more |
| | | frequent in Japan, |
| | | Sweden |
| Acute Hepatic Porphoryia | Aminolevulinic | 1 in 50,000 |
| | Acid Synthase | |
| | (ALAS1) | |
| Cardiovascular disease without | PCSK9 | High (1 in 3 deaths in US |
| adequate LDL lowering by statins | | due to CVD) |
| Rare Hyperlipidemias | Angiopoietin like 3 | Various, approx 1 in |
| | | 500,000 |
| Homozygous Familial | ApoB100 | 1 in 1 million |
| Hypercholersterolemia | | |
| Hereditary Angioedema | Kallikrein | 1 in 25,000 |

[0495] A gene editing platform comprising a lipid nanoparticle (LNP) encapsulating an sgRNA and an mRNA encoding an MG nuclease described herein and an AAV (e.g., AAV serotype 8) comprising a donor template nucleic acid encoding a therapeutic gene are introduced into the liver intravenously to the subject. The LNP is targeted to hepatocytes via surface functionalization of the LNPs.

[0496] For example, the subject having hemophilia A is treated with a gene replacement platform comprising LNPs containing mRNA encoding a MG29-1 nuclease described herein (SEQ ID NO: 214). LNPs also contain sgRNA specific for albumin I, which is highly expressed in the liver (e.g., albumin can be expressed at about 5 g/dL in the liver, whereas factor VIII can be expressed at about 10 μg/dL in the liver, or 1 million times less than albumin). In addition to the LNPs, AAV8 (AAV serotype 8) viral particles comprising plasmids, which encode replacement template DNA encoding a replacement factor VIII nucleotide sequence, are delivered to the subject as well. Once inside the cell, the mRNA, sgRNA, and template DNA are transiently expressed. The MG29-1 nuclease targets the target locus of the host hepatocyte DNA using the sgRNA and then cleaves the host DNA. The donor template DNA transcribed from the plasmid delivered to the host hepatocyte in the AAV8 is spliced into the cell and stably integrated into the host DNA at the target site of the albumin I gene, and the inserted factor VIII DNA is expressed under the albumin promoter.

[0497] The gene editing platform is also used in subjects selected for gene knockdown therapy. For instance, a subject presenting with familial ATTR amyloidosis is treated with LNPs containing mRNA encoding an MG29-1 nuclease described herein (SEQ ID NO: 214) and a sgRNA specific to a target site in the transthyretin gene. The MG29-1 nuclease and sgRNA are delivered to and expressed in hepatocytes of the subject. In some embodiments, the sgRNA is targeted to a stop codon of the transthyretin gene, and the MG29-1 nuclease's activity removes the endogenous stop codon, effectively knocking down the expression of the gene. In some embodiments, the gene knockdown platform comprises an AAV8 containing a plasmid encoding a polynucleotide comprising a stop codon. When the AAV8 is delivered to the same cell that is expressing the nuclease and sgRNA, an exogenous stop codon is spliced into the tranthyretin gene, leading to knockdown of the gene's expression as a result of premature truncation of proteins translated from RNA produced from the edited DNA.

### Example 13—Gene Editing Outcomes at the DNA Level for CD38

[0498] Primary NK cells were expanded using the NK Cloudz system (R&D Systems) according to the manufacturer's recommendations. Nucleofection of MG29-1 RNPs (212 pmol protein/320 pmol guide) (guide SEQ ID NOs: 4428-4465) was performed into NK cells (500,000) using the Lonza 4D electroporator. Cells were harvested and genomic DNA prepared five days post-transfection. PCR primers appropriate for use in NGS-based DNA sequencing were generated, optimized, and used to amplify the individual target sequences for each guide RNA (SEQ ID NOs: 4466-4503). The amplicons were sequenced on an Illumina MiSeq machine and analyzed with a proprietary Python script to measure gene editing (FIG. 57).

TABLE 14A
Sequences of Guide RNAs and Sequences Targeted Thereby for Example 37

| | SEQ ID | | |
|---|---|---|---|
| Guide Target | NO | Guide Name | SEQUENCE |
| MG29-1 | 4428 | MG29-1- | /AltR1/rUrArArUrUrUrCrUrArCrUrGrUrUrGrUrArGr |
| sgRNA | | CD38-sgRNA- | ArUrCrCrGrArGrArCrCrGrUrCrCrUrGrGrCrGrCrGr |
| targeting | | A1 | ArUrG/AltR2/ |
| CD38 | | | |
| MG29-1 | 4429 | MG29-1- | /AltR1/rUrArArUrUrUrCrUrArCrUrGrUrUrGrUrArGr |
| sgRNA | | CD38-sgRNA- | ArUrArGrUrGrUrArCrUrUrGrArCrGrCrArUrCrGrCr |
| targeting | | B1 | GrCrC/AltR2/ |
| CD38 | | | |
| MG29-1 | 4430 | MG29-1- | /AltR1/rUrArArUrUrUrCrUrArCrUrGrUrUrGrUrArGr |
| sgRNA | | CD38-sgRNA- | ArUrUrCrCrCrCrGrGrArCrArCrCrGrGrGrCrUrGrAr |
| targeting | | C1 | ArCrU/AltR2/ |
| CD38 | | | |
| MG29-1 | 4431 | MG29-1- | /AltR1/rUrArArUrUrUrCrUrArCrUrGrUrUrGrUrArGr |
| sgRNA | | CD38-sgRNA- | ArUrArArGrGrGrUrGrCrArUrUrUrArUrUrUrCrArAr |
| targeting | | D1 | ArArC/AltR2/ |
| CD38 | | | |
| MG29-1 | 4432 | MG29-1- | /AltR1/rUrArArUrUrUrCrUrArCrUrGrUrUrGrUrArGr |
| sgRNA | | CD38-sgRNA- | ArUrUrUrUrCrArArArArCrArUrCrCrUrUrGrCrArArC |
| targeting | | E1 | rArU/AltR2/ |
| CD38 | | | |
| MG29-1 | 4433 | MG29-1- | /AltR1/rUrArArUrUrUrCrUrArCrUrGrUrUrGrUrArGr |
| sgRNA | | CD38-sgRNA- | ArUrArArArArCrArUrCrCrUrUrGrCrArArCrArUrUrA |
| targeting | | F1 | rCrU/AltR2/ |
| CD38 | | | |
| MG29-1 | 4434 | MG29-1- | /AltR1/rUrArArUrUrUrCrUrArCrUrGrUrUrGrUrArGr |
| sgRNA | | CD38-sgRNA- | ArUrGrArArArUrArArArUrGrCrArCrCrCrUrUrGrAr |
| targeting | | G1 | ArArG/AltR2/ |
| CD38 | | | |
| MG29-1 | 4435 | MG29-1- | /AltR1/rUrArArUrUrUrCrUrArCrUrGrUrUrGrUrArGr |
| sgRNA | | CD38-sgRNA- | ArUrArArArUrArArArUrGrCrArCrCrCrUrUrGrArAr |
| targeting | | H1 | ArGrC/AltR2/ |
| CD38 | | | |
| MG29-1 | 4436 | MG29-1- | /AltR1/rUrArArUrUrUrCrUrArCrUrGrUrUrGrUrArGr |
| sgRNA | | CD38-sgRNA- | ArUrGrCrArGrUrCrUrArCrArUrGrUrCrUrGrArGrAr |
| targeting | | A2 | UrArA/AltR2/ |
| CD38 | | | |
| MG29-1 | 4437 | MG29-1- | /AltR1/rUrArArUrUrUrCrUrArCrUrGrUrUrGrUrArGr |
| sgRNA | | CD38-sgRNA- | ArUrGrArGrCrArGrArArUrArArArArGrArUrCrUrGr |
| targeting | | B2 | GrCrC/AltR2/ |
| CD38 | | | |
| MG29-1 | 4438 | MG29-1- | /AltR1/rUrArArUrUrUrCrUrArCrUrGrUrUrGrUrArGr |
| sgRNA | | CD38-sgRNA- | ArUrArUrUrCrUrGrCrUrCrCrArArArGrArArGrArAr |
| targeting | | C2 | UrCrU/AltR2/ |
| CD38 | | | |
| MG29-1 | 4439 | MG29-1- | /AltR1/rUrArArUrUrUrCrUrArCrUrGrUrUrGrUrArGr |
| sgRNA | | CD38-sgRNA- | ArUrUrUrCrUrGrCrUrCrCrArArArGrArArGrArArUr |
| targeting | | D2 | CrUrA/AltR2/ |
| CD38 | | | |
| MG29-1 | 4440 | MG29-1- | /AltR1/rUrArArUrUrUrCrUrArCrUrGrUrUrGrUrArGr |
| sgRNA | | CD38-sgRNA- | ArUrArGrUrArUrUrCrUrGrGrArArArArCrGrGrUrUr |
| targeting | | E2 | UrCrC/AltR2/ |
| CD38 | | | |
| MG29-1 | 4441 | MG29-1- | /AltR1/rUrArArUrUrUrCrUrArCrUrGrUrUrGrUrArGr |
| sgRNA | | CD38-sgRNA- | ArUrCrCrGrCrArGrGrGrUrArArGrUrArCrCrArArGr |
| targeting | | F2 | UrArG/AltR2/ |
| CD38 | | | |
| MG29-1 | 4442 | MG29-1- | /AltR1/rUrArArUrUrUrCrUrArCrUrGrUrUrGrUrArGr |
| sgRNA | | CD38-sgRNA- | ArUrCrCrArGrArArUrArCrUrGrArArArCrArGrGrGr |
| targeting | | G2 | UrUrG/AltR2/ |
| CD38 | | | |
| MG29-1 | 4443 | MG29-1- | /AltR1/rUrArArUrUrUrCrUrArCrUrGrUrUrGrUrArGr |
| sgRNA | | CD38-sgRNA- | ArUrCrArGrArArUrArCrUrGrArArArCrArGrGrGrUr |
| targeting | | H2 | UrGrU/AltR2/ |
| CD38 | | | |
| MG29-1 | 4444 | MG29-1- | /AltR1/rUrArArUrUrUrCrUrArCrUrGrUrUrGrUrArGr |
| sgRNA | | CD38-sgRNA- | ArUrUrCrCrArGrUrCrUrGrGrGrCrArArGrArUrUrGr |
| targeting | | A3 | ArUrA/AltR2/ |
| CD38 | | | |
| MG29-1 | 4445 | MG29-1- | /AltR1/rUrArArUrUrUrCrUrArCrUrGrUrUrGrUrArGr |
| sgRNA | | CD38-sgRNA- | ArUrUrUrUrCrUrArArArArGrArCrArUrArGrUrUrUr |
| targeting | | B3 | GrUrA/AltR2/ |
| CD38 | | | |
| MG29-1 | 4446 | MG29-1- | /AltR1/rUrArArUrUrUrCrUrArCrUrGrUrUrGrUrArGr |
| sgRNA | | CD38-sgRNA- | ArUrCrArGrArArGrCrUrGrCrCrUrGrUrGrArUrGrUr |
| targeting | | C3 | GrGrU/AltR2/ |
| CD38 | | | |
| MG29-1 | 4447 | MG29-1- | /AltR1/rUrArArUrUrUrCrUrArCrUrGrUrUrGrUrArGr |
| sgRNA | | CD38-sgRNA- | ArUrArCrArArArArArCrArGrGrUrArCrArCrArUrUr |
| targeting | | D3 | UrArU/AltR2/ |
| CD38 | | | |
| MG29-1 | 4448 | MG29-1- | /AltR1/rUrArArUrUrUrCrUrArCrUrGrUrUrGrUrArGr |
| sgRNA | | CD38-sgRNA- | ArUrUrGrUrCrArArArGrArUrUrUrUrArCrUrGrCrGr |
| targeting | | E3 | GrGrA/AltR2/ |
| CD38 | | | |
| MG29-1 | 4449 | MG29-1- | /AltR1/rUrArArUrUrUrCrUrArCrUrGrUrUrGrUrArGr |
| sgRNA | | CD38-sgRNA- | ArUrGrUrCrArArArGrArUrUrUrUrArCrUrGrCrGrGr |
| targeting | | F3 | GrArU/AltR2/ |
| CD38 | | | |
| MG29-1 | 4450 | MG29-1- | /AltR1/rUrArArUrUrUrCrUrArCrUrGrUrUrGrUrArGr |
| sgRNA | | CD38-sgRNA- | ArUrUrCrArArArGrArUrUrUrUrArCrUrGrCrGrGrGr |
| targeting | | G3 | ArUrC/AltR2/ |
| CD38 | | | |
| MG29-1 | 4451 | MG29-1- | /AltR1/rUrArArUrUrUrCrUrArCrUrGrUrUrGrUrArGr |
| sgRNA | | CD38-sgRNA- | ArUrArCrUrGrCrGrGrGrArUrCrCrArUrUrGrArGrCr |
| targeting | | H3 | ArUrC/AltR2/ |
| CD38 | | | |
| MG29-1 | 4452 | MG29-1- | /AltR1/rUrArArUrUrUrCrUrArCrUrGrUrUrGrUrArGr |
| sgRNA | | CD38-sgRNA- | ArUrCrUrGrCrGrGrGrArUrCrCrArUrUrGrArGrCrAr |
| targeting | | A4 | UrCrA/AltR2/ |
| CD38 | | | |
| MG29-1 | 4453 | MG29-1- | /AltR1/rUrArArUrUrUrCrUrArCrUrGrUrUrGrUrArGr |
| sgRNA | | CD38-sgRNA- | ArUrGrGrGrArGrUrGrUrGrGrArArGrUrCrCrArUrAr |
| targeting | | B4 | ArUrU/AltR2/ |
| CD38 | | | |
| MG29-1 | 4454 | MG29-1- | /AltR1/rUrArArUrUrUrCrUrArCrUrGrUrUrGrUrArGr |
| sgRNA | | CD38-sgRNA- | ArUrGrGrArGrUrGrUrGrGrArArGrUrCrCrArUrArAr |
| targeting | | C4 | UrUrU/AltR2/ |
| CD38 | | | |
| MG29-1 | 4455 | MG29-1- | /AltR1/rUrArArUrUrUrCrUrArCrUrGrUrUrGrUrArGr |
| sgRNA | | CD38-sgRNA- | ArUrCrArArCrCrArGrArGrArArGrGrUrUrCrArGrAr |
| targeting | | D4 | CrArC/AltR2/ |
| CD38 | | | |
| MG29-1 | 4456 | MG29-1- | /AltR1/rUrArArUrUrUrCrUrArCrUrGrUrUrGrUrArGr |
| sgRNA | | CD38-sgRNA- | ArUrCrCrUrGrCrArArGrArArUrArUrCrUrArCrArGr |
| targeting | | E4 | GrUrA/AltR2/ |
| CD38 | | | |
| MG29-1 | 4457 | MG29-1- | /AltR1/rUrArArUrUrUrCrUrArCrUrGrUrUrGrUrArGr |
| sgRNA | | CD38-sgRNA- | ArUrCrUrGrCrArArGrArArUrArUrCrUrArCrArGrGr |
| targeting | | F4 | UrArA/AltR2/ |
| CD38 | | | |
| MG29-1 | 4458 | MG29-1- | /AltR1/rUrArArUrUrUrCrUrArCrUrGrUrUrGrUrArGr |
| sgRNA | | CD38-sgRNA- | ArUrGrCrUrUrArUrArArUrCrGrArUrUrCrCrArGrCr |
| targeting | | G4 | UrCrU/AltR2/ |
| CD38 | | | |
| MG29-1 | 4459 | MG29-1- | /AltR1/rUrArArUrUrUrCrUrArCrUrGrUrUrGrUrArGr |
| sgRNA | | CD38-sgRNA- | ArUrCrUrUrArUrArArUrCrGrArUrUrCrCrArGrCrUr |
| targeting | | H4 | CrUrU/AltR2/ |
| CD38 | | | |
| MG29-1 | 4460 | MG29-1- | /AltR1/rUrArArUrUrUrCrUrArCrUrGrUrUrGrUrArGr |
| sgRNA | | CD38-sgRNA- | ArUrArUrGrGrUrGrGrGrArUrCrCrUrGrGrCrArUrAr |
| targeting | | A5 | ArGrU/AltR2/ |
| CD38 | | | |
| MG29-1 | 4461 | MG29-1- | /AltR1/rUrArArUrUrUrCrUrArCrUrGrUrUrGrUrArGr |
| sgRNA | | CD38-sgRNA- | ArUrUrGrGrUrGrGrGrArUrCrCrUrGrGrCrArUrArAr |
| targeting | | B5 | GrUrC/AltR2/ |
| CD38 | | | |
| MG29-1 | 4462 | MG29-1- | /AltR1/rUrArArUrUrUrCrUrArCrUrGrUrUrGrUrArGr |
| sgRNA | | CD38-sgRNA- | ArUrUrUrCrArGrUrGrUrGrUrGrArArArArArUrCrCr |
| targeting | | C5 | UrGrA/AltR2/ |
| CD38 | | | |
| MG29-1 | 4463 | MG29-1- | /AltR1/rUrArArUrUrUrCrUrArCrUrGrUrUrGrUrArGr |
| gRNA | | CD38-sgRNA- | ArUrUrCrArCrArCrArCrUrGrArArGrArArArCrUrUr |
| targeting | | D5 | GrUrC/AltR2/ |
| CD38 | | | |
| MG29-1 | 4464 | MG29-1- | /AltR1/rUrArArUrUrUrCrUrArCrUrGrUrUrGrUrArGr |
| sgRNA | | CD38-sgRNA- | ArUrCrArCrArCrArCrUrGrArArGrArArArCrUrUrGr |
| targeting | | E5 | UrCrA/AltR2/ |
| CD38 | | | |
| MG29-1 | 4465 | MG29-1- | /AltR1/rUrArArUrUrUrCrUrArCrUrGrUrUrGrUrArGr |
| sgRNA | | CD38-sgRNA- | ArUrArCrArCrArCrUrGrArArGrArArArCrUrUrGrUr |
| targeting | | F5 | CrArG/AltR2/ |
| CD38 | | | |
| DNA sequence | 4466 | MG29-1- | CCGAGACCGTCCTGGCGCGATG |
| of CD38 target | | CD38-target | |
| site | | site-A1 | |
| DNA sequence | 4467 | MG29-1- | AGTGTACTTGACGCATCGCGCC |
| of CD38 target | | CD38-target | |
| site | | site-B1 | |
| DNA sequence | 4468 | MG29-1- | TCCCCGGACACCGGGCTGAACT |
| of CD38 target | | CD38-target | |
| site | | site-C1 | |
| DNA sequence | 4469 | MG29-1- | AAGGGTGCATTTATTTCAAAAC |
| of CD38 target | | CD38-target | |
| site | | site-D1 | |
| DNA sequence | 4470 | MG29-1- | TTTCAAAACATCCTTGCAACAT |
| of CD38 target | | CD38-target | |
| site | | site-E1 | |
| DNA sequence | 4471 | MG29-1- | AAAACATCCTTGCAACATTACT |
| of CD38 target | | CD38-target | |
| site | | site-F1 | |
| DNA sequence | 4472 | MG29-1- | GAAATAAATGCACCCTTGAAAG |
| of CD38 target | | CD38-target | |
| site | | site-G1 | |
| DNA sequence | 4473 | MG29-1- | AAATAAATGCACCCTTGAAAGC |
| of CD38 target | | CD38-target | |
| site | | site-H1 | |
| DNA sequence | 4474 | MG29-1- | GCAGTCTACATGTCTGAGATAA |
| of CD38 target | | CD38-target | |
| site | | site-A2 | |
| DNA sequence | 4475 | MG29-1- | GAGCAGAATAAAAGATCTGGCC |
| of CD38 target | | CD38-target | |
| site | | site-B2 | |
| DNA sequence | 4476 | MG29-1- | ATTCTGCTCCAAAGAAGAATCT |
| of CD38 target | | CD38-target | |
| site | | site-C2 | |
| DNA sequence | 4477 | MG29-1- | TTCTGCTCCAAAGAAGAATCTA |
| of CD38 target | | CD38-target | |
| site | | site-D2 | |
| DNA sequence | 4478 | MG29-1- | AGTATTCTGGAAAACGGTTTCC |
| of CD38 target | | CD38-target | |
| site | | site-E2 | |
| DNA sequence | 4479 | MG29-1- | CCGCAGGGTAAGTACCAAGTAG |
| of CD38 target | | CD38-target | |
| site | | site-F2 | |
| DNA sequence | 4480 | MG29-1- | CCAGAATACTGAAACAGGGTTG |
| of CD38 target | | CD38-target | |
| site | | site-G2 | |
| DNA sequence | 4481 | MG29-1- | CAGAATACTGAAACAGGGTTGT |
| of CD38 target | | CD38-target | |
| site | | site-H2 | |
| DNA sequence | 4482 | MG29-1- | TCCAGTCTGGGCAAGATTGATA |
| of CD38 target | | CD38-target | |
| site | | site-A3 | |
| DNA sequence | 4483 | MG29-1- | TTTCTAAAAGACATAGTTTGTA |
| of CD38 target | | CD38-target | |
| site | | site-B3 | |
| DNA sequence | 4484 | MG29-1- | CAGAAGCTGCCTGTGATGTGGT |
| of CD38 target | | CD38-target | |
| site | | site-C3 | |
| DNA sequence | 4485 | MG29-1- | ACAAAAACAGGTACACATTTAT |
| of CD38 target | | CD38-target | |
| site | | site-D3 | |
| DNA sequence | 4486 | MG29-1- | TGTCAAAGATTTTACTGCGGGA |
| of CD38 target | | CD38-target | |
| site | | site-E3 | |
| DNA sequence | 4487 | MG29-1- | GTCAAAGATTTTACTGCGGGAT |
| of CD38 target | | CD38-target | |
| site | | site-F3 | |
| DNA sequence | 4488 | MG29-1- | TCAAAGATTTTACTGCGGGATC |
| of CD38 target | | CD38-target | |
| site | | site-G3 | |
| DNA sequence | 4489 | MG29-1- | ACTGCGGGATCCATTGAGCATC |
| of CD38 target | | CD38-target | |
| site | | site-H3 | |
| DNA sequence | 4490 | MG29-1- | CTGCGGGATCCATTGAGCATCA |
| of CD38 target | | CD38-target | |
| site | | site-A4 | |
| DNA sequence | 4491 | MG29-1- | GGGAGTGTGGAAGTCCATAATT |
| of CD38 target | | CD38-target | |
| site | | site-B4 | |
| DNA sequence | 4492 | MG29-1- | GGAGTGTGGAAGTCCATAATTT |
| of CD38 target | | CD38-target | |
| site | | site-C4 | |
| DNA sequence | 4493 | MG29-1- | CAACCAGAGAAGGTTCAGACAC |
| of CD38 target | | CD38-target | |
| site | | site-D4 | |
| DNA sequence | 4494 | MG29-1- | CCTGCAAGAATATCTACAGGTA |
| of CD38 target | | CD38-target | |
| site | | site-E4 | |
| DNA sequence | 4495 | MG29-1- | CTGCAAGAATATCTACAGGTAA |
| of CD38 target | | CD38-target | |
| site | | site-F4 | |
| DNA sequence | 4496 | MG29-1- | GCTTATAATCGATTCCAGCTCT |
| of CD38 target | | CD38-target | |
| site | | site-G4 | |
| DNA sequence | 4497 | MG29-1- | CTTATAATCGATTCCAGCTCTT |
| of CD38 target | | CD38-target | |
| site | | site-H4 | |
| DNA sequence | 4498 | MG29-1- | ATGGTGGGATCCTGGCATAAGT |
| of CD38 target | | CD38-target | |
| site | | site-A5 | |
| DNA sequence | 4499 | MG29-1- | TGGTGGGATCCTGGCATAAGTC |
| of CD38 target | | CD38-target | |
| site | | site-B5 | |
| DNA sequence | 4500 | MG29-1- | TTCAGTGTGTGAAAAATCCTGA |
| of CD38 target | | CD38-target | |
| site | | site-C5 | |
| DNA sequence | 4501 | MG29-1- | TCACACACTGAAGAAACTTGTC |
| of CD38 target | | CD38-target | |
| site | | site-D5 | |
| DNA sequence | 4502 | MG29-1- | CACACACTGAAGAAACTTGTCA |
| of CD38 target | | CD38-target | |
| site | | site-E5 | |
| DNA sequence | 4503 | MG29-1- | ACACACTGAAGAAACTTGTCAG |
| of CD38 target | | CD38-target | |
| site | | site-F5 | |

r; native RNA linkage comprising the sugar ribose (for example the ribose or RNA form of the A base is written rA), d; deoxyribose sugar (DNA) linkage (for example a deoxyribose form of the A base is written dA), *; between bases in which one of the oxygen molecules in the phosphodiester bond is replaced with sulfur; AltR1 and AltR2 refer to IDT technologies' proprietary 5′ and 3′ AltR modifications

### Example 38—Gene Editing Outcomes at the Phenotypic Level for CD38

[0499] Edited cells were assayed for CD38 expression as follows: primary NK cells (500,000) were washed with phosphate buffered saline (PBS) and stained with LIVE/DEAD™ Fixable Aqua Dead Cell Stain Kit (ThermoFisher) according to the manufacturer specifications. Cells were then washed and incubated with FC Block—Human TruStain FcX™ (Biolegend) for 20 minutes on ice. Next, cells were stained with anti-CD56 PE and anti-38 PerCP eFluor 710 antibodies (ThermoFisher) according to the manufacturer recommendations and analyzed by flow cytometry by collecting 25,000 total events per specimen (FIG. 58).

### Example 39—Gene Editing Outcomes at the DNA Level for TIGIT

[0500] Primary T cells were purified from PMBCs using a negative selection kit (Miltenyi) according to the manufacturer's recommendations. Nucleofection of MG29-1 RNPs (106 pmol protein/160 pmol guide) (SEQ ID NOs: 4504-4520) was performed into T cells (200,000) using the Lonza 4D electroporator. Cells were harvested and genomic DNA prepared five days post-transfection. PCR primers appropriate for use in NGS-based DNA sequencing were generated, optimized, and used to amplify the individual target sequences for each guide RNA (SEQ ID NOs: 4521-4537). The amplicons were sequenced on an Illumina MiSeq machine and analyzed with a proprietary Python script to measure gene editing (FIG. 59).

TABLE 14B
Sequences of Guide RNAs and Sequences Targeted for Example 39

| | SEQ | | |
|---|---|---|---|
| Guide | ID | | |
| Target | NO | Guide Name | SEQUENCE |
| MG29-1 | 4504 | MG29-1-TIGIT- | /AltR1/rUrArArUrUrUrCrUrArCrUrGrUrUrGrUrArGrArUrArG |
| sgRNA | | sgRNA-A1 | rGrCrCrUrUrArCrCrUrGrArGrGrCrGrArGrGrGrG/AltR2/ |
| targeting | | | |
| TIGIT | | | |
| MG29-1 | 4505 | MG29-1-TIGIT- | /AltR1/rUrArArUrUrUrCrUrArCrUrGrUrUrGrUrArGrArUrUrA |
| sgRNA | | sgRNA-B1 | rUrUrGrUrGrCrCrUrGrUrCrArUrCrArUrUrCrCrU/AltR2/ |
| targeting | | | |
| TIGIT | | | |
| MG29-1 | 4506 | MG29-1-TIGIT- | /AltR1/rUrArArUrUrUrCrUrArCrUrGrUrUrGrUrArGrArUrUrCr |
| sgRNA | | sgRNA-C1 | UrGrCrArGrArArArUrGrUrUrCrCrCrCrGrUrUrG/AltR2/ |
| targeting | | | |
| TIGIT | | | |
| MG29-1 | 4507 | MG29-1-TIGIT- | /AltR1/rUrArArUrUrUrCrUrArCrUrGrUrUrGrUrArGrArUrUrG |
| sgRNA | | sgRNA-D1 | rCrArGrArGrArArArGrGrUrGrGrCrUrCrUrArUrC/AltR2/ |
| targeting | | | |
| TIGIT | | | |
| MG29-1 | 4508 | MG29-1-TIGIT- | /AltR1/rUrArArUrUrUrCrUrArCrUrGrUrUrGrUrArGrArUrUrA |
| sgRNA | | sgRNA-E1 | rArUrGrCrUrGrArCrUrUrGrGrGrGrUrGrGrCrArC/AltR2/ |
| targeting | | | |
| TIGIT | | | |
| MG29-1 | 4509 | MG29-1-TIGIT- | /AltR1/rUrArArUrUrUrCrUrArCrUrGrUrUrGrUrArGrArUrUrA |
| sgRNA | | sgRNA-F1 | rGrGrArCrCrUrCrCrArGrGrArArGrArUrUrCrUrC/AltR2/ |
| targeting | | | |
| TIGIT | | | |
| MG29-1 | 4510 | MG29-1-TIGIT- | /AltR1/rUrArArUrUrUrCrUrArCrUrGrUrUrGrUrArGrArUrGrU |
| sgRNA | | sgRNA-G1 | rCrCrUrCrCrCrUrCrUrArGrUrGrGrCrUrGrArGrC/AltR2/ |
| targeting | | | |
| TIGIT | | | |
| MG29-1 | 4511 | MG29-1-TIGIT- | /AltR1/rUrArArUrUrUrCrUrArCrUrGrUrUrGrUrArGrArUrUrCr |
| sgRNA | | sgRNA-H1 | CrUrCrCrCrUrCrUrArGrUrGrGrCrUrGrArGrCrA/AltR2/ |
| targeting | | | |
| TIGIT | | | |
| MG29-1 | 4512 | MG29-1-TIGIT- | /AltR1/rUrArArUrUrUrCrUrArCrUrGrUrUrGrUrArGrArUrUrA |
| sgRNA | | sgRNA-A2 | rGrUrCrArArCrGrCrGrArCrCrArCrCrArCrGrArU/AltR2/ |
| targeting | | | |
| TIGIT | | | |
| MG29-1 | 4513 | MG29-1-TIGIT- | /AltR1/rUrArArUrUrUrCrUrArCrUrGrUrUrGrUrArGrArUrUrA |
| sgRNA | | sgRNA-B2 | rGrUrUrUrGrUrUrUrGrUrUrUrUrUrArGrArArGrA/AltR2/ |
| targeting | | | |
| TIGIT | | | |
| MG29-1 | 4514 | MG29-1-TIGIT- | /AltR1/rUrArArUrUrUrCrUrArCrUrGrUrUrGrUrArGrArUrUrU |
| sgRNA | | sgRNA-C2 | rUrGrUrUrUrUrUrArGrArArGrArArArGrCrCrCrU/AltR2/ |
| targeting | | | |
| TIGIT | | | |
| MG29-1 | 4515 | MG29-1-TIGIT- | /AltR1/rUrArArUrUrUrCrUrArCrUrGrUrUrGrUrArGrArUrUrU |
| sgRNA | | sgRNA-D2 | rUrUrUrArGrArArGrArArArGrCrCrCrUrCrArGrA/AltR2/ |
| targeting | | | |
| TIGIT | | | |
| MG29-1 | 4516 | MG29-1-TIGIT- | /AltR1/rUrArArUrUrUrCrUrArCrUrGrUrUrGrUrArGrArUrUrA |
| sgRNA | | sgRNA-E2 | rGrArArGrArArArGrCrCrCrUrCrArGrArArUrCrC/AltR2/ |
| targeting | | | |
| TIGIT | | | |
| MG29-1 | 4517 | MG29-1-TIGIT- | /AltR1/rUrArArUrUrUrCrUrArCrUrGrUrUrGrUrArGrArUrArG |
| sgRNA | | sgRNA-F2 | rArArGrArArArGrCrCrCrUrCrArGrArArUrCrCrA/AltR2/ |
| targeting | | | |
| TIGIT | | | |
| MG29-1 | 4518 | MG29-1-TIGIT- | /AltR1/rUrArArUrUrUrCrUrArCrUrGrUrUrGrUrArGrArUrGrA |
| sgRNA | | sgRNA-G2 | rArGrArArArGrCrCrCrUrCrArGrArArUrCrCrArU/AltR2/ |
| targeting | | | |
| TIGIT | | | |
| MG29-1 | 4519 | MG29-1-TIGIT- | /AltR1/rUrArArUrUrUrCrUrArCrUrGrUrUrGrUrArGrArUrUrCr |
| sgRNA | | sgRNA-H2 | CrUrGrArGrGrUrCrArCrCrUrUrCrCrArCrArGrA/AltR2/ |
| targeting | | | |
| TIGIT | | | |
| MG29-1 | 4520 | MG29-1-TIGIT- | /AltR1/rUrArArUrUrUrCrUrArCrUrGrUrUrGrUrArGrArUrCrUr |
| sgRNA | | sgRNA-A3 | CrCrUrGrArGrGrUrCrArCrCrUrUrCrCrArCrArG/AltR2/ |
| targeting | | | |
| TIGIT | | | |
| DNA | 4521 | MG29-1-TIGIT- | AGGCCTTACCTGAGGCGAGGGG |
| sequence of | | target site-A1 | |
| TIGIT target | | | |
| site | | | |
| DNA | 4522 | MG29-1-TIGIT- | TATTGTGCCTGTCATCATTCCT |
| sequence of | | target site-B1 | |
| TIGIT target | | | |
| site | | | |
| DNA | 4523 | MG29-1-TIGIT- | TCTGCAGAAATGTTCCCCGTTG |
| sequence of | | target site-C1 | |
| TIGIT target | | | |
| site | | | |
| DNA | 4524 | MG29-1-TIGIT- | TGCAGAGAAAGGTGGCTCTATC |
| sequence of | | target site-D1 | |
| TIGIT target | | | |
| site | | | |
| DNA | 4525 | MG29-1-TIGIT- | TAATGCTGACTTGGGGTGGCAC |
| sequence of | | target site-E1 | |
| TIGIT target | | | |
| site | | | |
| DNA | 4526 | MG29-1-TIGIT- | TAGGACCTCCAGGAAGATTCTC |
| sequence of | | target site-F1 | |
| TIGIT target | | | |
| site | | | |
| DNA | 4527 | MG29-1-TIGIT- | GTCCTCCCTCTAGTGGCTGAGC |
| sequence of | | target site-G1 | |
| TIGIT target | | | |
| site | | | |
| DNA | 4528 | MG29-1-TIGIT- | TCCTCCCTCTAGTGGCTGAGCA |
| sequence of | | target site-H1 | |
| TIGIT target | | | |
| site | | | |
| DNA | 4529 | MG29-1-TIGIT- | TAGTCAACGCGACCACCACGAT |
| sequence of | | target site-A2 | |
| TIGIT target | | | |
| site | | | |
| DNA | 4530 | MG29-1-TIGIT- | TAGTTTGTTTGTTTTTAGAAGA |
| sequence of | | target site-B2 | |
| TIGIT target | | | |
| site | | | |
| DNA | 4531 | MG29-1-TIGIT- | TTTGTTTTTAGAAGAAAGCCCT |
| sequence of | | target site-C2 | |
| TIGIT target | | | |
| site | | | |
| DNA | 4532 | MG29-1-TIGIT- | TTTTTAGAAGAAAGCCCTCAGA |
| sequence of | | target site-D2 | |
| TIGIT target | | | |
| site | | | |
| DNA | 4533 | MG29-1-TIGIT- | TAGAAGAAAGCCCTCAGAATCC |
| sequence of | | target site-E2 | |
| TIGIT target | | | |
| site | | | |
| DNA | 4534 | MG29-1-TIGIT- | AGAAGAAAGCCCTCAGAATCCA |
| sequence of | | target site-F2 | |
| TIGIT target | | | |
| site | | | |
| DNA | 4535 | MG29-1-TIGIT- | GAAGAAAGCCCTCAGAATCCAT |
| sequence of | | target site-G2 | |
| TIGIT target | | | |
| site | | | |
| DNA | 4536 | MG29-1-TIGIT- | CTCCTGAGGTCACCTTCCACAG |
| sequence of | | target site-H2 | |
| TIGIT target | | | |
| site | | | |
| DNA | 4537 | MG29-1-TIGIT- | TCCTGAGGTCACCTTCCACAGA |
| sequence of | | target site-A3 | |
| TIGIT target | | | |
| site | | | |

r; native RNA linkage comprising the sugar ribose (for example the ribose or RNA form of the A base is written rA), d; deoxyribose sugar (DNA) linkage (for example a deoxyribose form of the A base is written dA), *; between bases in which one of the oxygen molecules in the phosphodiester bond is replaced with sulfur; AltR1 and AltR2 refer to IDT technologies' proprietary 5′ and 3′ AltR modifications

### Example 14—Gene Editing Outcomes at the DNA Level for AAVS1

[0501] Primary T cells were purified from PMBCs using a negative selection kit (Miltenyi) according to the manufacturer's recommendations. Nucleofection of MG29-1 RNPs (106 pmol protein/160 pmol guide) (SEQ ID NOs: 4538-4568) was performed into T cells (200,000) using the Lonza 4D electroporator. Cells were harvested and genomic DNA prepared five days post-transfection. PCR primers appropriate for use in NGS-based DNA sequencing were generated, optimized, and used to amplify the individual target sequences for each guide RNA (SEQ ID NOs: 4569-4599). The amplicons were sequenced on an Illumina MiSeq machine and analyzed with a proprietary Python script to measure gene editing (FIG. 60).

TABLE 14C
Sequences of Guide RNAs and Sequences Targeted for Example 40

| | SEQ | | |
|---|---|---|---|
| | ID | | |
| Guide Target | NO | Guide Name | SEQUENCE |
| MG29-1 | 4538 | MG29-1-AAVS1- | /AltR1/rUrArArUrUrUrCrUrArCrUrGrUrUrGrUrArGrA |
| sgRNA | | sgRNA-A1 | rUrGrUrUrUrUrUrCrCrArArArCrUrGrCrUrUrCrUrCr |
| targeting | | | CrU/AltR2/ |
| AAVS1 | | | |
| MG29-1 | 4539 | MG29-1-AAVS1- | /AltR1/rUrArArUrUrUrCrUrArCrUrGrUrUrGrUrArGrA |
| sgRNA | | sgRNA-B1 | rUrUrUrUrUrUrCrCrArArArCrUrGrCrUrUrCrUrCrCr |
| targeting | | | UrC/AltR2/ |
| AAVS1 | | | |
| MG29-1 | 4540 | MG29-1-AAVS1- | /AltR1/rUrArArUrUrUrCrUrArCrUrGrUrUrGrUrArGrA |
| sgRNA | | sgRNA-C1 | rUrUrCrCrArArArCrUrGrCrUrUrCrUrCrCrUrCrUrUr |
| targeting | | | GrG/AltR2/ |
| AAVS1 | | | |
| MG29-1 | 4541 | MG29-1-AAVS1- | /AltR1/rUrArArUrUrUrCrUrArCrUrGrUrUrGrUrArGrA |
| sgRNA | | sgRNA-D1 | rUrCrCrArArArCrUrGrCrUrUrCrUrCrCrUrCrUrUrGr |
| targeting | | | GrG/AltR2/ |
| AAVS1 | | | |
| MG29-1 | 4542 | MG29-1-AAVS1- | /AltR1/rUrArArUrUrUrCrUrArCrUrGrUrUrGrUrArGrA |
| sgRNA | | sgRNA-E1 | rUrCrArArArCrUrGrCrUrUrCrUrCrCrUrCrUrUrGrGr |
| targeting | | | GrA/AltR2/ |
| AAVS1 | | | |
| MG29-1 | 4543 | MG29-1-AAVS1- | /AltR1/rUrArArUrUrUrCrUrArCrUrGrUrUrGrUrArGrA |
| sgRNA | | sgRNA-F1 | rUrCrUrGrUrCrArCrCrArArUrCrCrUrGrUrCrCrCrUr |
| targeting | | | ArG/AltR2/ |
| AAVS1 | | | |
| MG29-1 | 4544 | MG29-1-AAVS1- | /AltR1/rUrArArUrUrUrCrUrArCrUrGrUrUrGrUrArGrA |
| sgRNA | | sgRNA-G1 | rUrUrGrUrCrArCrCrArArUrCrCrUrGrUrCrCrCrUrAr |
| targeting | | | GrU/AltR2/ |
| AAVS1 | | | |
| MG29-1 | 4545 | MG29-1-AAVS1- | /AltR1/rUrArArUrUrUrCrUrArCrUrGrUrUrGrUrArGrA |
| sgRNA | | sgRNA-H1 | rUrGrGrGrUrUrGrUrCrCrArGrArArArArArCrGrGrUr |
| targeting | | | GrA/AltR2/ |
| AAVS1 | | | |
| MG29-1 | 4546 | MG29-1-AAVS1- | /AltR1/rUrArArUrUrUrCrUrArCrUrGrUrUrGrUrArGrA |
| sgRNA | | sgRNA-A2 | rUrCrCrUrUrCrUrCrCrUrUrCrUrGrGrGrGrCrCrUrGr |
| targeting | | | UrG/AltR2/ |
| AAVS1 | | | |
| MG29-1 | 4547 | MG29-1-AAVS1- | /AltR1/rUrArArUrUrUrCrUrArCrUrGrUrUrGrUrArGrA |
| sgRNA | | sgRNA-B2 | rUrCrUrUrCrUrCrCrUrUrCrUrGrGrGrGrCrCrUrGrUr |
| targeting | | | GrC/AltR2/ |
| AAVS1 | | | |
| MG29-1 | 4548 | MG29-1-AAVS1- | /AltR1/rUrArArUrUrUrCrUrArCrUrGrUrUrGrUrArGrA |
| sgRNA | | sgRNA-C2 | rUrUrUrArGrGrArUrGrGrCrCrUrUrCrUrCrCrGrArCr |
| targeting | | | GrG/AltR2/ |
| AAVS1 | | | |
| MG29-1 | 4549 | MG29-1-AAVS1- | /AltR1/rUrArArUrUrUrCrUrArCrUrGrUrUrGrUrArGrA |
| sgRNA | | sgRNA-D2 | rUrUrCrUrGrGrArCrArArCrCrCrCrArArArGrUrArCr |
| targeting | | | CrC/AltR2/ |
| AAVS1 | | | |
| MG29-1 | 4550 | MG29-1-AAVS1- | /AltR1/rUrArArUrUrUrCrUrArCrUrGrUrUrGrUrArGrA |
| sgRNA | | sgRNA-E2 | rUrCrUrGrGrArCrArArCrCrCrCrArArArGrUrArCrCr |
| targeting | | | CrC/AltR2/ |
| AAVS1 | | | |
| MG29-1 | 4551 | MG29-1-AAVS1- | /AltR1/rUrArArUrUrUrCrUrArCrUrGrUrUrGrUrArGrA |
| sgRNA | | sgRNA-F2 | rUrUrGrGrArCrArArCrCrCrCrArArArGrUrArCrCrCr |
| targeting | | | CrG/AltR2/ |
| AAVS1 | | | |
| MG29-1 | 4552 | MG29-1-AAVS1- | /AltR1/rUrArArUrUrUrCrUrArCrUrGrUrUrGrUrArGrA |
| sgRNA | | sgRNA-G2 | rUrGrCrCrArCrCrUrCrUrCrCrArUrCrCrUrCrUrUrGr |
| targeting | | | CrU/AltR2/ |
| AAVS1 | | | |
| MG29-1 | 4553 | MG29-1-AAVS1- | /AltR1/rUrArArUrUrUrCrUrArCrUrGrUrUrGrUrArGrA |
| sgRNA | | sgRNA-H2 | rUrUrUrUrGrCrCrUrGrGrArCrArCrCrCrCrGrUrUrCr |
| targeting | | | UrC/AltR2/ |
| AAVS1 | | | |
| MG29-1 | 4554 | MG29-1-AAVS1- | /AltR1/rUrArArUrUrUrCrUrArCrUrGrUrUrGrUrArGrA |
| sgRNA | | sgRNA-A3 | rUrCrCrUrGrGrArCrArCrCrCrCrGrUrUrCrUrCrCrUr |
| targeting | | | GrU/AltR2/ |
| AAVS1 | | | |
| MG29-1 | 4555 | MG29-1-AAVS1- | /AltR1/rUrArArUrUrUrCrUrArCrUrGrUrUrGrUrArGrA |
| sgRNA | | sgRNA-B3 | rUrArUrUrUrGrGrGrCrArGrCrUrCrCrCrCrUrArCrCr |
| targeting | | | CrC/AltR2/ |
| AAVS1 | | | |
| MG29-1 | 4556 | MG29-1-AAVS1- | /AltR1/rUrArArUrUrUrCrUrArCrUrGrUrUrGrUrArGrA |
| sgRNA | | sgRNA-C3 | rUrGrGrCrArGrCrUrCrCrCrCrUrArCrCrCrCrCrCrUr |
| targeting | | | UrA/AltR2/ |
| AAVS1 | | | |
| MG29-1 | 4557 | MG29-1-AAVS1- | /AltR1/rUrArArUrUrUrCrUrArCrUrGrUrUrGrUrArGrA |
| sgRNA | | sgRNA-D3 | rUrCrUrGrCrCrUrCrCrArGrGrGrArUrCrCrUrGrUrGr |
| targeting | | | UrC/AltR2/ |
| AAVS1 | | | |
| MG29-1 | 4558 | MG29-1-AAVS1- | /AltR1/rUrArArUrUrUrCrUrArCrUrGrUrUrGrUrArGrA |
| sgRNA | | sgRNA-E3 | rUrArUrCrUrGrUrCrCrCrCrUrCrCrArCrCrCrCrArCr |
| targeting | | | ArG/AltR2/ |
| AAVS1 | | | |
| MG29-1 | 4559 | MG29-1-AAVS1- | /AltR1/rUrArArUrUrUrCrUrArCrUrGrUrUrGrUrArGrA |
| sgRNA | | sgRNA-F3 | rUrUrCrUrGrUrCrCrCrCrUrCrCrArCrCrCrCrArCrAr |
| targeting | | | GrU/AltR2/ |
| AAVS1 | | | |
| MG29-1 | 4560 | MG29-1-AAVS1- | /AltR1/rUrArArUrUrUrCrUrArCrUrGrUrUrGrUrArGrA |
| sgRNA | | sgRNA-G3 | rUrCrUrGrGrArGrCrCrArUrCrUrCrUrCrUrCrCrUrUr |
| targeting | | | GrC/AltR2/ |
| AAVS1 | | | |
| MG29-1 | 4561 | MG29-1-AAVS1- | /AltR1/rUrArArUrUrUrCrUrArCrUrGrUrUrGrUrArGrA |
| sgRNA | | sgRNA-H3 | rUrCrUrUrArCrGrArUrGrGrArGrCrCrArGrArGrArGr |
| targeting | | | GrA/AltR2/ |
| AAVS1 | | | |
| MG29-1 | 4562 | MG29-1-AAVS1- | /AltR1/rUrArArUrUrUrCrUrArCrUrGrUrUrGrUrArGrA |
| sgRNA | | sgRNA-A4 | rUrArCrUrGrArUrCrCrUrGrGrUrGrCrUrGrCrArGrCr |
| targeting | | | UrU/AltR2/ |
| AAVS1 | | | |
| MG29-1 | 4563 | MG29-1-AAVS1- | /AltR1/rUrArArUrUrUrCrUrArCrUrGrUrUrGrUrArGrA |
| sgRNA | | sgRNA-B4 | rUrGrArArArArArCrArArArArUrCrArGrArArUrArAr |
| targeting | | | GrU/AltR2/ |
| AAVS1 | | | |
| MG29-1 | 4564 | MG29-1-AAVS1- | /AltR1/rUrArArUrUrUrCrUrArCrUrGrUrUrGrUrArGrA |
| sgRNA | | sgRNA-C4 | rUrGrCrUrCrUrUrCrArCrCrUrUrUrCrUrArGrUrCrCr |
| targeting | | | CrC/AltR2/ |
| AAVS1 | | | |
| MG29-1 | 4565 | MG29-1-AAVS1- | /AltR1/rUrArArUrUrUrCrUrArCrUrGrUrUrGrUrArGrA |
| sgRNA | | sgRNA-D4 | rUrUrArGrUrCrCrCrCrArArUrUrUrArUrArUrUrGrUr |
| targeting | | | UrC/AltR2/ |
| AAVS1 | | | |
| MG29-1 | 4566 | MG29-1-AAVS1- | /AltR1/rUrArArUrUrUrCrUrArCrUrGrUrUrGrUrArGrA |
| sgRNA | | sgRNA-E4 | rUrUrArUrUrGrUrUrCrCrUrCrCrGrUrGrCrGrUrCrAr |
| targeting | | | GrU/AltR2/ |
| AAVS1 | | | |
| MG29-1 | 4567 | MG29-1-AAVS1- | /AltR1/rUrArArUrUrUrCrUrArCrUrGrUrUrGrUrArGrA |
| sgRNA | | sgRNA-F4 | rUrArCrCrUrGrUrGrArGrArUrArArGrGrCrCrArGrUr |
| targeting | | | ArG/AltR2/ |
| AAVS1 | | | |
| MG29-1 | 4568 | MG29-1-AAVS1- | /AltR1/rUrArArUrUrUrCrUrArCrUrGrUrUrGrUrArGrA |
| sgRNA | | sgRNA-G4 | rUrCrCrUrGrUrGrArGrArUrArArGrGrCrCrArGrUrAr |
| targeting | | | GrC/AltR2/ |
| AAVS1 | | | |
| DNA sequence | 4569 | MG29-1-AAVS1- | GTTTTTCCAAACTGCTTCTCCT |
| of AAVS1 | | target site-A1 | |
| target site | | | |
| DNA sequence | 4570 | MG29-1-AAVS1- | TTTTTCCAAACTGCTTCTCCTC |
| of AAVS1 | | target site-B1 | |
| target site | | | |
| DNA sequence | 4571 | MG29-1-AAVS1- | TCCAAACTGCTTCTCCTCTTGG |
| of AAVS1 | | target site-C1 | |
| target site | | | |
| DNA sequence | 4572 | MG29-1-AAVS1- | CCAAACTGCTTCTCCTCTTGGG |
| of AAVS1 | | target site-D1 | |
| target site | | | |
| DNA sequence | 4573 | MG29-1-AAVS1- | CAAACTGCTTCTCCTCTTGGGA |
| of AAVS1 | | target site-E1 | |
| target site | | | |
| DNA sequence | 4574 | MG29-1-AAVS1- | CTGTCACCAATCCTGTCCCTAG |
| of AAVS1 | | target site-F1 | |
| target site | | | |
| DNA sequence | 4575 | MG29-1-AAVS1- | TGTCACCAATCCTGTCCCTAGT |
| of AAVS1 | | target site-G1 | |
| target site | | | |
| DNA sequence | 4576 | MG29-1-AAVS1- | GGGTTGTCCAGAAAAACGGTGA |
| of AAVS1 | | target site-H1 | |
| target site | | | |
| DNA sequence | 4577 | MG29-1-AAVS1- | CCTTCTCCTTCTGGGGCCTGTG |
| of AAVS1 | | target site-A2 | |
| target site | | | |
| DNA sequence | 4578 | MG29-1-AAVS1- | CTTCTCCTTCTGGGGCCTGTGC |
| of AAVS1 | | target site-B2 | |
| target site | | | |
| DNA sequence | 4579 | MG29-1-AAVS1- | TTAGGATGGCCTTCTCCGACGG |
| of AAVS1 | | target site-C2 | |
| target site | | | |
| DNA sequence | 4580 | MG29-1-AAVS1- | TCTGGACAACCCCAAAGTACCC |
| of AAVS1 | | target site-D2 | |
| target site | | | |
| DNA sequence | 4581 | MG29-1-AAVS1- | CTGGACAACCCCAAAGTACCCC |
| of AAVS1 | | target site-E2 | |
| target site | | | |
| DNA sequence | 4582 | MG29-1-AAVS1- | TGGACAACCCCAAAGTACCCCG |
| of AAVS1 | | target site-F2 | |
| target site | | | |
| DNA sequence | 4583 | MG29-1-AAVS1- | GCCACCTCTCCATCCTCTTGCT |
| of AAVS1 | | target site-G2 | |
| target site | | | |
| DNA sequence | 4584 | MG29-1-AAVS1- | TTTGCCTGGACACCCCGTTCTC |
| of AAVS1 | | target site-H2 | |
| target site | | | |
| DNA sequence | 4585 | MG29-1-AAVS1- | CCTGGACACCCCGTTCTCCTGT |
| of AAVS1 | | target site-A3 | |
| target site | | | |
| DNA sequence | 4586 | MG29-1-AAVS1- | ATTTGGGCAGCTCCCCTACCCC |
| of AAVS1 | | target site-B3 | |
| target site | | | |
| DNA sequence | 4587 | MG29-1-AAVS1- | GGCAGCTCCCCTACCCCCCTTA |
| of AAVS1 | | target site-C3 | |
| target site | | | |
| DNA sequence | 4588 | MG29-1-AAVS1- | CTGCCTCCAGGGATCCTGTGTC |
| of AAVS1 | | target site-D3 | |
| target site | | | |
| DNA sequence | 4589 | MG29-1-AAVS1- | ATCTGTCCCCTCCACCCCACAG |
| of AAVS1 | | target site-E3 | |
| target site | | | |
| DNA sequence | 4590 | MG29-1-AAVS1- | TCTGTCCCCTCCACCCCACAGT |
| of AAVS1 | | target site-F3 | |
| target site | | | |
| DNA sequence | 4591 | MG29-1-AAVS1- | CTGGAGCCATCTCTCTCCTTGC |
| of AAVS1 | | target site-G3 | |
| target site | | | |
| DNA sequence | 4592 | MG29-1-AAVS1- | CTTACGATGGAGCCAGAGAGGA |
| of AAVS1 | | target site-H3 | |
| target site | | | |
| DNA sequence | 4593 | MG29-1-AAVS1- | ACTGATCCTGGTGCTGCAGCTT |
| of AAVS1 | | target site-A4 | |
| target site | | | |
| DNA sequence | 4594 | MG29-1-AAVS1- | GAAAAACAAAATCAGAATAAGT |
| of AAVS1 | | target site-B4 | |
| target site | | | |
| DNA sequence | 4595 | MG29-1-AAVS1- | GCTCTTCACCTTTCTAGTCCCC |
| of AAVS1 | | target site-C4 | |
| target site | | | |
| DNA sequence | 4596 | MG29-1-AAVS1- | TAGTCCCCAATTTATATTGTTC |
| of AAVS1 | | target site-D4 | |
| target site | | | |
| DNA sequence | 4597 | MG29-1-AAVS1- | TATTGTTCCTCCGTGCGTCAGT |
| of AAVS1 | | target site-E4 | |
| target site | | | |
| DNA sequence | 4598 | MG29-1-AAVS1- | ACCTGTGAGATAAGGCCAGTAG |
| of AAVS1 | | target site-F4 | |
| target site | | | |
| DNA sequence | 4599 | MG29-1-AAVS1- | CCTGTGAGATAAGGCCAGTAGC |
| of AAVS1 | | target site-G4 | |
| target site | | | |

r; native RNA linkage comprising the sugar ribose (for example the ribose or RNA form of the A base is written rA), d; deoxyribose sugar (DNA) linkage (for example a deoxyribose form of the A base is written dA), *; between bases in which one of the oxygen molecules in the phosphodiester bond is replaced with sulfur; AltR1 and AltR2 refer to IDT technologies' proprietary 5′ and 3′ AltR modifications

### Example 15—Gene Editing Outcomes at the DNA Level for B2M

[0502] Primary T cells were purified from PMBCs using a negative selection kit (Miltenyi) according to the manufacturer's recommendations. Nucleofection of MG29-1 RNPs (106 pmol protein/160 pmol guide) (SEQ ID NOs: 46004675) was performed into T cells (200,000) using the Lonza 4D electroporator. Cells were harvested and genomic DNA prepared five days post-transfection. PCR primers appropriate for use in NGS-based DNA sequencing were generated, optimized, and used to amplify the individual target sequences for each guide RNA (SEQ ID NOs: 4676-4751). The anmplicons were sequenced on an Illumina MiSeq machine and analyzed with a proprietary Python script to measure gene editing (FIG. 61).

TABLE 14D
Sequences of Guide RNAs and Sequences Targeted for Example 41

| | SEQ | | |
|---|---|---|---|
| | ID | | |
| Guide Target | NO | Guide Name | SEQUENCE |
| MG29-1 | 4600 | MG29-1-B2M- | /AltR1/rUrArArUrUrUrCrUrArCrUrGrUrUrGrUrArGrA |
| sgRNA | | sgRNA-A1 | rUrUrGrGrCrCrUrGrGrArGrGrCrUrArUrCrCrArGrCr |
| targeting B2M | | | GrU/AltR2/ |
| MG29-1 | 4601 | MG29-1-B2M- | /AltR1/rUrArArUrUrUrCrUrArCrUrGrUrUrGrUrArGrA |
| sgRNA | | sgRNA-B1 | rUrCrCrCrGrArUrArUrUrCrCrUrCrArGrGrUrArCrUr |
| targeting B2M | | | CrC/AltR2/ |
| MG29-1 | 4602 | MG29-1-B2M- | /AltR1/rUrArArUrUrUrCrUrArCrUrGrUrUrGrUrArGrA |
| sgRNA | | sgRNA-C1 | rUrCrCrGrArUrArUrUrCrCrUrCrArGrGrUrArCrUrCr |
| targeting B2M | | | CrA/AltR2/ |
| MG29-1 | 4603 | MG29-1-B2M- | /AltR1/rUrArArUrUrUrCrUrArCrUrGrUrUrGrUrArGrA |
| sgRNA | | sgRNA-D1 | rUrCrUrCrArCrGrUrCrArUrCrCrArGrCrArGrArGrAr |
| targeting B2M | | | ArU/AltR2/ |
| MG29-1 | 4604 | MG29-1-B2M- | /AltR1/rUrArArUrUrUrCrUrArCrUrGrUrUrGrUrArGrA |
| sgRNA | | sgRNA-E1 | rUrCrUrGrArArUrUrGrCrUrArUrGrUrGrUrCrUrGrGr |
| targeting B2M | | | GrU/AltR2/ |
| MG29-1 | 4605 | MG29-1-B2M- | /AltR1/rUrArArUrUrUrCrUrArCrUrGrUrUrGrUrArGrA |
| sgRNA | | sgRNA-F1 | rUrArUrCrCrArUrCrCrGrArCrArUrUrGrArArGrUrUr |
| targeting B2M | | | GrA/AltR2/ |
| MG29-1 | 4606 | MG29-1-B2M- | /AltR1/rUrArArUrUrUrCrUrArCrUrGrUrUrGrUrArGrA |
| sgRNA | | sgRNA-G1 | rUrArGrCrArArGrGrArCrUrGrGrUrCrUrUrUrCrUrAr |
| targeting B2M | | | UrC/AltR2/ |
| MG29-1 | 4607 | MG29-1-B2M- | /AltR1/rUrArArUrUrUrCrUrArCrUrGrUrUrGrUrArGrA |
| sgRNA | | sgRNA-H1 | rUrUrArUrCrUrCrUrUrGrUrArCrUrArCrArCrUrGrAr |
| targeting B2M | | | ArU/AltR2/ |
| MG29-1 | 4608 | MG29-1-B2M- | /AltR1/rUrArArUrUrUrCrUrArCrUrGrUrUrGrUrArGrA |
| sgRNA | | sgRNA-A2 | rUrUrCrArCrArGrCrCrCrArArGrArUrArGrUrUrArAr |
| targeting B2M | | | GrU/AltR2/ |
| MG29-1 | 4609 | MG29-1-B2M- | /AltR1/rUrArArUrUrUrCrUrArCrUrGrUrUrGrUrArGrA |
| sgRNA | | sgRNA-B2 | rUrUrCrArGrUrGrGrGrGrGrUrGrArArUrUrCrArGrUr |
| targeting B2M | | | GrU/AltR2/ |
| MG29-1 | 4610 | MG29-1-B2M- | /AltR1/rUrArArUrUrUrCrUrArCrUrGrUrUrGrUrArGrA |
| sgRNA | | sgRNA-C2 | rUrCrArGrUrGrGrGrGrGrUrGrArArUrUrCrArGrUrGr |
| targeting B2M | | | UrA/AltR2/ |
| MG29-1 | 4611 | MG29-1-B2M- | /AltR1/rUrArArUrUrUrCrUrArCrUrGrUrUrGrUrArGrA |
| sgRNA | | sgRNA-D2 | rUrArGrUrGrGrGrGrGrUrGrArArUrUrCrArGrUrGrUr |
| targeting B2M | | | ArG/AltR2/ |
| MG29-1 | 4612 | MG29-1-B2M- | /AltR1/rUrArArUrUrUrCrUrArCrUrGrUrUrGrUrArGrA |
| sgRNA | | sgRNA-E2 | rUrUrCrArArUrUrCrUrCrUrCrUrCrCrArUrUrCrUrUr |
| targeting B2M | | | CrA/AltR2/ |
| MG29-1 | 4613 | MG29-1-B2M- | /AltR1/rUrArArUrUrUrCrUrArCrUrGrUrUrGrUrArGrA |
| sgRNA | | sgRNA-F2 | rUrCrArArUrUrCrUrCrUrCrUrCrCrArUrUrCrUrUrCr |
| targeting B2M | | | ArG/AltR2/ |
| MG29-1 | 4614 | MG29-1-B2M- | /AltR1/rUrArArUrUrUrCrUrArCrUrGrUrUrGrUrArGrA |
| sgRNA | | sgRNA-G2 | rUrArArUrUrCrUrCrUrCrUrCrCrArUrUrCrUrUrCrAr |
| targeting B2M | | | GrU/AltR2/ |
| MG29-1 | 4615 | MG29-1-B2M- | /AltR1/rUrArArUrUrUrCrUrArCrUrGrUrUrGrUrArGrA |
| sgRNA | | sgRNA-H2 | rUrArCrUrUrUrCrCrArUrUrCrUrCrUrGrCrUrGrGrAr |
| targeting B2M | | | UrG/AltR2/ |
| MG29-1 | 4616 | MG29-1-B2M- | /AltR1/rUrArArUrUrUrCrUrArCrUrGrUrUrGrUrArGrA |
| sgRNA | | sgRNA-A3 | rUrCrArUrUrCrUrCrUrGrCrUrGrGrArUrGrArCrGrUr |
| targeting B2M | | | GrA/AltR2/ |
| MG29-1 | 4617 | MG29-1-B2M- | /AltR1/rUrArArUrUrUrCrUrArCrUrGrUrUrGrUrArGrA |
| sgRNA | | sgRNA-B3 | rUrUrCrUrCrCrArCrUrGrUrCrUrUrUrUrUrCrArUrAr |
| targeting B2M | | | GrA/AltR2/ |
| MG29-1 | 4618 | MG29-1-B2M- | /AltR1/rUrArArUrUrUrCrUrArCrUrGrUrUrGrUrArGrA |
| sgRNA | | sgRNA-C3 | rUrCrUrCrCrArCrUrGrUrCrUrUrUrUrUrCrArUrArGr |
| targeting B2M | | | ArU/AltR2/ |
| MG29-1 | 4619 | MG29-1-B2M- | /AltR1/rUrArArUrUrUrCrUrArCrUrGrUrUrGrUrArGrA |
| sgRNA | | sgRNA-D3 | rUrUrCrCrArCrUrGrUrCrUrUrUrUrUrCrArUrArGrAr |
| targeting B2M | | | UrC/AltR2/ |
| MG29-1 | 4620 | MG29-1-B2M- | /AltR1/rUrArArUrUrUrCrUrArCrUrGrUrUrGrUrArGrA |
| sgRNA | | sgRNA-E3 | rUrUrCrArUrArGrArUrCrGrArGrArCrArUrGrUrArAr |
| targeting B2M | | | GrC/AltR2/ |
| MG29-1 | 4621 | MG29-1-B2M- | /AltR1/rUrArArUrUrUrCrUrArCrUrGrUrUrGrUrArGrA |
| sgRNA | | sgRNA-F3 | rUrCrArUrArGrArUrCrGrArGrArCrArUrGrUrArArGr |
| targeting B2M | | | CrA/AltR2/ |
| MG29-1 | 4622 | MG29-1-B2M- | /AltR1/rUrArArUrUrUrCrUrArCrUrGrUrUrGrUrArGrA |
| sgRNA | | sgRNA-G3 | rUrUrGrGrCrCrUrGrGrArGrGrCrUrArUrCrCrArGrCr |
| targeting B2M | | | GrU/AltR2/ |
| MG29-1 | 4623 | MG29-1-B2M- | /AltR1/rUrArArUrUrUrCrUrArCrUrGrUrUrGrUrArGrA |
| sgRNA | | sgRNA-H3 | rUrGrGrCrGrGrGrGrArGrCrArGrGrGrGrArGrArCrCr |
| targeting B2M | | | UrU/AltR2/ |
| MG29-1 | 4624 | MG29-1-B2M- | /AltR1/rUrArArUrUrUrCrUrArCrUrGrUrUrGrUrArGrA |
| sgRNA | | sgRNA-A4 | rUrGrCrCrUrArCrGrGrCrGrArCrGrGrGrArGrGrGrUr |
| targeting B2M | | | CrG/AltR2/ |
| MG29-1 | 4625 | MG29-1-B2M- | /AltR1/rUrArArUrUrUrCrUrArCrUrGrUrUrGrUrArGrA |
| sgRNA | | sgRNA-B4 | rUrGrGrGrCrGrUrCrGrArUrArArGrCrGrUrCrArGrAr |
| targeting B2M | | | GrC/AltR2/ |
| MG29-1 | 4626 | MG29-1-B2M- | /AltR1/rUrArArUrUrUrCrUrArCrUrGrUrUrGrUrArGrA |
| sgRNA | | sgRNA-C4 | rUrUrCrUrUrCrCrGrCrUrCrUrUrUrCrGrCrGrGrGrGr |
| targeting B2M | | | CrC/AltR2/ |
| MG29-1 | 4627 | MG29-1-B2M- | /AltR1/rUrArArUrUrUrCrUrArCrUrGrUrUrGrUrArGrA |
| sgRNA | | sgRNA-D4 | rUrGrCrGrGrGrGrCrCrUrCrUrGrGrCrUrCrCrCrCrCr |
| targeting B2M | | | ArG/AltR2/ |
| MG29-1 | 4628 | MG29-1-B2M- | /AltR1/rUrArArUrUrUrCrUrArCrUrGrUrUrGrUrArGrA |
| sgRNA | | sgRNA-E4 | rUrUrGrArArCrGrCrGrUrGrGrArGrGrGrGrCrGrCrUr |
| targeting B2M | | | UrG/AltR2/ |
| MG29-1 | 4629 | MG29-1-B2M- | /AltR1/rUrArArUrUrUrCrUrArCrUrGrUrUrGrUrArGrA |
| sgRNA | | sgRNA-F4 | rUrCrUrCrCrCrCrArCrGrGrUrGrUrGrGrCrCrCrCrAr |
| targeting B2M | | | CrA/AltR2/ |
| MG29-1 | 4630 | MG29-1-B2M- | /AltR1/rUrArArUrUrUrCrUrArCrUrGrUrUrGrUrArGrA |
| sgRNA | | sgRNA-G4 | rUrGrGrArCrGrArGrCrCrUrArCrCrCrGrUrCrCrCrCr |
| targeting B2M | | | CrA/AltR2/ |
| MG29-1 | 4631 | MG29-1-B2M- | /AltR1/rUrArArUrUrUrCrUrArCrUrGrUrUrGrUrArGrA |
| sgRNA | | sgRNA-H4 | rUrUrCrCrCrGrArCrCrCrUrCrCrCrGrUrCrGrCrCrGr |
| targeting B2M | | | UrA/AltR2/ |
| MG29-1 | 4632 | MG29-1-B2M- | /AltR1/rUrArArUrUrUrCrUrArCrUrGrUrUrGrUrArGrA |
| sgRNA | | sgRNA-A5 | rUrGrCrGrGrGrArGrCrGrCrArUrGrCrCrUrUrUrUrGr |
| targeting B2M | | | GrC/AltR2/ |
| MG29-1 | 4633 | MG29-1-B2M- | /AltR1/rUrArArUrUrUrCrUrArCrUrGrUrUrGrUrArGrA |
| sgRNA | | sgRNA-B5 | rUrCrGrGrGrArGrCrGrCrArUrGrCrCrUrUrUrUrGrGr |
| targeting B2M | | | CrU/AltR2/ |
| MG29-1 | 4634 | MG29-1-B2M- | /AltR1/rUrArArUrUrUrCrUrArCrUrGrUrUrGrUrArGrA |
| sgRNA | | sgRNA-C5 | rUrGrGrCrUrGrUrArArUrUrCrGrUrGrCrArUrUrUrUr |
| targeting B2M | | | UrU/AltR2/ |
| MG29-1 | 4635 | MG29-1-B2M- | /AltR1/rUrArArUrUrUrCrUrArCrUrGrUrUrGrUrArGrA |
| sgRNA | | sgRNA-D5 | rUrGrCrUrGrUrArArUrUrCrGrUrGrCrArUrUrUrUrUr |
| targeting B2M | | | UrU/AltR2/ |
| MG29-1 | 4636 | MG29-1-B2M- | /AltR1/rUrArArUrUrUrCrUrArCrUrGrUrUrGrUrArGrA |
| sgRNA | | sgRNA-E5 | rUrUrUrUrUrUrArArGrArArArArArCrGrCrCrUrGrCr |
| targeting B2M | | | CrU/AltR2/ |
| MG29-1 | 4637 | MG29-1-B2M- | /AltR1/rUrArArUrUrUrCrUrArCrUrGrUrUrGrUrArGrA |
| sgRNA | | sgRNA-F5 | rUrUrUrUrUrArArGrArArArArArCrGrCrCrUrGrCrCr |
| targeting B2M | | | UrU/AltR2/ |
| MG29-1 | 4638 | MG29-1-B2M- | /AltR1/rUrArArUrUrUrCrUrArCrUrGrUrUrGrUrArGrA |
| sgRNA | | sgRNA-G5 | rUrUrUrUrArArGrArArArArArCrGrCrCrUrGrCrCrUr |
| targeting B2M | | | UrC/AltR2/ |
| MG29-1 | 4639 | MG29-1-B2M- | /AltR1/rUrArArUrUrUrCrUrArCrUrGrUrUrGrUrArGrA |
| sgRNA | | sgRNA-H5 | rUrUrUrArArGrArArArArArCrGrCrCrUrGrCrCrUrUr |
| targeting B2M | | | CrU/AltR2/ |
| MG29-1 | 4640 | MG29-1-B2M- | /AltR1/rUrArArUrUrUrCrUrArCrUrGrUrUrGrUrArGrA |
| sgRNA | | sgRNA-A6 | rUrUrArArGrArArArArArCrGrCrCrUrGrCrCrUrUrCr |
| targeting B2M | | | UrG/AltR2/ |
| MG29-1 | 4641 | MG29-1-B2M- | /AltR1/rUrArArUrUrUrCrUrArCrUrGrUrUrGrUrArGrA |
| sgRNA | | sgRNA-B6 | rUrArArGrArArArArArCrGrCrCrUrGrCrCrUrUrCrUr |
| targeting B2M | | | GrC/AltR2/ |
| MG29-1 | 4642 | MG29-1-B2M- | /AltR1/rUrArArUrUrUrCrUrArCrUrGrUrUrGrUrArGrA |
| sgRNA | | sgRNA-C6 | rUrArGrArArArArArCrGrCrCrUrGrCrCrUrUrCrUrGr |
| targeting B2M | | | CrG/AltR2/ |
| MG29-1 | 4643 | MG29-1-B2M- | /AltR1/rUrArArUrUrUrCrUrArCrUrGrUrUrGrUrArGrA |
| sgRNA | | sgRNA-D6 | rUrCrGrUrArCrArGrArGrGrGrCrUrUrCrCrUrCrUrUr |
| targeting B2M | | | UrG/AltR2/ |
| MG29-1 | 4644 | MG29-1-B2M- | /AltR1/rUrArArUrUrUrCrUrArCrUrGrUrUrGrUrArGrA |
| sgRNA | | sgRNA-E6 | rUrGrUrArCrArGrArGrGrGrCrUrUrCrCrUrCrUrUrUr |
| targeting B2M | | | GrG/AltR2/ |
| MG29-1 | 4645 | MG29-1-B2M- | /AltR1/rUrArArUrUrUrCrUrArCrUrGrUrUrGrUrArGrA |
| sgRNA | | sgRNA-F6 | rUrGrCrUrCrUrUrUrGrCrCrUrGrGrUrUrGrUrUrUrCr |
| targeting B2M | | | CrA/AltR2/ |
| MG29-1 | 4646 | MG29-1-B2M- | /AltR1/rUrArArUrUrUrCrUrArCrUrGrUrUrGrUrArGrA |
| sgRNA | | sgRNA-G6 | rUrCrCrUrGrGrUrUrGrUrUrUrCrCrArArGrArUrGrUr |
| targeting B2M | | | ArC/AltR2/ |
| MG29-1 | 4647 | MG29-1-B2M- | /AltR1/rUrArArUrUrUrCrUrArCrUrGrUrUrGrUrArGrA |
| sgRNA | | sgRNA-H6 | rUrCrArArGrArUrGrUrArCrUrGrUrGrCrCrUrCrUrUr |
| targeting B2M | | | ArC/AltR2/ |
| MG29-1 | 4648 | MG29-1-B2M- | /AltR1/rUrArArUrUrUrCrUrArCrUrGrUrUrGrUrArGrA |
| sgRNA | | sgRNA-A7 | rUrCrArArArArCrCrGrArArArGrUrArArGrArGrGrCr |
| targeting B2M | | | ArC/AltR2/ |
| MG29-1 | 4649 | MG29-1-B2M- | /AltR1/rUrArArUrUrUrCrUrArCrUrGrUrUrGrUrArGrA |
| sgRNA | | sgRNA-B7 | rUrArArArArCrCrGrArArArGrUrArArGrArGrGrCrAr |
| targeting B2M | | | CrA/AltR2/ |
| MG29-1 | 4650 | MG29-1-B2M- | /AltR1/rUrArArUrUrUrCrUrArCrUrGrUrUrGrUrArGrA |
| sgRNA | | sgRNA-C7 | rUrCrUrCrUrGrGrArGrArArUrCrUrCrArCrGrCrArGr |
| targeting B2M | | | ArA/AltR2/ |
| MG29-1 | 4651 | MG29-1-B2M- | /AltR1/rUrArArUrUrUrCrUrArCrUrGrUrUrGrUrArGrA |
| sgRNA | | sgRNA-D7 | rUrUrCrUrUrArArArArArArArArArUrGrCrArCrGrAr |
| targeting B2M | | | ArU/AltR2/ |
| MG29-1 | 4652 | MG29-1-B2M- | /AltR1/rUrArArUrUrUrCrUrArCrUrGrUrUrGrUrArGrA |
| sgRNA | | sgRNA-E7 | rUrCrUrUrArArArArArArArArArUrGrCrArCrGrArAr |
| targeting B2M | | | UrU/AltR2/ |
| MG29-1 | 4653 | MG29-1-B2M- | /AltR1/rUrArArUrUrUrCrUrArCrUrGrUrUrGrUrArGrA |
| sgRNA | | sgRNA-F7 | rUrUrUrArArArArArArArArArUrGrCrArCrGrArArUr |
| targeting B2M | | | UrA/AltR2/ |
| MG29-1 | 4654 | MG29-1-B2M- | /AltR1/rUrArArUrUrUrCrUrArCrUrGrUrUrGrUrArGrA |
| sgRNA | | sgRNA-G7 | rUrUrUrCrUrUrCrArArArArUrGrGrArGrGrUrGrGrCr |
| targeting B2M | | | UrU/AltR2/ |
| MG29-1 | 4655 | MG29-1-B2M- | /AltR1/rUrArArUrUrUrCrUrArCrUrGrUrUrGrUrArGrA |
| sgRNA | | sgRNA-H7 | rUrGrCrCrArGrArGrUrGrGrArArArUrGrGrArArUrUr |
| targeting B2M | | | GrG/AltR2/ |
| MG29-1 | 4656 | MG29-1-B2M- | /AltR1/rUrArArUrUrUrCrUrArCrUrGrUrUrGrUrArGrA |
| sgRNA | | sgRNA-A8 | rUrGrArGrUrArCrCrUrGrArGrGrArArUrArUrCrGrGr |
| targeting B2M | | | GrA/AltR2/ |
| MG29-1 | 4657 | MG29-1-B2M- | /AltR1/rUrArArUrUrUrCrUrArCrUrGrUrUrGrUrArGrA |
| sgRNA | | sgRNA-B8 | rUrArCrUrUrGrGrGrGrCrUrArArCrUrUrGrGrUrGrUr |
| targeting B2M | | | CrA/AltR2/ |
| MG29-1 | 4658 | MG29-1-B2M- | /AltR1/rUrArArUrUrUrCrUrArCrUrGrUrUrGrUrArGrA |
| sgRNA | | sgRNA-C8 | rUrCrArUrUrUrGrGrUrCrArUrCrGrArUrUrUrCrUrCr |
| targeting B2M | | | CrC/AltR2/ |
| MG29-1 | 4659 | MG29-1-B2M- | /AltR1/rUrArArUrUrUrCrUrArCrUrGrUrUrGrUrArGrA |
| sgRNA | | sgRNA-D8 | rUrGrUrCrArUrCrGrArUrUrUrCrUrCrCrCrArArUrUr |
| targeting B2M | | | CrC/AltR2/ |
| MG29-1 | 4660 | MG29-1-B2M- | /AltR1/rUrArArUrUrUrCrUrArCrUrGrUrUrGrUrArGrA |
| sgRNA | | sgRNA-E8 | rUrUrCrCrCrArArUrUrCrCrArUrUrUrCrCrArCrUrCr |
| targeting B2M | | | UrG/AltR2/ |
| MG29-1 | 4661 | MG29-1-B2M- | /AltR1/rUrArArUrUrUrCrUrArCrUrGrUrUrGrUrArGrA |
| sgRNA | | sgRNA-F8 | rUrCrArCrUrCrUrGrGrCrCrArArArUrGrArGrCrUrUr |
| targeting B2M | | | CrC/AltR2/ |
| MG29-1 | 4662 | MG29-1-B2M- | /AltR1/rUrArArUrUrUrCrUrArCrUrGrUrUrGrUrArGrA |
| sgRNA | | sgRNA-G8 | rUrGrArArGrArArUrArArArCrCrGrUrGrArCrUrUrGr |
| targeting B2M | | | GrU/AltR2/ |
| MG29-1 | 4663 | MG29-1-B2M- | /AltR1/rUrArArUrUrUrCrUrArCrUrGrUrUrGrUrArGrA |
| sgRNA | | sgRNA-H8 | rUrArArGrArArUrArArArCrCrGrUrGrArCrUrUrGrGr |
| targeting B2M | | | UrA/AltR2/ |
| MG29-1 | 4664 | MG29-1-B2M- | /AltR1/rUrArArUrUrUrCrUrArCrUrGrUrUrGrUrArGrA |
| sgRNA | | sgRNA-A9 | rUrCrCrUrCrArUrArArUrUrCrCrUrCrUrArUrArCrAr |
| targeting B2M | | | UrG/AltR2/ |
| MG29-1 | 4665 | MG29-1-B2M- | /AltR1/rUrArArUrUrUrCrUrArCrUrGrUrUrGrUrArGrA |
| sgRNA | | sgRNA-B9 | rUrUrUrGrUrUrUrUrUrUrUrUrCrUrArGrCrArGrArUr |
| targeting B2M | | | UrU/AltR2/ |
| MG29-1 | 4666 | MG29-1-B2M- | /AltR1/rUrArArUrUrUrCrUrArCrUrGrUrUrGrUrArGrA |
| sgRNA | | sgRNA-C9 | rUrUrGrUrUrUrUrUrUrUrUrCrUrArGrCrArGrArUrUr |
| targeting B2M | | | UrC/AltR2/ |
| MG29-1 | 4667 | MG29-1-B2M- | /AltR1/rUrArArUrUrUrCrUrArCrUrGrUrUrGrUrArGrA |
| sgRNA | | sgRNA-D9 | rUrGrUrUrUrUrUrUrUrUrCrUrArGrCrArGrArUrUrUr |
| targeting B2M | | | CrU/AltR2/ |
| MG29-1 | 4668 | MG29-1-B2M- | /AltR1/rUrArArUrUrUrCrUrArCrUrGrUrUrGrUrArGrA |
| sgRNA | | sgRNA-E9 | rUrUrUrUrUrUrUrUrUrCrUrArGrCrArGrArUrUrUrCr |
| targeting B2M | | | UrA/AltR2/ |
| MG29-1 | 4669 | MG29-1-B2M- | /AltR1/rUrArArUrUrUrCrUrArCrUrGrUrUrGrUrArGrA |
| sgRNA | | sgRNA-F9 | rUrUrUrUrUrCrUrArGrCrArGrArUrUrUrCrUrArGrCr |
| targeting B2M | | | ArG/AltR2/ |
| MG29-1 | 4670 | MG29-1-B2M- | /AltR1/rUrArArUrUrUrCrUrArCrUrGrUrUrGrUrArGrA |
| sgRNA | | sgRNA-G9 | rUrUrUrUrCrUrArGrCrArGrArUrUrUrCrUrArGrCrAr |
| targeting B2M | | | GrU/AltR2/ |
| MG29-1 | 4671 | MG29-1-B2M- | /AltR1/rUrArArUrUrUrCrUrArCrUrGrUrUrGrUrArGrA |
| sgRNA | | sgRNA-H9 | rUrUrUrCrUrArGrCrArGrArUrUrUrCrUrArGrCrArGr |
| targeting B2M | | | UrA/AltR2/ |
| MG29-1 | 4672 | MG29-1-B2M- | /AltR1/rUrArArUrUrUrCrUrArCrUrGrUrUrGrUrArGrA |
| sgRNA | | sgRNA-A10 | rUrUrCrUrArGrCrArGrArUrUrUrCrUrArGrCrArGrUr |
| targeting B2M | | | ArU/AltR2/ |
| MG29-1 | 4673 | MG29-1-B2M- | /AltR1/rUrArArUrUrUrCrUrArCrUrGrUrUrGrUrArGrA |
| sgRNA | | sgRNA-B10 | rUrCrUrArGrCrArGrArUrUrUrCrUrArGrCrArGrUrAr |
| targeting B2M | | | UrC/AltR2/ |
| MG29-1 | 4674 | MG29-1-B2M- | /AltR1/rUrArArUrUrUrCrUrArCrUrGrUrUrGrUrArGrA |
| sgRNA | | sgRNA-C10 | rUrUrArGrCrArGrArUrUrUrCrUrArGrCrArGrUrArUr |
| targeting B2M | | | CrU/AltR2/ |
| MG29-1 | 4675 | MG29-1-B2M- | /AltR1/rUrArArUrUrUrCrUrArCrUrGrUrUrGrUrArGrA |
| sgRNA | | sgRNA-D10 | rUrUrArGrCrArGrUrArUrCrUrUrCrUrGrUrCrArCrUr |
| targeting B2M | | | GrG/AltR2/ |
| DNA sequence | 4676 | MG29-1-B2M- | TGGCCTGGAGGCTATCCAGCGT |
| of B2M target | | target site-A1 | |
| site | | | |
| DNA sequence | 4677 | MG29-1-B2M- | CCCGATATTCCTCAGGTACTCC |
| of B2M target | | target site-B1 | |
| site | | | |
| DNA sequence | 4678 | MG29-1-B2M- | CCGATATTCCTCAGGTACTCCA |
| of B2M target | | target site-C1 | |
| site | | | |
| DNA sequence | 4679 | MG29-1-B2M- | CTCACGTCATCCAGCAGAGAAT |
| of B2M target | | target site-D1 | |
| site | | | |
| DNA sequence | 4680 | MG29-1-B2M- | CTGAATTGCTATGTGTCTGGGT |
| of B2M target | | target site-E1 | |
| site | | | |
| DNA sequence | 4681 | MG29-1-B2M- | ATCCATCCGACATTGAAGTTGA |
| of B2M target | | target site-F1 | |
| site | | | |
| DNA sequence | 4682 | MG29-1-B2M- | AGCAAGGACTGGTCTTTCTATC |
| of B2M target | | target site-G1 | |
| site | | | |
| DNA sequence | 4683 | MG29-1-B2M- | TATCTCTTGTACTACACTGAAT |
| of B2M target | | target site-H1 | |
| site | | | |
| DNA sequence | 4684 | MG29-1-B2M- | TCACAGCCCAAGATAGTTAAGT |
| of B2M target | | target site-A2 | |
| site | | | |
| DNA sequence | 4685 | MG29-1-B2M- | TCAGTGGGGGTGAATTCAGTGT |
| of B2M target | | target site-B2 | |
| site | | | |
| DNA sequence | 4686 | MG29-1-B2M- | CAGTGGGGGTGAATTCAGTGTA |
| of B2M target | | target site-C2 | |
| site | | | |
| DNA sequence | 4687 | MG29-1-B2M- | AGTGGGGGTGAATTCAGTGTAG |
| of B2M target | | target site-D2 | |
| site | | | |
| DNA sequence | 4688 | MG29-1-B2M- | TCAATTCTCTCTCCATTCTTCA |
| of B2M target | | target site-E2 | |
| site | | | |
| DNA sequence | 4689 | MG29-1-B2M- | CAATTCTCTCTCCATTCTTCAG |
| of B2M target | | target site-F2 | |
| site | | | |
| DNA sequence | 4690 | MG29-1-B2M- | AATTCTCTCTCCATTCTTCAGT |
| of B2M target | | target site-G2 | |
| site | | | |
| DNA sequence | 4691 | MG29-1-B2M- | ACTTTCCATTCTCTGCTGGATG |
| of B2M target | | target site-H2 | |
| site | | | |
| DNA sequence | 4692 | MG29-1-B2M- | CATTCTCTGCTGGATGACGTGA |
| of B2M target | | target site-A3 | |
| site | | | |
| DNA sequence | 4693 | MG29-1-B2M- | TCTCCACTGTCTTTTTCATAGA |
| of B2M target | | target site-B3 | |
| site | | | |
| DNA sequence | 4694 | MG29-1-B2M- | CTCCACTGTCTTTTTCATAGAT |
| of B2M target | | target site-C3 | |
| site | | | |
| DNA sequence | 4695 | MG29-1-B2M- | TCCACTGTCTTTTTCATAGATC |
| of B2M target | | target site-D3 | |
| site | | | |
| DNA sequence | 4696 | MG29-1-B2M- | TCATAGATCGAGACATGTAAGC |
| of B2M target | | target site-E3 | |
| site | | | |
| DNA sequence | 4697 | MG29-1-B2M- | CATAGATCGAGACATGTAAGCA |
| of B2M target | | target site-F3 | |
| site | | | |
| DNA sequence | 4698 | MG29-1-B2M- | TGGCCTGGAGGCTATCCAGCGT |
| of B2M target | | target site-G3 | |
| site | | | |
| DNA sequence | 4699 | MG29-1-B2M- | GGCGGGGAGCAGGGGAGACCTT |
| of B2M target | | target site-H3 | |
| site | | | |
| DNA sequence | 4700 | MG29-1-B2M- | GCCTACGGCGACGGGAGGGTCG |
| of B2M target | | target site-A4 | |
| site | | | |
| DNA sequence | 4701 | MG29-1-B2M- | GGGCGTCGATAAGCGTCAGAGC |
| of B2M target | | target site-B4 | |
| site | | | |
| DNA sequence | 4702 | MG29-1-B2M- | TCTTCCGCTCTTTCGCGGGGCC |
| of B2M target | | target site-C4 | |
| site | | | |
| DNA sequence | 4703 | MG29-1-B2M- | GCGGGGCCTCTGGCTCCCCCAG |
| of B2M target | | target site-D4 | |
| site | | | |
| DNA sequence | 4704 | MG29-1-B2M- | TGAACGCGTGGAGGGGCGCTTG |
| of B2M target | | target site-E4 | |
| site | | | |
| DNA sequence | 4705 | MG29-1-B2M- | CTCCCCACGGTGTGGCCCCACA |
| of B2M target | | target site-F4 | |
| site | | | |
| DNA sequence | 4706 | MG29-1-B2M- | GGACGAGCCTACCCGTCCCCCA |
| of B2M target | | target site-G4 | |
| site | | | |
| DNA sequence | 4707 | MG29-1-B2M- | TCCCGACCCTCCCGTCGCCGTA |
| of B2M target | | target site-H4 | |
| site | | | |
| DNA sequence | 4708 | MG29-1-B2M- | GCGGGAGCGCATGCCTTTTGGC |
| of B2M target | | target site-A5 | |
| site | | | |
| DNA sequence | 4709 | MG29-1-B2M- | CGGGAGCGCATGCCTTTTGGCT |
| of B2M target | | target site-B5 | |
| site | | | |
| DNA sequence | 4710 | MG29-1-B2M- | GGCTGTAATTCGTGCATTTTTT |
| of B2M target | | target site-C5 | |
| site | | | |
| DNA sequence | 4711 | MG29-1-B2M- | GCTGTAATTCGTGCATTTTTTT |
| of B2M target | | target site-D5 | |
| site | | | |
| DNA sequence | 4712 | MG29-1-B2M- | TTTTTAAGAAAAACGCCTGCCT |
| of B2M target | | target site-E5 | |
| site | | | |
| DNA sequence | 4713 | MG29-1-B2M- | TTTTAAGAAAAACGCCTGCCTT |
| of B2M target | | target site-F5 | |
| site | | | |
| DNA sequence | 4714 | MG29-1-B2M- | TTTAAGAAAAACGCCTGCCTTC |
| of B2M target | | target site-G5 | |
| site | | | |
| DNA sequence | 4715 | MG29-1-B2M- | TTAAGAAAAACGCCTGCCTTCT |
| of B2M target | | target site-H5 | |
| site | | | |
| DNA sequence | 4716 | MG29-1-B2M- | TAAGAAAAACGCCTGCCTTCTG |
| of B2M target | | target site-A6 | |
| site | | | |
| DNA sequence | 4717 | MG29-1-B2M- | AAGAAAAACGCCTGCCTTCTGC |
| of B2M target | | target site-B6 | |
| site | | | |
| DNA sequence | 4718 | MG29-1-B2M- | AGAAAAACGCCTGCCTTCTGCG |
| of B2M target | | target site-C6 | |
| site | | | |
| DNA sequence | 4719 | MG29-1-B2M- | CGTACAGAGGGCTTCCTCTTTG |
| of B2M target | | target site-D6 | |
| site | | | |
| DNA sequence | 4720 | MG29-1-B2M- | GTACAGAGGGCTTCCTCTTTGG |
| of B2M target | | target site-E6 | |
| site | | | |
| DNA sequence | 4721 | MG29-1-B2M- | GCTCTTTGCCTGGTTGTTTCCA |
| of B2M target | | target site-F6 | |
| site | | | |
| DNA sequence | 4722 | MG29-1-B2M- | CCTGGTTGTTTCCAAGATGTAC |
| of B2M target | | target site-G6 | |
| site | | | |
| DNA sequence | 4723 | MG29-1-B2M- | CAAGATGTACTGTGCCTCTTAC |
| of B2M target | | target site-H6 | |
| site | | | |
| DNA sequence | 4724 | MG29-1-B2M- | CAAAACCGAAAGTAAGAGGCAC |
| of B2M target | | target site-A7 | |
| site | | | |
| DNA sequence | 4725 | MG29-1-B2M- | AAAACCGAAAGTAAGAGGCACA |
| of B2M target | | target site-B7 | |
| site | | | |
| DNA sequence | 4726 | MG29-1-B2M | CTCTGGAGAATCTCACGCAGAA |
| of B2M target | | target site-C7 | |
| site | | | |
| DNA sequence | 4727 | MG29-1-B2M- | TCTTAAAAAAAAATGCACGAAT |
| of B2M target | | target site-D7 | |
| site | | | |
| DNA sequence | 4728 | MG29-1-B2M- | CTTAAAAAAAAATGCACGAATT |
| of B2M target | | target site-E7 | |
| site | | | |
| DNA sequence | 4729 | MG29-1-B2M- | TTAAAAAAAAATGCACGAATTA |
| of B2M target | | target site-F7 | |
| site | | | |
| DNA sequence | 4730 | MG29-1-B2M- | TTCTTCAAAATGGAGGTGGCTT |
| of B2M target | | target site-G7 | |
| site | | | |
| DNA sequence | 4731 | MG29-1-B2M- | GCCAGAGTGGAAATGGAATTGG |
| of B2M target | | target site-H7 | |
| site | | | |
| DNA sequence | 4732 | MG29-1-B2M- | GAGTACCTGAGGAATATCGGGA |
| of B2M target | | target site-A8 | |
| site | | | |
| DNA sequence | 4733 | MG29-1-B2M- | ACTTGGGGCTAACTTGGTGTCA |
| of B2M target | | target site-B8 | |
| site | | | |
| DNA sequence | 4734 | MG29-1-B2M- | CATTTGGTCATCGATTTCTCCC |
| of B2M target | | target site-C8 | |
| site | | | |
| DNA sequence | 4735 | MG29-1-B2M- | GTCATCGATTTCTCCCAATTCC |
| of B2M target | | target site-D8 | |
| site | | | |
| DNA sequence | 4736 | MG29-1-B2M- | TCCCAATTCCATTTCCACTCTG |
| of B2M target | | target site-E8 | |
| site | | | |
| DNA sequence | 4737 | MG29-1-B2M- | CACTCTGGCCAAATGAGCTTCC |
| of B2M target | | target site-F8 | |
| site | | | |
| DNA sequence | 4738 | MG29-1-B2M- | GAAGAATAAACCGTGACTTGGT |
| of B2M target | | target site-G8 | |
| site | | | |
| DNA sequence | 4739 | MG29-1-B2M- | AAGAATAAACCGTGACTTGGTA |
| of B2M target | | target site-H8 | |
| site | | | |
| DNA sequence | 4740 | MG29-1-B2M- | CCTCATAATTCCTCTATACATG |
| of B2M target | | target site-A9 | |
| site | | | |
| DNA sequence | 4741 | MG29-1-B2M- | TTGTTTTTTTTCTAGCAGATTT |
| of B2M target | | target site-B9 | |
| site | | | |
| DNA sequence | 4742 | MG29-1-B2M- | TGTTTTTTTTCTAGCAGATTTC |
| of B2M target | | target site-C9 | |
| site | | | |
| DNA sequence | 4743 | MG29-1-B2M- | GTTTTTTTTCTAGCAGATTTCT |
| of B2M target | | target site-D9 | |
| site | | | |
| DNA sequence | 4744 | MG29-1-B2M- | TTTTTTTTCTAGCAGATTTCTA |
| of B2M target | | target site-E9 | |
| site | | | |
| DNA sequence | 4745 | MG29-1-B2M- | TTTTCTAGCAGATTTCTAGCAG |
| of B2M target | | target site-F9 | |
| site | | | |
| DNA sequence | 4746 | MG29-1-B2M- | TTTCTAGCAGATTTCTAGCAGT |
| of B2M target | | target site-G9 | |
| site | | | |
| DNA sequence | 4747 | MG29-1-B2M- | TTCTAGCAGATTTCTAGCAGTA |
| of B2M target | | target site-H9 | |
| site | | | |
| DNA sequence | 4748 | MG29-1-B2M- | TCTAGCAGATTTCTAGCAGTAT |
| of B2M target | | target site-A10 | |
| site | | | |
| DNA sequence | 4749 | MG29-1-B2M- | CTAGCAGATTTCTAGCAGTATC |
| of B2M target | | target site-B10 | |
| site | | | |
| DNA sequence | 4750 | MG29-1-B2M- | TAGCAGATTTCTAGCAGTATCT |
| of B2M target | | target site-C10 | |
| site | | | |
| DNA sequence | 4751 | MG29-1-B2M- | TAGCAGTATCTTCTGTCACTGG |
| of B2M target | | target site-D10 | |
| site | | | |

r; native RNA linkage comprising the sugar ribose (for example the ribose or RNA form of the A base is written rA), d; deoxyribose sugar (DNA) linkage (for example a deoxyribose form of the A base is written dA), *; between bases in which one of the oxygen molecules in the phosphodiester bond is replaced with sulfur; AltR1 and AltR2 refer to IDT technologies' proprietary 5′ and 3′ AltR modifications

### Example 16—Gene Editing Outcomes at the DNA Level for CD2

[0503] Primary T cells were purified from PMBCs using a negative selection kit (Miltenyi) according to the manufacturer's recommendations. Nucleofection of MG29-1 RNPs (126 pmol protein/160 pmol guide) (SEQ ID NOs: 4752-4836) was performed into T cells (200,000) using the Lonza 4D electroporator. Cells were harvested and genomic DNA prepared five days post-transfection. PCR primers appropriate for use in NGS-based DNA sequencing were generated, optimized, and used to amplify the individual target sequences for each guide RNA (SEQ ID NOs: 4837-4921). The amplicons were sequenced on an Illumina MiSeq machine and analyzed with a proprietary Python script to measure gene editing (FIG. 62).

TABLE 14E
Sequences of Guide RNAs and Sequences Targeted for Example 42

| | SEQ | | |
|---|---|---|---|
| | ID | | |
| Guide Target | NO | Guide Name | SEQUENCE |
| MG29-1 | 4752 | MG29-1-CD2- | /AltR1/rUrArArUrUrUrCrUrArCrUrGrUrUrGrUrArGrA |
| sgRNA | | sgRNA-A1 | rUrCrArUrGrUrArArArUrUrUrGrUrArGrCrCrArGrCr |
| targeting CD2 | | | UrU/AltR2/ |
| MG29-1 | 4753 | MG29-1-CD2- | /AltR1/rUrArArUrUrUrCrUrArCrUrGrUrUrGrUrArGrA |
| sgRNA | | sgRNA-B1 | rUrUrArGrCrCrArGrCrUrUrCrCrUrUrCrUrGrArUrUr |
| targeting CD2 | | | UrU/AltR2/ |
| MG29-1 | 4754 | MG29-1-CD2- | /AltR1/rUrArArUrUrUrCrUrArCrUrGrUrUrGrUrArGrA |
| sgRNA | | sgRNA-C1 | rUrArCrUrCrUrUrArUrGrCrUrUrArCrCrUrUrUrGrGr |
| targeting CD2 | | | ArA/AltR2/ |
| MG29-1 | 4755 | MG29-1-CD2- | /AltR1/rUrArArUrUrUrCrUrArCrUrGrUrUrGrUrArGrA |
| sgRNA | | sgRNA-D1 | rUrGrArArGrArArArCrArUrUrGrArArArArUrCrArGr |
| targeting CD2 | | | ArA/AltR2/ |
| MG29-1 | 4756 | MG29-1-CD2- | /AltR1/rUrArArUrUrUrCrUrArCrUrGrUrUrGrUrArGrA |
| sgRNA | | sgRNA-E1 | rUrGrCrUrUrUrUrUrArUrArGrGrUrGrCrArGrUrCrUr |
| targeting CD2 | | | CrC/AltR2/ |
| MG29-1 | 4757 | MG29-1-CD2- | /AltR1/rUrArArUrUrUrCrUrArCrUrGrUrUrGrUrArGrA |
| sgRNA | | sgRNA-F1 | rUrCrUrUrUrUrUrArUrArGrGrUrGrCrArGrUrCrUrCr |
| targeting CD2 | | | CrA/AltR2/ |
| MG29-1 | 4758 | MG29-1-CD2- | /AltR1/rUrArArUrUrUrCrUrArCrUrGrUrUrGrUrArGrA |
| sgRNA | | sgRNA-G1 | rUrUrArUrArGrGrUrGrCrArGrUrCrUrCrCrArArArGr |
| targeting CD2 | | | ArG/AltR2/ |
| MG29-1 | 4759 | MG29-1-CD2- | /AltR1/rUrArArUrUrUrCrUrArCrUrGrUrUrGrUrArGrA |
| sgRNA | | sgRNA-H1 | rUrArUrArGrGrUrGrCrArGrUrCrUrCrCrArArArGrAr |
| targeting CD2 | | | GrA/AltR2/ |
| MG29-1 | 4760 | MG29-1-CD2- | /AltR1/rUrArArUrUrUrCrUrArCrUrGrUrUrGrUrArGrA |
| sgRNA | | sgRNA-A2 | rUrUrArGrGrUrGrCrArGrUrCrUrCrCrArArArGrArGr |
| targeting CD2 | | | ArU/AltR2/ |
| MG29-1 | 4761 | MG29-1-CD2- | /AltR1/rUrArArUrUrUrCrUrArCrUrGrUrUrGrUrArGrA |
| sgRNA | | sgRNA-B2 | rUrCrArArArUrGrArGrUrGrArUrGrArUrArUrUrGrAr |
| targeting CD2 | | | CrG/AltR2/ |
| MG29-1 | 4762 | MG29-1-CD2- | /AltR1/rUrArArUrUrUrCrUrArCrUrGrUrUrGrUrArGrA |
| sgRNA | | sgRNA-C2 | rUrArArArUrGrArGrUrGrArUrGrArUrArUrUrGrArCr |
| targeting CD2 | | | GrA/AltR2/ |
| MG29-1 | 4763 | MG29-1-CD2- | /AltR1/rUrArArUrUrUrCrUrArCrUrGrUrUrGrUrArGrA |
| sgRNA | | sgRNA-D2 | rUrArArGrGrArArArArArGrArUrArCrArUrArUrArAr |
| targeting CD2 | | | GrC/AltR2/ |
| MG29-1 | 4764 | MG29-1-CD2- | /AltR1/rUrArArUrUrUrCrUrArCrUrGrUrUrGrUrArGrA |
| sgRNA | | sgRNA-E2 | rUrArArArArUrGrGrArArCrUrCrUrGrArArArArUrUr |
| targeting CD2 | | | ArA/AltR2/ |
| MG29-1 | 4765 | MG29-1-CD2- | /AltR1/rUrArArUrUrUrCrUrArCrUrGrUrUrGrUrArGrA |
| sgRNA | | sgRNA-F2 | rUrUrUrCrCrArArCrArCrArUrUrUrUrUrUrCrCrUrUr |
| targeting CD2 | | | UrU/AltR2/ |
| MG29-1 | 4766 | MG29-1-CD2- | /AltR1/rUrArArUrUrUrCrUrArCrUrGrUrUrGrUrArGrA |
| sgRNA | | sgRNA-G2 | rUrUrCrCrArArCrArCrArUrUrUrUrUrUrCrCrUrUrUr |
| targeting CD2 | | | UrG/AltR2/ |
| MG29-1 | 4767 | MG29-1-CD2- | /AltR1/rUrArArUrUrUrCrUrArCrUrGrUrUrGrUrArGrA |
| sgRNA | | sgRNA-H2 | rUrCrCrArArCrArCrArUrUrUrUrUrUrCrCrUrUrUrUr |
| targeting CD2 | | | GrU/AltR2/ |
| MG29-1 | 4768 | MG29-1-CD2- | /AltR1/rUrArArUrUrUrCrUrArCrUrGrUrUrGrUrArGrA |
| sgRNA | | sgRNA-A3 | rUrCrArArCrArCrArUrUrUrUrUrUrCrCrUrUrUrUrGr |
| targeting CD2 | | | UrA/AltR2/ |
| MG29-1 | 4769 | MG29-1-CD2- | /AltR1/rUrArArUrUrUrCrUrArCrUrGrUrUrGrUrArGrA |
| sgRNA | | sgRNA-B3 | rUrUrUrCrCrUrUrUrUrGrUrArUrCrArUrArUrArUrUr |
| targeting CD2 | | | GrA/AltR2/ |
| MG29-1 | 4770 | MG29-1-CD2- | /AltR1/rUrArArUrUrUrCrUrArCrUrGrUrUrGrUrArGrA |
| sgRNA | | sgRNA-C3 | rUrUrCrCrUrUrUrUrGrUrArUrCrArUrArUrArUrUrGr |
| targeting CD2 | | | ArU/AltR2/ |
| MG29-1 | 4771 | MG29-1-CD2- | /AltR1/rUrArArUrUrUrCrUrArCrUrGrUrUrGrUrArGrA |
| sgRNA | | sgRNA-D3 | rUrCrCrUrUrUrUrGrUrArUrCrArUrArUrArUrUrGrAr |
| targeting CD2 | | | UrA/AltR2/ |
| MG29-1 | 4772 | MG29-1-CD2- | /AltR1/rUrArArUrUrUrCrUrArCrUrGrUrUrGrUrArGrA |
| sgRNA | | sgRNA-E3 | rUrCrUrUrUrUrGrUrArUrCrArUrArUrArUrUrGrArUr |
| targeting CD2 | | | ArC/AltR2/ |
| MG29-1 | 4773 | MG29-1-CD2- | /AltR1/rUrArArUrUrUrCrUrArCrUrGrUrUrGrUrArGrA |
| sgRNA | | sgRNA-F3 | rUrGrUrArUrCrArUrArUrArUrUrGrArUrArCrCrUrUr |
| targeting CD2 | | | GrU/AltR2/ |
| MG29-1 | 4774 | MG29-1-CD2- | /AltR1/rUrArArUrUrUrCrUrArCrUrGrUrUrGrUrArGrA |
| sgRNA | | sgRNA-G3 | rUrUrArUrCrArUrArUrArUrUrGrArUrArCrCrUrUrGr |
| targeting CD2 | | | UrA/AltR2/ |
| MG29-1 | 4775 | MG29-1-CD2- | /AltR1/rUrArArUrUrUrCrUrArCrUrGrUrUrGrUrArGrA |
| sgRNA | | sgRNA-H3 | rUrCrArGrArGrUrUrCrCrArUrUrUrUrUrArArArUrAr |
| targeting CD2 | | | GrC/AltR2/ |
| MG29-1 | 4776 | MG29-1-CD2- | /AltR1/rUrArArUrUrUrCrUrArCrUrGrUrUrGrUrArGrA |
| sgRNA | | sgRNA-A4 | rUrArGrArGrUrUrCrCrArUrUrUrUrUrArArArUrArGr |
| targeting CD2 | | | CrU/AltR2/ |
| MG29-1 | 4777 | MG29-1-CD2- | /AltR1/rUrArArUrUrUrCrUrArCrUrGrUrUrGrUrArGrA |
| sgRNA | | sgRNA-B4 | rUrUrArArArUrArGrCrUrUrArUrArUrGrUrArUrCrUr |
| targeting CD2 | | | UrU/AltR2/ |
| MG29-1 | 4778 | MG29-1-CD2- | /AltR1/rUrArArUrUrUrCrUrArCrUrGrUrUrGrUrArGrA |
| sgRNA | | sgRNA-C4 | rUrArArArUrArGrCrUrUrArUrArUrGrUrArUrCrUrUr |
| targeting CD2 | | | UrU/AltR2/ |
| MG29-1 | 4779 | MG29-1-CD2- | /AltR1/rUrArArUrUrUrCrUrArCrUrGrUrUrGrUrArGrA |
| sgRNA | | sgRNA-D4 | rUrArArUrArGrCrUrUrArUrArUrGrUrArUrCrUrUrUr |
| targeting CD2 | | | UrU/AltR2/ |
| MG29-1 | 4780 | MG29-1-CD2- | /AltR1/rUrArArUrUrUrCrUrArCrUrGrUrUrGrUrArGrA |
| sgRNA | | sgRNA-E4 | rUrUrCrCrUrUrGrArArArGrUrCrUrCrUrUrUrCrUrCr |
| targeting CD2 | | | UrU/AltR2/ |
| MG29-1 | 4781 | MG29-1-CD2- | /AltR1/rUrArArUrUrUrCrUrArCrUrGrUrUrGrUrArGrA |
| sgRNA | | sgRNA-F4 | rUrCrCrUrUrGrArArArGrUrCrUrCrUrUrUrCrUrCrUr |
| targeting CD2 | | | UrU/AltR2/ |
| MG29-1 | 4782 | MG29-1-CD2- | /AltR1/rUrArArUrUrUrCrUrArCrUrGrUrUrGrUrArGrA |
| sgRNA | | sgRNA-G4 | rUrCrUrUrGrArArArGrUrCrUrCrUrUrUrCrUrCrUrUr |
| targeting CD2 | | | UrU/AltR2/ |
| MG29-1 | 4783 | MG29-1-CD2- | /AltR1/rUrArArUrUrUrCrUrArCrUrGrUrUrGrUrArGrA |
| sgRNA | | sgRNA-H4 | rUrUrCrUrUrUrUrCrUrGrArArUrUrGrUrGrCrArArUr |
| targeting CD2 | | | CrU/AltR2/ |
| MG29-1 | 4784 | MG29-1-CD2- | /AltR1/rUrArArUrUrUrCrUrArCrUrGrUrUrGrUrArGrA |
| sgRNA | | sgRNA-A5 | rUrCrUrGrArArUrUrGrUrGrCrArArUrCrUrUrUrUrUr |
| targeting CD2 | | | CrU/AltR2/ |
| MG29-1 | 4785 | MG29-1-CD2- | /AltR1/rUrArArUrUrUrCrUrArCrUrGrUrUrGrUrArGrA |
| sgRNA | | sgRNA-B5 | rUrUrGrArArUrUrGrUrGrCrArArUrCrUrUrUrUrUrCr |
| targeting CD2 | | | UrU/AltR2/ |
| MG29-1 | 4786 | MG29-1-CD2- | /AltR1/rUrArArUrUrUrCrUrArCrUrGrUrUrGrUrArGrA |
| sgRNA | | sgRNA-C5 | rUrUrCrUrUrGrUrCrUrGrArArGrUrUrUrUrUrUrCrCr |
| targeting CD2 | | | CrA/AltR2/ |
| MG29-1 | 4787 | MG29-1-CD2- | /AltR1/rUrArArUrUrUrCrUrArCrUrGrUrUrGrUrArGrA |
| sgRNA | | sgRNA-D5 | rUrCrUrUrGrUrCrUrGrArArGrUrUrUrUrUrUrCrCrCr |
| targeting CD2 | | | ArU/AltR2/ |
| MG29-1 | 4788 | MG29-1-CD2- | /AltR1/rUrArArUrUrUrCrUrArCrUrGrUrUrGrUrArGrA |
| sgRNA | | sgRNA-E5 | rUrUrUrGrUrCrUrGrArArGrUrUrUrUrUrUrCrCrCrAr |
| targeting CD2 | | | UrU/AltR2/ |
| MG29-1 | 4789 | MG29-1-CD2- | /AltR1/rUrArArUrUrUrCrUrArCrUrGrUrUrGrUrArGrA |
| sgRNA | | sgRNA-F5 | rUrUrUrCrCrCrArUrUrUrUrArUrArUrCrGrUrCrArAr |
| targeting CD2 | | | UrA/AltR2/ |
| MG29-1 | 4790 | MG29-1-CD2- | /AltR1/rUrArArUrUrUrCrUrArCrUrGrUrUrGrUrArGrA |
| sgRNA | | sgRNA-G5 | rUrUrCrCrCrArUrUrUrUrArUrArUrCrGrUrCrArArUr |
| targeting CD2 | | | ArU/AltR2/ |
| MG29-1 | 4791 | MG29-1-CD2- | /AltR1/rUrArArUrUrUrCrUrArCrUrGrUrUrGrUrArGrA |
| sgRNA | | sgRNA-H5 | rUrCrCrCrArUrUrUrUrArUrArUrCrGrUrCrArArUrAr |
| targeting CD2 | | | UrC/AltR2/ |
| MG29-1 | 4792 | MG29-1-CD2- | /AltR1/rUrArArUrUrUrCrUrArCrUrGrUrUrGrUrArGrA |
| sgRNA | | sgRNA-A6 | rUrCrCrArUrUrUrUrArUrArUrCrGrUrCrArArUrArUr |
| targeting CD2 | | | CrA/AltR2/ |
| MG29-1 | 4793 | MG29-1-CD2- | /AltR1/rUrArArUrUrUrCrUrArCrUrGrUrUrGrUrArGrA |
| sgRNA | | sgRNA-B6 | rUrArUrArUrCrGrUrCrArArUrArUrCrArUrCrArCrUr |
| targeting CD2 | | | CrA/AltR2/ |
| MG29-1 | 4794 | MG29-1-CD2- | /AltR1/rUrArArUrUrUrCrUrArCrUrGrUrUrGrUrArGrA |
| sgRNA | | sgRNA-C6 | rUrUrArUrCrGrUrCrArArUrArUrCrArUrCrArCrUrCr |
| targeting CD2 | | | ArU/AltR2/ |
| MG29-1 | 4795 | MG29-1-CD2- | /AltR1/rUrArArUrUrUrCrUrArCrUrGrUrUrGrUrArGrA |
| sgRNA | | sgRNA-D6 | rUrArArArArCrUrArGrGrArArUrGrUrCrCrArArGrUr |
| targeting CD2 | | | UrG/AltR2/ |
| MG29-1 | 4796 | MG29-1-CD2- | /AltR1/rUrArArUrUrUrCrUrArCrUrGrUrUrGrUrArGrA |
| sgRNA | | sgRNA-E6 | rUrCrArArGrGrCrArUrUrCrGrUrArArUrCrUrCrUrUr |
| targeting CD2 | | | UrG/AltR2/ |
| MG29-1 | 4797 | MG29-1-CD2- | /AltR1/rUrArArUrUrUrCrUrArCrUrGrUrUrGrUrArGrA |
| sgRNA | | sgRNA-F6 | rUrCrUrUrUrCrUrUrUrUrUrArGrArGrArGrGrGrUrCr |
| targeting CD2 | | | UrC/AltR2/ |
| MG29-1 | 4798 | MG29-1-CD2- | /AltR1/rUrArArUrUrUrCrUrArCrUrGrUrUrGrUrArGrA |
| sgRNA | | sgRNA-G6 | rUrUrUrUrUrUrArGrArGrArGrGrGrUrCrUrCrArArAr |
| targeting CD2 | | | ArC/AltR2/ |
| MG29-1 | 4799 | MG29-1-CD2- | /AltR1/rUrArArUrUrUrCrUrArCrUrGrUrUrGrUrArGrA |
| sgRNA | | sgRNA-H6 | rUrUrArGrArGrArGrGrGrUrCrUrCrArArArArCrCrAr |
| targeting CD2 | | | ArA/AltR2/ |
| MG29-1 | 4800 | MG29-1-CD2- | /AltR1/rUrArArUrUrUrCrUrArCrUrGrUrUrGrUrArGrA |
| sgRNA | | sgRNA-A7 | rUrArGrArGrArGrGrGrUrCrUrCrArArArArCrCrArAr |
| targeting CD2 | | | ArG/AltR2/ |
| MG29-1 | 4801 | MG29-1-CD2- | /AltR1/rUrArArUrUrUrCrUrArCrUrGrUrUrGrUrArGrA |
| sgRNA | | sgRNA-B7 | rUrGrArGrArGrGrGrUrCrUrCrArArArArCrCrArArAr |
| targeting CD2 | | | GrA/AltR2/ |
| MG29-1 | 4802 | MG29-1-CD2- | /AltR1/rUrArArUrUrUrCrUrArCrUrGrUrUrGrUrArGrA |
| sgRNA | | sgRNA-C7 | rUrUrCrArGrArGrGrGrUrCrArUrCrArCrArCrArCrAr |
| targeting CD2 | | | ArG/AltR2/ |
| MG29-1 | 4803 | MG29-1-CD2- | /AltR1/rUrArArUrUrUrCrUrArCrUrGrUrUrGrUrArGrA |
| sgRNA | | sgRNA-D7 | rUrUrUrCrCrCrUrGrCrUrGrUrGrCrArCrUrUrGrArAr |
| targeting CD2 | | | UrU/AltR2/ |
| MG29-1 | 4804 | MG29-1-CD2- | /AltR1/rUrArArUrUrUrCrUrArCrUrGrUrUrGrUrArGrA |
| sgRNA | | sgRNA-E7 | rUrGrCrArCrUrCrArGrGrCrUrGrGrUrGrGrUrCrCrAr |
| targeting CD2 | | | CrU/AltR2/ |
| MG29-1 | 4805 | MG29-1-CD2- | /AltR1/rUrArArUrUrUrCrUrArCrUrGrUrUrGrUrArGrA |
| sgRNA | | sgRNA-F7 | rUrCrArCrUrCrArGrGrCrUrGrGrUrGrGrUrCrCrArCr |
| targeting CD2 | | | UrU/AltR2/ |
| MG29-1 | 4806 | MG29-1-CD2- | /AltR1/rUrArArUrUrUrCrUrArCrUrGrUrUrGrUrArGrA |
| sgRNA | | sgRNA-G7 | rUrArGrArUrGrUrUrUrCrCrCrArUrCrUrUrGrArUrAr |
| targeting CD2 | | | CrA/AltR2/ |
| MG29-1 | 4807 | MG29-1-CD2- | /AltR1/rUrArArUrUrUrCrUrArCrUrGrUrUrGrUrArGrA |
| sgRNA | | sgRNA-H7 | rUrGrArUrGrUrUrUrCrCrCrArUrCrUrUrGrArUrArCr |
| targeting CD2 | | | ArG/AltR2/ |
| MG29-1 | 4808 | MG29-1-CD2- | /AltR1/rUrArArUrUrUrCrUrArCrUrGrUrUrGrUrArGrA |
| sgRNA | | sgRNA-A8 | rUrCrCrArUrCrUrUrGrArUrArCrArGrGrUrUrUrArAr |
| targeting CD2 | | | UrU/AltR2/ |
| MG29-1 | 4809 | MG29-1-CD2- | /AltR1/rUrArArUrUrUrCrUrArCrUrGrUrUrGrUrArGrA |
| sgRNA | | sgRNA-B8 | rUrArUrUrCrGrGrGrGrUrCrArGrUrUrCrCrArUrUrCr |
| targeting CD2 | | | ArU/AltR2/ |
| MG29-1 | 4810 | MG29-1-CD2- | /AltR1/rUrArArUrUrUrCrUrArCrUrGrUrUrGrUrArGrA |
| sgRNA | | sgRNA-C8 | rUrGrCrArGrArGrArArArGrGrUrCrUrGrGrArCrArUr |
| targeting CD2 | | | CrU/AltR2/ |
| MG29-1 | 4811 | MG29-1-CD2- | /AltR1/rUrArArUrUrUrCrUrArCrUrGrUrUrGrUrArGrA |
| sgRNA | | sgRNA-D8 | rUrCrArGrArGrArArArGrGrUrCrUrGrGrArCrArUrCr |
| targeting CD2 | | | UrA/AltR2/ |
| MG29-1 | 4812 | MG29-1-CD2- | /AltR1/rUrArArUrUrUrCrUrArCrUrGrUrUrGrUrArGrA |
| sgRNA | | sgRNA-E8 | rUrUrGrGrCrArCrUrGrCrUrCrGrUrUrUrUrCrUrArUr |
| targeting CD2 | | | ArU/AltR2/ |
| MG29-1 | 4813 | MG29-1-CD2- | /AltR1/rUrArArUrUrUrCrUrArCrUrGrUrUrGrUrArGrA |
| sgRNA | | sgRNA-F8 | rUrCrUrArUrArUrCrArCrCrArArArArGrGrArArArAr |
| targeting CD2 | | | ArA/AltR2/ |
| MG29-1 | 4814 | MG29-1-CD2- | /AltR1/rUrArArUrUrUrCrUrArCrUrGrUrUrGrUrArGrA |
| sgRNA | | sgRNA-G8 | rUrUrArUrArUrCrArCrCrArArArArGrGrArArArArAr |
| targeting CD2 | | | ArC/AltR2/ |
| MG29-1 | 4815 | MG29-1-CD2- | /AltR1/rUrArArUrUrUrCrUrArCrUrGrUrUrGrUrArGrA |
| sgRNA | | sgRNA-H8 | rUrUrCrCrGrArCrUrCrCrUrCrUrGrUrUrUrUrUrUrCr |
| targeting CD2 | | | CrU/AltR2/ |
| MG29-1 | 4816 | MG29-1-CD2- | /AltR1/rUrArArUrUrUrCrUrArCrUrGrUrUrGrUrArGrA |
| sgRNA | | sgRNA-A9 | rUrUrUrCrCrUrUrUrUrGrGrUrGrArUrArUrArGrArAr |
| targeting CD2 | | | ArA/AltR2/ |
| MG29-1 | 4817 | MG29-1-CD2- | /AltR1/rUrArArUrUrUrCrUrArCrUrGrUrUrGrUrArGrA |
| sgRNA | | sgRNA-B9 | rUrUrCrCrUrUrUrUrGrGrUrGrArUrArUrArGrArArAr |
| targeting CD2 | | | ArC/AltR2/ |
| MG29-1 | 4818 | MG29-1-CD2- | /AltR1/rUrArArUrUrUrCrUrArCrUrGrUrUrGrUrArGrA |
| sgRNA | | sgRNA-C9 | rUrCrCrUrUrUrUrGrGrUrGrArUrArUrArGrArArArAr |
| targeting CD2 | | | CrG/AltR2/ |
| MG29-1 | 4819 | MG29-1-CD2- | /AltR1/rUrArArUrUrUrCrUrArCrUrGrUrUrGrUrArGrA |
| sgRNA | | sgRNA-D9 | rUrCrUrUrUrUrGrGrUrGrArUrArUrArGrArArArArCr |
| targeting CD2 | | | GrA/AltR2/ |
| MG29-1 | 4820 | MG29-1-CD2- | /AltR1/rUrArArUrUrUrCrUrArCrUrGrUrUrGrUrArGrA |
| sgRNA | | sgRNA-E9 | rUrGrGrUrGrArUrArUrArGrArArArArCrGrArGrCrAr |
| targeting CD2 | | | GrU/AltR2/ |
| MG29-1 | 4821 | MG29-1-CD2- | /AltR1/rUrArArUrUrUrCrUrArCrUrGrUrUrGrUrArGrA |
| sgRNA | | sgRNA-F9 | rUrGrUrGrArUrArUrArGrArArArArCrGrArGrCrArGr |
| targeting CD2 | | | UrG/AltR2/ |
| MG29-1 | 4822 | MG29-1-CD2- | /AltR1/rUrArArUrUrUrCrUrArCrUrGrUrUrGrUrArGrA |
| sgRNA | | sgRNA-G9 | rUrUrCrUrGrCrArArArArGrGrArArGrArGrArArGrUr |
| targeting CD2 | | | GrG/AltR2/ |
| MG29-1 | 4823 | MG29-1-CD2- | /AltR1/rUrArArUrUrUrCrUrArCrUrGrUrUrGrUrArGrA |
| sgRNA | | sgRNA-H9 | rUrGrUrUrGrUrUrGrCrArGrArUrGrArGrGrArGrCrUr |
| targeting CD2 | | | GrG/AltR2/ |
| MG29-1 | 4824 | MG29-1-CD2- | /AltR1/rUrArArUrUrUrCrUrArCrUrGrUrUrGrUrArGrA |
| sgRNA | | sgRNA-A10 | rUrUrUrGrUrUrGrCrArGrArUrGrArGrGrArGrCrUrGr |
| targeting CD2 | | | GrA/AltR2/ |
| MG29-1 | 4825 | MG29-1-CD2- | /AltR1/rUrArArUrUrUrCrUrArCrUrGrUrUrGrUrArGrA |
| sgRNA | | sgRNA-B10 | rUrUrArUrCrUrUrUrUrUrUrArArUrUrArGrArGrGrAr |
| targeting CD2 | | | ArG/AltR2/ |
| MG29-1 | 4826 | MG29-1-CD2- | /AltR1/rUrArArUrUrUrCrUrArCrUrGrUrUrGrUrArGrA |
| sgRNA | | sgRNA-C10 | rUrUrUrArArUrUrArGrArGrGrArArGrGrGrGrArCrAr |
| targeting CD2 | | | ArU/AltR2/ |
| MG29-1 | 4827 | MG29-1-CD2- | /AltR1/rUrArArUrUrUrCrUrArCrUrGrUrUrGrUrArGrA |
| sgRNA | | sgRNA-D10 | rUrUrArArUrUrArGrArGrGrArArGrGrGrGrArCrArAr |
| targeting CD2 | | | UrG/AltR2/ |
| MG29-1 | 4828 | MG29-1-CD2- | /AltR1/rUrArArUrUrUrCrUrArCrUrGrUrUrGrUrArGrA |
| sgRNA | | sgRNA-E10 | rUrArArUrUrArGrArGrGrArArGrGrGrGrArCrArArUr |
| targeting CD2 | | | GrA/AltR2/ |
| MG29-1 | 4829 | MG29-1-CD2- | /AltR1/rUrArArUrUrUrCrUrArCrUrGrUrUrGrUrArGrA |
| sgRNA | | sgRNA-F10 | rUrArUrUrArGrArGrGrArArGrGrGrGrArCrArArUrGr |
| targeting CD2 | | | ArG/AltR2/ |
| MG29-1 | 4830 | MG29-1-CD2- | /AltR1/rUrArArUrUrUrCrUrArCrUrGrUrUrGrUrArGrA |
| sgRNA | | sgRNA-G10 | rUrCrUrGrCrUrGrCrCrCrCrArUrGrGrGrGrArGrGrUr |
| targeting CD2 | | | UrU/AltR2/ |
| MG29-1 | 4831 | MG29-1-CD2- | /AltR1/rUrArArUrUrUrCrUrArCrUrGrUrUrGrUrArGrA |
| sgRNA | | sgRNA-H10 | rUrUrGrCrUrGrCrCrCrCrArUrGrGrGrGrArGrGrUrUr |
| targeting CD2 | | | UrU/AltR2/ |
| MG29-1 | 4832 | MG29-1-CD2- | /AltR1/rUrArArUrUrUrCrUrArCrUrGrUrUrGrUrArGrA |
| sgRNA | | sgRNA-A11 | rUrGrGrCrUrGrArArCrUrCrGrArGrGrUrCrUrGrGrGr |
| targeting CD2 | | | GrA/AltR2/ |
| MG29-1 | 4833 | MG29-1-CD2- | /AltR1/rUrArArUrUrUrCrUrArCrUrGrUrUrGrUrArGrA |
| sgRNA | | sgRNA-B11 | rUrGrCrUrGrArArCrUrCrGrArGrGrUrCrUrGrGrGrGr |
| targeting CD2 | | | ArG/AltR2/ |
| MG29-1 | 4834 | MG29-1-CD2- | /AltR1/rUrArArUrUrUrCrUrArCrUrGrUrUrGrUrArGrA |
| sgRNA | | sgRNA-C11 | rUrUrGrCrUrGrGrUrGrArArCrUrUrGrUrGrUrGrCrCr |
| targeting CD2 | | | CrG/AltR2/ |
| MG29-1 | 4835 | MG29-1-CD2- | /AltR1/rUrArArUrUrUrCrUrArCrUrGrUrUrGrUrArGrA |
| sgRNA | | sgRNA-D11 | rUrGrUrGrGrGrGrCrUrUrCrCrGrGrCrCrCrCrUrUrUr |
| targeting CD2 | | | CrU/AltR2/ |
| MG29-1 | 4836 | MG29-1-CD2- | /AltR1/rUrArArUrUrUrCrUrArCrUrGrUrUrGrUrArGrA |
| sgRNA | | sgRNA-E11 | rUrUrUrCrArGrUrArGrCrUrArCrUrCrUrGrUrGrGrGr |
| targeting CD2 | | | CrU/AltR2/ |
| DNA sequence | 4837 | MG29-1-CD2- | CATGTAAATTTGTAGCCAGCTT |
| of CD2 target | | target site-A1 | |
| site | | | |
| DNA sequence | 4838 | MG29-1-CD2- | TAGCCAGCTTCCTTCTGATTTT |
| of CD2 target | | target site-B1 | |
| site | | | |
| DNA sequence | 4839 | MG29-1-CD2- | ACTCTTATGCTTACCTTTGGAA |
| of CD2 target | | target site-C1 | |
| site | | | |
| DNA sequence | 4840 | MG29-1-CD2- | GAAGAAACATTGAAAATCAGAA |
| of CD2 target | | target site-D1 | |
| site | | | |
| DNA sequence | 4841 | MG29-1-CD2- | GCTTTTTATAGGTGCAGTCTCC |
| of CD2 target | | target site-E1 | |
| site | | | |
| DNA sequence | 4842 | MG29-1-CD2- | CTTTTTATAGGTGCAGTCTCCA |
| of CD2 target | | target site-F1 | |
| site | | | |
| DNA sequence | 4843 | MG29-1-CD2- | TATAGGTGCAGTCTCCAAAGAG |
| of CD2 target | | target site-G1 | |
| site | | | |
| DNA sequence | 4844 | MG29-1-CD2- | ATAGGTGCAGTCTCCAAAGAGA |
| of CD2 target | | target site-H1 | |
| site | | | |
| DNA sequence | 4845 | MG29-1-CD2- | TAGGTGCAGTCTCCAAAGAGAT |
| of CD2 target | | target site-A2 | |
| site | | | |
| DNA sequence | 4846 | MG29-1-CD2- | CAAATGAGTGATGATATTGACG |
| of CD2 target | | target site-B2 | |
| site | | | |
| DNA sequence | 4847 | MG29-1-CD2- | AAATGAGTGATGATATTGACGA |
| of CD2 target | | target site-C2 | |
| site | | | |
| DNA sequence | 4848 | MG29-1-CD2- | AAGGAAAAAGATACATATAAGC |
| of CD2 target | | target site-D2 | |
| site | | | |
| DNA sequence | 4849 | MG29-1-CD2- | AAAATGGAACTCTGAAAATTAA |
| of CD2 target | | target site-E2 | |
| site | | | |
| DNA sequence | 4850 | MG29-1-CD2- | TTCCAACACATTTTTTCCTTTT |
| of CD2 target | | target site-F2 | |
| site | | | |
| DNA sequence | 4851 | MG29-1-CD2- | TCCAACACATTTTTTCCTTTTG |
| of CD2 target | | target site-G2 | |
| site | | | |
| DNA sequence | 4852 | MG29-1-CD2- | CCAACACATTTTTTCCTTTTGT |
| of CD2 target | | target site-H2 | |
| site | | | |
| DNA sequence | 4853 | MG29-1-CD2- | CAACACATTTTTTCCTTTTGTA |
| of CD2 target | | target site-A3 | |
| site | | | |
| DNA sequence | 4854 | MG29-1-CD2- | TTCCTTTTGTATCATATATTGA |
| of CD2 target | | target site-B3 | |
| site | | | |
| DNA sequence | 4855 | MG29-1-CD2- | TCCTTTTGTATCATATATTGAT |
| of CD2 target | | target site-C3 | |
| site | | | |
| DNA sequence | 4856 | MG29-1-CD2- | CCTTTTGTATCATATATTGATA |
| of CD2 target | | target site-D3 | |
| site | | | |
| DNA sequence | 4857 | MG29-1-CD2- | CTTTTGTATCATATATTGATAC |
| of CD2 target | | target site-E3 | |
| site | | | |
| DNA sequence | 4858 | MG29-1-CD2- | GTATCATATATTGATACCTTGT |
| of CD2 target | | target site-F3 | |
| site | | | |
| DNA sequence | 4859 | MG29-1-CD2- | TATCATATATTGATACCTTGTA |
| of CD2 target | | target site-G3 | |
| site | | | |
| DNA sequence | 4860 | MG29-1-CD2- | CAGAGTTCCATTTTTAAATAGC |
| of CD2 target | | target site-H3 | |
| site | | | |
| DNA sequence | 4861 | MG29-1-CD2- | AGAGTTCCATTTTTAAATAGCT |
| of CD2 target | | target site-A4 | |
| site | | | |
| DNA sequence | 4862 | MG29-1-CD2- | TAAATAGCTTATATGTATCTTT |
| of CD2 target | | target site-B4 | |
| site | | | |
| DNA sequence | 4863 | MG29-1-CD2- | AAATAGCTTATATGTATCTTTT |
| of CD2 target | | target site-C4 | |
| site | | | |
| DNA sequence | 4864 | MG29-1-CD2- | AATAGCTTATATGTATCTTTTT |
| of CD2 target | | target site-D4 | |
| site | | | |
| DNA sequence | 4865 | MG29-1-CD2- | TCCTTGAAAGTCTCTTTCTCTT |
| of CD2 target | | target site-E4 | |
| site | | | |
| DNA sequence | 4866 | MG29-1-CD2- | CCTTGAAAGTCTCTTTCTCTTT |
| of CD2 target | | target site-F4 | |
| site | | | |
| DNA sequence | 4867 | MG29-1-CD2- | CTTGAAAGTCTCTTTCTCTTTT |
| of CD2 target | | target site-G4 | |
| site | | | |
| DNA sequence | 4868 | MG29-1-CD2- | TCTTTTCTGAATTGTGCAATCT |
| of CD2 target | | target site-H4 | |
| site | | | |
| DNA sequence | 4869 | MG29-1-CD2- | CTGAATTGTGCAATCTTTTTCT |
| of CD2 target | | target site-A5 | |
| site | | | |
| DNA sequence | 4870 | MG29-1-CD2- | TGAATTGTGCAATCTTTTTCTT |
| of CD2 target | | target site-B5 | |
| site | | | |
| DNA sequence | 4871 | MG29-1-CD2- | TCTTGTCTGAAGTTTTTTCCCA |
| of CD2 target | | target site-C5 | |
| site | | | |
| DNA sequence | 4872 | MG29-1-CD2- | CTTGTCTGAAGTTTTTTCCCAT |
| of CD2 target | | target site-D5 | |
| site | | | |
| DNA sequence | 4873 | MG29-1-CD2- | TTGTCTGAAGTTTTTTCCCATT |
| of CD2 target | | target site-E5 | |
| site | | | |
| DNA sequence | 4874 | MG29-1-CD2- | TTCCCATTTTATATCGTCAATA |
| of CD2 target | | target site-F5 | |
| site | | | |
| DNA sequence | 4875 | MG29-1-CD2- | TCCCATTTTATATCGTCAATAT |
| of CD2 target | | target site-G5 | |
| site | | | |
| DNA sequence | 4876 | MG29-1-CD2- | CCCATTTTATATCGTCAATATC |
| of CD2 target | | target site-H5 | |
| site | | | |
| DNA sequence | 4877 | MG29-1-CD2- | CCATTTTATATCGTCAATATCA |
| of CD2 target | | target site-A6 | |
| site | | | |
| DNA sequence | 4878 | MG29-1-CD2- | ATATCGTCAATATCATCACTCA |
| of CD2 target | | target site-B6 | |
| site | | | |
| DNA sequence | 4879 | MG29-1-CD2- | TATCGTCAATATCATCACTCAT |
| of CD2 target | | target site-C6 | |
| site | | | |
| DNA sequence | 4880 | MG29-1-CD2- | AAAACTAGGAATGTCCAAGTTG |
| of CD2 target | | target site-D6 | |
| site | | | |
| DNA sequence | 4881 | MG29-1-CD2- | CAAGGCATTCGTAATCTCTTTG |
| of CD2 target | | target site-E6 | |
| site | | | |
| DNA sequence | 4882 | MG29-1-CD2- | CTTTCTTTTTAGAGAGGGTCTC |
| of CD2 target | | target site-F6 | |
| site | | | |
| DNA sequence | 4883 | MG29-1-CD2- | TTTTTAGAGAGGGTCTCAAAAC |
| of CD2 target | | target site-G6 | |
| site | | | |
| DNA sequence | 4884 | MG29-1-CD2- | TAGAGAGGGTCTCAAAACCAAA |
| of CD2 target | | target site-H6 | |
| site | | | |
| DNA sequence | 4885 | MG29-1-CD2- | AGAGAGGGTCTCAAAACCAAAG |
| of CD2 target | | target site-A7 | |
| site | | | |
| DNA sequence | 4886 | MG29-1-CD2- | GAGAGGGTCTCAAAACCAAAGA |
| of CD2 target | | target site-B7 | |
| site | | | |
| DNA sequence | 4887 | MG29-1-CD2- | TCAGAGGGTCATCACACACAAG |
| of CD2 target | | target site-C7 | |
| site | | | |
| DNA sequence | 4888 | MG29-1-CD2- | TTCCCTGCTGTGCACTTGAATT |
| of CD2 target | | target site-D7 | |
| site | | | |
| DNA sequence | 4889 | MG29-1-CD2- | GCACTCAGGCTGGTGGTCCACT |
| of CD2 target | | target site-E7 | |
| site | | | |
| DNA sequence | 4890 | MG29-1-CD2- | CACTCAGGCTGGTGGTCCACTT |
| of CD2 target | | target site-F7 | |
| site | | | |
| DNA sequence | 4891 | MG29-1-CD2- | AGATGTTTCCCATCTTGATACA |
| of CD2 target | | target site-G7 | |
| site | | | |
| DNA sequence | 4892 | MG29-1-CD2- | GATGTTTCCCATCTTGATACAG |
| of CD2 target | | target site-H7 | |
| site | | | |
| DNA sequence | 4893 | MG29-1-CD2- | CCATCTTGATACAGGTTTAATT |
| of CD2 target | | target site-A8 | |
| site | | | |
| DNA sequence | 4894 | MG29-1-CD2- | ATTCGGGGTCAGTTCCATTCAT |
| of CD2 target | | target site-B8 | |
| site | | | |
| DNA sequence | 4895 | MG29-1-CD2- | CCATCTTGATACAGGTTTAATT |
| of CD2 target | | target site-C8 | |
| site | | | |
| DNA sequence | 4896 | MG29-1-CD2- | CAGAGAAAGGTCTGGACATCTA |
| of CD2 target | | target site-D8 | |
| site | | | |
| DNA sequence | 4897 | MG29-1-CD2- | TGGCACTGCTCGTTTTCTATAT |
| of CD2 target | | target site-E8 | |
| site | | | |
| DNA sequence | 4898 | MG29-1-CD2- | CTATATCACCAAAAGGAAAAAA |
| of CD2 target | | target site-F8 | |
| site | | | |
| DNA sequence | 4899 | MG29-1-CD2- | TATATCACCAAAAGGAAAAAAC |
| of CD2 target | | target site-G8 | |
| site | | | |
| DNA sequence | 4900 | MG29-1-CD2- | TCCGACTCCTCTGTTTTTTCCT |
| of CD2 target | | target site-H8 | |
| site | | | |
| DNA sequence | 4901 | MG29-1-CD2- | TTCCTTTTGGTGATATAGAAAA |
| of CD2 target | | target site-A9 | |
| site | | | |
| DNA sequence | 4902 | MG29-1-CD2- | TCCTTTTGGTGATATAGAAAAC |
| of CD2 target | | target site-B9 | |
| site | | | |
| DNA sequence | 4903 | MG29-1-CD2- | CCTTTTGGTGATATAGAAAACG |
| of CD2 target | | target site-C9 | |
| site | | | |
| DNA sequence | 4904 | MG29-1-CD2- | CTTTTGGTGATATAGAAAACGA |
| of CD2 target | | target site-D9 | |
| site | | | |
| DNA sequence | 4905 | MG29-1-CD2- | GGTGATATAGAAAACGAGCAGT |
| of CD2 target | | target site-E9 | |
| site | | | |
| DNA sequence | 4906 | MG29-1-CD2- | GTGATATAGAAAACGAGCAGTG |
| of CD2 target | | target site-F9 | |
| site | | | |
| DNA sequence | 4907 | MG29-1-CD2- | TCTGCAAAAGGAAGAGAAGTGG |
| of CD2 target | | target site-G9 | |
| site | | | |
| DNA sequence | 4908 | MG29-1-CD2- | GTTGTTGCAGATGAGGAGCTGG |
| of CD2 target | | target site-H9 | |
| site | | | |
| DNA sequence | 4909 | MG29-1-CD2- | TTGTTGCAGATGAGGAGCTGGA |
| of CD2 target | | target site-A10 | |
| site | | | |
| DNA sequence | 4910 | MG29-1-CD2- | TATCTTTTTTAATTAGAGGAAG |
| of CD2 target | | target site-B10 | |
| site | | | |
| DNA sequence | 4911 | MG29-1-CD2- | TTAATTAGAGGAAGGGGACAAT |
| of CD2 target | | target site-C10 | |
| site | | | |
| DNA sequence | 4912 | MG29-1-CD2- | TAATTAGAGGAAGGGGACAATG |
| of CD2 target | | target site-D10 | |
| site | | | |
| DNA sequence | 4913 | MG29-1-CD2- | AATTAGAGGAAGGGGACAATGA |
| of CD2 target | | target site-E10 | |
| site | | | |
| DNA sequence | 4914 | MG29-1-CD2- | ATTAGAGGAAGGGGACAATGAG |
| of CD2 target | | target site-F10 | |
| site | | | |
| DNA sequence | 4915 | MG29-1-CD2- | CTGCTGCCCCATGGGGAGGTTT |
| of CD2 target | | target site-G10 | |
| site | | | |
| DNA sequence | 4916 | MG29-1-CD2- | TGCTGCCCCATGGGGAGGTTTT |
| of CD2 target | | target site-H10 | |
| site | | | |
| DNA sequence | 4917 | MG29-1-CD2- | GGCTGAACTCGAGGTCTGGGGA |
| of CD2 target | | target site-A11 | |
| site | | | |
| DNA sequence | 4918 | MG29-1-CD2- | GCTGAACTCGAGGTCTGGGGAG |
| of CD2 target | | target site-B11 | |
| site | | | |
| DNA sequence | 4919 | MG29-1-CD2- | TGCTGGTGAACTTGTGTGCCCG |
| of CD2 target | | target site-C11 | |
| site | | | |
| DNA sequence | 4920 | MG29-1-CD2- | GTGGGGCTTCCGGCCCCTTTCT |
| of CD2 target | | target site-D11 | |
| site | | | |
| DNA sequence | 4921 | MG29-1-CD2- | TTCAGTAGCTACTCTGTGGGCT |
| of CD2 target | | target site-E11 | |
| site | | | |

r; native RNA linkage comprising the sugar ribose (for example the ribose or RNA form of the A base is written rA), d; deoxyribose sugar (DNA) linkage (for example a deoxyribose form of the A base is written dA), *; between bases in which one of the oxygen molecules in the phosphodiester bond is replaced with sulfur; AltR1 and AltR2 refer to IDT technologies' proprietary 5′ and 3′ AltR modifications

### Example 17—Gene Editing Outcomes at the DNA Level for CD5

[0504] Primary T cells were purified from PMBCs using a negative selection kit (Miltenyi) according to the manufacturer's recommendations. Nucleofection of MG29-1 RNPs (126 pmol protein/160 pmol guide) (SEQ ID NOs: 4922-4945) was performed into T cells (200,000) using the Lonza 4D electroporator. Cells were harvested and genomic DNA prepared five days post-transfection. PCR primers appropriate for use in NGS-based DNA sequencing were generated, optimized, and used to amplify the individual target sequences for each guide RNA (SEQ ID NOs: 4946-4969). The amplicons were sequenced on an Illumina MiSeq machine and analyzed with a proprietary Python script to measure gene editing (FIG. 63).

TABLE 14F
Sequences of Guide RNAs and Sequences
Targeted for Example 43

| Guide | SEQ ID | | |
|---|---|---|---|
| Target | NO | Guide Name | SEQUENCE |
| MG29-1 | 4922 | MG29-1-CD5- | /AltR1/rUrArArUrUrUr |
| sgRNA | | sgRNA-A1 | CrUrArCrUrGrUrUrGrUr |
| targeting | | | ArGrArUrUrGrCrArGrUr |
| CD5 | | | CrGrCrUrUrCrCrUrGrCr |
| | | | CrUrCrGrGrA/AltR2/ |
| MG29-1 | 4923 | MG29-1-CD5- | /AltR1/rUrArArUrUrUr |
| sgRNA | | sgRNA-B1 | CrUrArCrUrGrUrUrGrUr |
| targeting | | | ArGrArUrUrCrCrArUrGr |
| CD5 | | | UrGrGrCrUrCrUrUrCrCr |
| | | | UrUrArCrCrU/AltR2/ |
| MG29-1 | 4924 | MG29-1-CD5- | /AltR1/rUrArArUrUrUr |
| sgRNA | | sgRNA-C1 | CrUrArCrUrGrUrUrGrUr |
| targeting | | | ArGrArUrUrGrArCrCrCr |
| CD5 | | | CrCrArGrArUrUrUrCrCr |
| | | | ArGrGrCrArA/AltR2/ |
| MG29-1 | 4925 | MG29-1-CD5- | /AltR1/rUrArArUrUrUr |
| sgRNA | | sgRNA-D1 | CrUrArCrUrGrUrUrGrUr |
| targeting | | | ArGrArUrCrArGrGrCrAr |
| CD5 | | | ArGrGrCrUrCrArCrCrCr |
| | | | GrUrUrCrCrA/AltR2/ |
| MG29-1 | 4926 | MG29-1-CD5- | /AltR1/rUrArArUrUrUr |
| sgRNA | | sgRNA-E1 | CrUrArCrUrGrUrUrGrUr |
| targeting | | | ArGrArUrCrArGrCrCrAr |
| CD5 | | | GrArGrCrUrGrGrGrGrCr |
| | | | CrGrGrArGrC/AltR2/ |
| MG29-1 | 4927 | MG29-1-CD5- | /AltR1/rUrArArUrUrUr |
| sgRNA | | sgRNA-F1 | CrUrArCrUrGrUrUrGrUr |
| targeting | | | ArGrArUrUrGrCrUrGrUr |
| CD5 | | | GrGrCrUrGrCrArGrUrUr |
| | | | GrGrArGrArA/AltR2/ |
| MG29-1 | 4928 | MG29-1-CD5- | /AltR1/rUrArArUrUrUr |
| sgRNA | | sgRNA-G1 | CrUrArCrUrGrUrUrGrUr |
| targeting | | | ArGrArUrGrArCrGrCrUr |
| CD5 | | | UrGrArCrUrGrGrGrGrUr |
| | | | CrCrUrCrCrC/AltR2/ |
| MG29-1 | 4929 | MG29-1-CD5- | /AltR1/rUrArArUrUrUr |
| sgRNA | | sgRNA-H1 | CrUrArCrUrGrUrUrGrUr |
| targeting | | | ArGrArUrArCrGrCrUrUr |
| CD5 | | | GrArCrUrGrGrGrGrUrCr |
| | | | CrUrCrCrCrA/AltR2/ |
| MG29-1 | 4930 | MG29-1-CD5- | /AltR1/rUrArArUrUrUr |
| sgRNA | | sgRNA-A2 | CrUrArCrUrGrUrUrGrUr |
| targeting | | | ArGrArUrCrUrGrGrGrGr |
| CD5 | | | CrUrUrGrArUrUrUrUrCr |
| | | | CrUrGrArArG/AltR2/ |
| MG29-1 | 4931 | MG29-1-CD5- | /AltR1/rUrArArUrUrUr |
| sgRNA | | sgRNA-B2 | CrUrArCrUrGrUrUrGrUr |
| targeting | | | ArGrArUrUrGrGrGrGrCr |
| CD5 | | | UrUrGrArUrUrUrUrCrCr |
| | | | UrGrArArGrC/AltR2/ |
| MG29-1 | 4932 | MG29-1-CD5- | /AltR1/rUrArArUrUrUr |
| sgRNA | | sgRNA-C2 | CrUrArCrUrGrUrUrGrUr |
| targeting | | | ArGrArUrCrCrUrGrArAr |
| CD5 | | | GrCrArArUrGrCrUrCrCr |
| | | | ArGrGrGrArG/AltR2/ |
| MG29-1 | 4933 | MG29-1-CD5- | /AltR1/rUrArArUrUrUr |
| sgRNA | | sgRNA-D2 | CrUrArCrUrGrUrUrGrUr |
| targeting | | | ArGrArUrCrUrGrArArGr |
| CD5 | | | CrArArUrGrCrUrCrCrAr |
| | | | GrGrGrArGrG/AltR2/ |
| MG29-1 | 4934 | MG29-1-CD5- | /AltR1/rUrArArUrUrUr |
| sgRNA | | sgRNA-E2 | CrUrArCrUrGrUrUrGrUr |
| targeting | | | ArGrArUrCrCrArUrUrGr |
| CD5 | | | CrUrUrCrCrCrCrUrCrUr |
| | | | CrArGrGrUrU/AltR2/ |
| MG29-1 | 4935 | MG29-1-CD5- | /AltR1/rUrArArUrUrUr |
| sgRNA | | sgRNA-F2 | CrUrArCrUrGrUrUrGrUr |
| targeting | | | ArGrArUrCrArGrCrCrCr |
| CD5 | | | ArArGrGrUrGrCrArGrAr |
| | | | GrCrCrGrUrC/AltR2/ |
| MG29-1 | 4936 | MG29-1-CD5- | /AltR1/rUrArArUrUrUr |
| sgRNA | | sgRNA-G2 | CrUrArCrUrGrUrUrGrUr |
| targeting | | | ArGrArUrGrGrArGrArGr |
| CD5 | | | ArArArUrUrCrCrUrArCr |
| | | | UrGrCrArArG/AltR2/ |
| MG29-1 | 4937 | MG29-1-CD5- | /AltR1/rUrArArUrUrUr |
| sgRNA | | sgRNA-H2 | CrUrArCrUrGrUrUrGrUr |
| targeting | | | ArGrArUrUrCrUrCrCrCr |
| CD5 | | | ArArArGrUrUrCrGrUrGr |
| | | | GrCrArCrUrG/AltR2/ |
| MG29-1 | 4938 | MG29-1-CD5- | /AltR1/rUrArArUrUrUr |
| sgRNA | | sgRNA-A3 | CrUrArCrUrGrUrUrGrUr |
| targeting | | | ArGrArUrUrUrCrArCrUr |
| CD5 | | | ArGrCrUrUrCrUrUrGrUr |
| | | | ArGrGrCrArA/AltR2/ |
| MG29-1 | 4939 | MG29-1-CD5- | /AltR1/rUrArArUrUrUr |
| sgRNA | | sgRNA-B3 | CrUrArCrUrGrUrUrGrUr |
| targeting | | | ArGrArUrUrUrGrUrCrUr |
| CD5 | | | CrUrUrGrCrCrCrArGrUr |
| | | | CrCrGrCrCrA/AltR2/ |
| MG29-1 | 4940 | MG29-1-CD5- | /AltR1/rUrArArUrUrUr |
| sgRNA | | sgRNA-C3 | CrUrArCrUrGrUrUrGrUr |
| targeting | | | ArGrArUrGrGrUrUrCrAr |
| CD5 | | | UrUrCrCrCrGrUrUrGrGr |
| | | | GrCrCrArArU/AltR2/ |
| MG29-1 | 4941 | MG29-1-CD5- | /AltR1/rUrArArUrUrUr |
| sgRNA | | sgRNA-D3 | CrUrArCrUrGrUrUrGrUr |
| targeting | | | ArGrArUrGrUrUrCrArUr |
| CD5 | | | UrCrCrCrGrUrUrGrGrGr |
| | | | CrCrArArUrC/AltR2/ |
| MG29-1 | 4942 | MG29-1-CD5- | /AltR1/rUrArArUrUrUr |
| sgRNA | | sgRNA-E3 | CrUrArCrUrGrUrUrGrUr |
| targeting | | | ArGrArUrCrArUrCrGrCr |
| CD5 | | | ArArCrCrArCrArCrGrGr |
| | | | CrArArCrCrG/AltR2/ |
| MG29-1 | 4943 | MG29-1-CD5- | /AltR1/rUrArArUrUrUr |
| sgRNA | | sgRNA-F3 | CrUrArCrUrGrUrUrGrUr |
| targeting | | | ArGrArUrUrUrUrCrCrCr |
| CD5 | | | CrArGrCrUrCrUrGrGrAr |
| | | | ArGrGrGrGrC/AltR2/ |
| MG29-1 | 4944 | MG29-1-CD5- | /AltR1/rUrArArUrUrUr |
| sgRNA | | sgRNA-G3 | CrUrArCrUrGrUrUrGrUr |
| targeting | | | ArGrArUrCrCrCrArGrCr |
| CD5 | | | UrCrUrGrGrArArGrGrGr |
| | | | GrCrUrCrUrG/AltR2/ |
| MG29-1 | 4945 | MG29-1-CD5- | /AltR1/rUrArArUrUrUr |
| sgRNA | | sgRNA-H3 | CrUrArCrUrGrUrUrGrUr |
| targeting | | | ArGrArUrCrArGrCrCrUr |
| CD5 | | | CrUrGrArGrCrCrCrCrAr |
| | | | UrGrCrArGrA/AltR2/ |
| DNA | 4946 | MG29-1-CD5- | TGCAGTCGCTTCCTGCCTCG |
| sequence | | target | GA |
| of CD5 | | site-A1 | |
| target | | | |
| site | | | |
| DNA | 4947 | MG29-1-CD5- | TCCATGTGGCTCTTCCTTAC |
| sequence | | target | CT |
| of CD5 | | site-B1 | |
| target | | | |
| site | | | |
| DNA | 4948 | MG29-1-CD5- | TGACCCCCAGATTTCCAGGC |
| sequence | | target | AA |
| of CD5 | | site-C1 | |
| target | | | |
| site | | | |
| DNA | 4949 | MG29-1-CD5- | CAGGCAAGGCTCACCCGTTC |
| sequence | | target | CA |
| of CD5 | | site-D1 | |
| target | | | |
| site | | | |
| DNA | 4950 | MG29-1-CD5- | CAGCCAGAGCTGGGGCCGGA |
| sequence | | target | GC |
| of CD5 | | site-E1 | |
| target | | | |
| site | | | |
| DNA | 4951 | MG29-1-CD5- | TGCTGTGGCTGCAGTTGGAG |
| sequence | | target | AA |
| of CD5 | | site-F1 | |
| target | | | |
| site | | | |
| DNA | 4952 | MG29-1-CD5- | GACGCTTGACTGGGGTCCTC |
| sequence | | target | CC |
| of CD5 | | site-G1 | |
| target | | | |
| site | | | |
| DNA | 4953 | MG29-1-CD5- | ACGCTTGACTGGGGTCCTCC |
| sequence | | target | CA |
| of CD5 | | site-H1 | |
| target | | | |
| site | | | |
| DNA | 4954 | MG29-1-CD5- | CTGGGGCTTGATTTTCCTGA |
| sequence | | target | AG |
| of CD5 | | site-A2 | |
| target | | | |
| site | | | |
| DNA | 4955 | MG29-1-CD5- | TGGGGCTTGATTTTCCTGAA |
| sequence | | target | GC |
| of CD5 | | site-B2 | |
| target | | | |
| site | | | |
| DNA | 4956 | MG29-1-CD5- | CCTGAAGCAATGCTCCAGGG |
| sequence | | target | AG |
| of CD5 | | site-C2 | |
| target | | | |
| site | | | |
| DNA | 4957 | MG29-1-CD5- | CTGAAGCAATGCTCCAGGGA |
| sequence | | target | GG |
| | | site-D2 | |
| of CD5 | | | |
| target | | | |
| site | | | |
| DNA | 4958 | MG29-1-CD5- | CCATTGCTTCCCCTCTCAGG |
| sequence | | target | TT |
| of CD5 | | site-E2 | |
| target | | | |
| site | | | |
| DNA | 4959 | MG29-1-CD5- | CAGCCCAAGGTGCAGAGCCG |
| sequence | | target | TC |
| of CD5 | | site-F2 | |
| target | | | |
| site | | | |
| DNA | 4960 | MG29-1-CD5- | GGAGAGAAATTCCTACTGCA |
| sequence | | target | AG |
| of CD5 | | site-G2 | |
| target | | | |
| site | | | |
| DNA | 4961 | MG29-1-CD5- | TCTCCCAAAGTTCGTGGCAC |
| sequence | | target | TG |
| of CD5 | | site-H2 | |
| target | | | |
| site | | | |
| DNA | 4962 | MG29-1-CD5- | TTCACTAGCTTCTTGTAGGC |
| sequence | | target | AA |
| of CD5 | | site-A3 | |
| target | | | |
| site | | | |
| DNA | 4963 | MG29-1-CD5- | TTGTCTCTTGCCCAGTCCGC |
| sequence | | target | CA |
| of CD5 | | site-B3 | |
| target | | | |
| site | | | |
| DNA | 4964 | MG29-1-CD5- | GGTTCATTCCCGTTGGGCCA |
| sequence | | target | AT |
| of CD5 | | site-C3 | |
| target | | | |
| site | | | |
| DNA | 4965 | MG29-1-CD5- | GTTCATTCCCGTTGGGCCAA |
| sequence | | target | TC |
| of CD5 | | site-D3 | |
| target | | | |
| site | | | |
| DNA | 4966 | MG29-1-CD5- | CATCGCAACCACACGGCAAC |
| sequence | | target | CG |
| of CD5 | | site-E3 | |
| target | | | |
| site | | | |
| DNA | 4967 | MG29-1-CD5- | TTTCCCCAGCTCTGGAAGGG |
| sequence | | target | GC |
| of CD5 | | site-F3 | |
| target | | | |
| site | | | |
| DNA | 4968 | MG29-1-CD5- | CCCAGCTCTGGAAGGGGCTC |
| sequence | | target | TG |
| of CD5 | | site-G3 | |
| target | | | |
| site | | | |
| DNA | 4969 | MG29-1-CD5- | CAGCCTCTGAGCCCCATGCA |
| sequence | | target | GA |
| of CD5 | | site-H3 | |
| target | | | |
| site | | | |

r; native RNA linkage comprising the sugar ribose (for example the ribose or RNA form of the A base is written rA), d; deoxyribose sugar (DNA) linkage (for example a deoxyribose form of the A base is written dA), *; between bases in which one of the oxygen molecules in the phosphodiester bond is replaced with sulfur; AltR1 and AltR2 refer to IDT technologies' proprietary 5′ and 3′ AltR modifications

### Example 18—Gene Editing Outcomes at the DNA Level for Mouse TRAC

[0505] Primary T cells were purified from C57BL/6 mouse spleens. Nucleofection of MG29-1 RNPs (126 pmol protein/160 pmol guide) (SEQ ID NOs: 5056-5125) was performed into T cells (200,000) using the Lonza 4D electroporator and 100 pmol transfection enhancer (IDT). Cells were harvested and genomic DNA prepared five days post-transfection. PCR primers appropriate for use in NGS-based DNA sequencing were generated, optimized, and used to amplify the individual target sequences for each guide RNA (SEQ ID NOs: 5126-5195). The amplicons were sequenced on an Illumina MiSeq machine and analyzed with a proprietary Python script to measure gene editing (FIG. 64A).

TABLE 14G
Sequences of Guide RNAs and Sequences Targeted for Example 44

| | SEQ | Guide | |
|---|---|---|---|
| Guide | ID | | |
| Target | NO | Name | SEQUENCE |
| MG29-1 | 5056 | MG29-1- | /AltR1/rUrArArUrUrUr |
| sgRNA | | mTRAC- | CrUrArCrUrGrUrUrGrUr |
| targeting | | sgRNA-A1 | ArGrArUrArCrUrCrCrCr |
| mouse TRAC | | | ArArArUrCrArArUrGrUr |
| | | | GrCrCrGrArA/AltR2/ |
| MG29-1 | 5057 | MG29-1- | /AltR1/rUrArArUrUrUr |
| sgRNA | | mTRAC- | CrUrArCrUrGrUrUrGrUr |
| targeting | | sgRNA-B1 | ArGrArUrArArGrArUrAr |
| mouse TRAC | | | UrCrUrUrGrGrCrArGrGr |
| | | | UrGrArArGrC/AltR2/ |
| MG29-1 | 5058 | MG29-1- | /AltR1/rUrArArUrUrUr |
| sgRNA | | mTRAC- | CrUrArCrUrGrUrUrGrUr |
| targeting | | sgRNA-C1 | ArGrArUrArUrGrUrCrCr |
| mouse TRAC | | | ArGrCrArCrArGrUrUrUr |
| | | | UrGrUrCrArG/AltR2/ |
| MG29-1 | 5059 | MG29-1- | /AltR1/rUrArArUrUrUr |
| sgRNA | | mTRAC- | CrUrArCrUrGrUrUrGrUr |
| targeting | | sgRNA-D1 | ArGrArUrGrUrCrArGrUr |
| mouse TRAC | | | GrArUrGrArArCrGrUrUr |
| | | | CrCrArGrArU/AltR2 |
| MG29-1 | 5060 | MG29-1- | /AltR1/rUrArArUrUrUr |
| sgRNA | | mTRAC- | CrUrArCrUrGrUrUrGrUr |
| targeting | | sgRNA-E1 | ArGrArUrUrCrArGrUrGr |
| mouse TRAC | | | ArUrGrArArCrGrUrUrCr |
| | | | CrArGrArUrU/AltR2/ |
| MG29-1 | 5061 | MG29-1- | /AltR1/rUrArArUrUrUr |
| sgRNA | | mTRAC- | CrUrArCrUrGrUrUrGrUr |
| targeting | | sgRNA-F1 | ArGrArUrCrGrGrCrArCr |
| mouse TRAC | | | ArUrUrGrArUrUrUrGrGr |
| | | | GrArGrUrCrA/AItR2/ |
| MG29-1 | 5062 | MG29-1- | /AltR1/rUrArArUrUrUr |
| sgRNA | | mTRAC- | CrUrArCrUrGrUrUrGrUr |
| targeting | | sgRNA-G1 | ArGrArUrGrGrCrArCrAr |
| mouse TRAC | | | UrUrGrArUrUrUrGrGrGr |
| | | | ArGrUrCrArA/AltR2/ |
| MG29-1 | 5063 | MG29-1- | /AltR1/rUrArArUrUrUr |
| sgRNA | | mTRAC- | CrUrArCrUrGrUrUrGrUr |
| targeting | | sgRNA-H1 | ArGrArUrGrGrArGrUrCr |
| mouse TRAC | | | ArArArGrUrCrGrGrUrGr |
| | | | ArArCrArGrG/AltR2/ |
| MG29-1 | 5064 | MG29-1- | /AltR1/rUrArArUrUrUr |
| sgRNA | | mTRAC- | CrUrArCrUrGrUrUrGrUr |
| targeting | | sgRNA-A2 | ArGrArUrArArCrUrGrGr |
| mouse TRAC | | | UrArCrArCrArGrCrArGr |
| | | | GrUrUrCrUrG/AltR2/ |
| MG29-1 | 5065 | MG29-1- | /AltR1/rUrArArUrUrUr |
| sgRNA | | mTRAC- | CrUrArCrUrGrUrUrGrUr |
| targeting | | sgRNA-B2 | ArGrArUrArCrUrGrGrUr |
| mouse TRAC | | | ArCrArCrArGrCrArGrGr |
| | | | UrUrCrUrGrG/AltR2/ |
| MG29-1 | 5066 | MG29-1- | /AltR1/rUrArArUrUrUr |
| sgRNA | | mTRAC- | CrUrArCrUrGrUrUrGrUr |
| targeting | | sgRNA-C2 | ArGrArUrUrUrUrUrCrCr |
| mouse TRAC | | | CrUrUrUrUrArGrArCrGr |
| | | | UrUrCrCrCrU/AltR2/ |
| MG29-1 | 5067 | MG29-1- | /AltR1/rUrArArUrUrUr |
| sgRNA | | mTRAC- | CrUrArCrUrGrUrUrGrUr |
| targeting | | sgRNA-D2 | ArGrArUrCrCrCrUrUrUr |
| mouse TRAC | | | UrArGrArCrGrUrUrCrCr |
| | | | CrUrGrUrGrA/AltR2/ |
| MG29-1 | 5068 | MG29-1- | /AltR1/rUrArArUrUrUr |
| sgRNA | | mTRAC- | CrUrArCrUrGrUrUrGrUr |
| targeting | | sgRNA-E2 | ArGrArUrCrCrUrUrUrUr |
| mouse TRAC | | | ArGrArCrGrUrUrCrCrCr |
| | | | UrGrUrGrArU/AltR2/ |
| MG29-1 | 5069 | MG29-1- | /AltR1/rUrArArUrUrUr |
| sgRNA | | mTRAC- | CrUrArCrUrGrUrUrGrUr |
| targeting | | sgRNA-F2 | ArGrArUrArGrArCrGrUr |
| mouse TRAC | | | UrCrCrCrUrGrUrGrArUr |
| | | | GrCrCrArCrG/AltR2/ |
| MG29-1 | 5070 | MG29-1- | /AltR1/rUrArArUrUrUr |
| sgRNA | | mTRAC- | CrUrArCrUrGrUrUrGrUr |
| targeting | | sgRNA-G2 | ArGrArUrGrArCrGrUrUr |
| mouse TRAC | | | CrCrCrUrGrUrGrArUrGr |
| | | | CrCrArCrGrU/AltR2/ |
| MG29-1 | 5071 | MG29-1- | /AltR1/rUrArArUrUrUr |
| sgRNA | | mTRAC- | CrUrArCrUrGrUrUrGrUr |
| targeting | | sgRNA-H2 | ArGrArUrArArArGrCrUr |
| mouse TRAC | | | UrUrUrCrUrCrArGrUrCr |
| | | | ArArCrGrUrG/AltR2/ |
| MG29-1 | 5072 | MG29-1- | /AltR1/rUrArArUrUrUr |
| sgRNA | | mTRAC- | CrUrArCrUrGrUrUrGrUr |
| targeting | | sgRNA-A3 | ArGrArUrCrUrCrArGrUr |
| mouse TRAC | | | CrArArCrGrUrGrGrCrAr |
| | | | UrCrArCrArG/AltR2/ |
| MG29-1 | 5073 | MG29-1- | /AltR1/rUrArArUrUrUr |
| sgRNA | | mTRAC- | CrUrArCrUrGrUrUrGrUr |
| targeting | | sgRNA-B3 | ArGrArUrUrCrArGrUrCr |
| mouse TRAC | | | ArArCrGrUrGrGrCrArUr |
| | | | CrArCrArGrG/AltR2/ |
| MG29-1 | 5074 | MG29-1- | /AltR1/rUrArArUrUrUr |
| sgRNA | | mTRAC- | CrUrArCrUrGrUrUrGrUr |
| targeting | | sgRNA-C3 | ArGrArUrArCrArGrArUr |
| mouse TRAC | | | ArUrGrArArCrCrUrArAr |
| | | | ArCrUrUrUrC/AltR2/ |
| MG29-1 | 5075 | MG29-1- | /AltR1/rUrArArUrUrUr |
| sgRNA | | mTRAC- | CrUrArCrUrGrUrUrGrUr |
| targeting | | sgRNA-D3 | ArGrArUrCrArGrArUrAr |
| mouse TRAC | | | UrGrArArCrCrUrArArAr |
| | | | CrUrUrUrCrA/AltR2/ |
| MG29-1 | 5076 | MG29-1- | /AltR1/rUrArArUrUrUr |
| sgRNA | | mTRAC- | CrUrArCrUrGrUrUrGrUr |
| targeting | | sgRNA-E3 | ArGrArUrArArArArCrCr |
| mouse TRAC | | | UrGrUrCrArGrUrUrArUr |
| | | | GrGrGrArCrU/AltR2/ |
| MG29-1 | 5077 | MG29-1- | /AltR1/rUrArArUrUrUr |
| sgRNA | | mTRAC- | CrUrArCrUrGrUrUrGrUr |
| targeting | | sgRNA-F3 | ArGrArUrArCrCrUrGrCr |
| mouse TRAC | | | UrCrArUrGrArCrGrCrUr |
| | | | GrArGrGrCrU/AltR2/ |
| MG29-1 | 5078 | MG29-1- | /AltR1/rUrArArUrUrUr |
| sgRNA | | mTRAC- | CrUrArCrUrGrUrUrGrUr |
| targeting | | sgRNA-G3 | ArGrArUrArUrGrCrCrUr |
| mouse TRAC | | | UrCrUrUrArCrCrUrCrAr |
| | | | ArCrUrGrGrA/AltR2/ |
| MG29-1 | 5079 | MG29-1- | /AltR1/rUrArArUrUrUr |
| sgRNA | | mTRAC- | CrUrArCrUrGrUrUrGrUr |
| targeting | | sgRNA-H3 | ArGrArUrArGrCrArGrGr |
| mouse TRAC | | | ArGrGrArUrUrCrGrGrAr |
| | | | GrUrCrCrCrA/AltR2/ |
| MG29-1 | 5080 | MG29-1- | /AltR1/rUrArArUrUrUr |
| sgRNA | | mTRAC- | CrUrArCrUrGrUrUrGrUr |
| targeting | | sgRNA-A4 | ArGrArUrUrGrArGrGrAr |
| mouse TRAC | | | ArGrGrUrUrGrCrUrGrGr |
| | | | ArGrArGrCrU/AltR2/ |
| MG29-1 | 5081 | MG29-1- | /AltR1/rUrArArUrUrUr |
| sgRNA | | mTRAC- | CrUrArCrUrGrUrUrGrUr |
| targeting | | sgRNA-B4 | ArGrArUrUrUrGrUrUrUr |
| mouse TRAC | | | UrUrUrUrUrUrUrUrUrUr |
| | | | UrGrCrGrGrG/AltR2/ |
| MG29-1 | 5082 | MG29-1- | /AltR1/rUrArArUrUrUr |
| sgRNA | | mTRAC- | CrUrArCrUrGrUrUrGrUr |
| targeting | | sgRNA-C4 | ArGrArUrUrGrUrUrUrUr |
| mouse TRAC | | | UrUrUrUrUrUrUrUrUrUr |
| | | | GrCrGrGrGrU/AltR2/ |
| MG29-1 | 5083 | MG29-1- | /AltR1/rUrArArUrUrUr |
| sgRNA | | mTRAC- | CrUrArCrUrGrUrUrGrUr |
| targeting | | sgRNA-D4 | ArGrArUrGrUrUrUrUrUr |
| mouse TRAC | | | UrUrUrUrUrUrUrUrUrGr |
| | | | CrGrGrGrUrU/AltR2/ |
| MG29-1 | 5084 | MG29-1- | /AltR1/rUrArArUrUrUr |
| sgRNA | | mTRAC- | CrUrArCrUrGrUrUrGrUr |
| targeting | | sgRNA-E4 | ArGrArUrUrUrUrUrUrUr |
| mouse TRAC | | | UrUrUrUrUrUrUrUrGrCr |
| | | | GrGrGrUrUrU/AltR2/ |
| MG29-1 | 5085 | MG29-1- | /AltR1/rUrArArUrUrUr |
| sgRNA | | mTRAC- | CrUrArCrUrGrUrUrGrUr |
| targeting | | sgRNA-F4 | ArGrArUrUrUrUrUrUrUr |
| mouse TRAC | | | UrUrUrUrGrCrGrGrGrUr |
| | | | UrUrArUrUrU/AltR2/ |
| MG29-1 | 5086 | MG29-1- | /AltR1/rUrArArUrUrUr |
| sgRNA | | mTRAC- | CrUrArCrUrGrUrUrGrUr |
| targeting | | sgRNA-G4 | ArGrArUrUrUrUrUrUrUr |
| mouse TRAC | | | UrUrUrGrCrGrGrGrUrUr |
| | | | UrArUrUrUrU/AltR2/ |
| MG29-1 | 5087 | MG29-1- | /AltR1/rUrArArUrUrUr |
| sgRNA | | mTRAC- | CrUrArCrUrGrUrUrGrUr |
| targeting | | sgRNA-H4 | ArGrArUrUrUrUrUrUrUr |
| mouse TRAC | | | UrUrGrCrGrGrGrUrUrUr |
| | | | ArUrUrUrUrU/AltR2/ |
| MG29-1 | 5088 | MG29-1- | /AltR1/rUrArArUrUrUr |
| sgRNA | | mTRAC- | CrUrArCrUrGrUrUrGrUr |
| targeting | | sgRNA-A5 | ArGrArUrUrUrUrUrUrUr |
| mouse TRAC | | | UrGrCrGrGrGrUrUrUrAr |
| | | | UrUrUrUrUrU/AltR2/ |
| MG29-1 | 5089 | MG29-1- | /AltR1/rUrArArUrUrUr |
| sgRNA | | mTRAC- | CrUrArCrUrGrUrUrGrUr |
| targeting | | sgRNA-B5 | ArGrArUrUrUrUrUrUrUr |
| mouse TRAC | | | GrCrGrGrGrUrUrUrArUr |
| | | | UrUrUrUrUrU/AltR2/ |
| MG29-1 | 5090 | MG29-1- | /AltR1/rUrArArUrUrUr |
| sgRNA | | mTRAC- | CrUrArCrUrGrUrUrGrUr |
| targeting | | sgRNA-C5 | ArGrArUrUrUrUrUrUrGr |
| mouse TRAC | | | CrGrGrGrUrUrUrArUrUr |
| | | | UrUrUrUrUrA/AltR2/ |
| MG29-1 | 5091 | MG29-1- | /AltR1/rUrArArUrUrUr |
| sgRNA | | mTRAC- | CrUrArCrUrGrUrUrGrUr |
| targeting | | sgRNA-D5 | ArGrArUrUrUrUrUrGrCr |
| mouse TRAC | | | GrGrGrUrUrUrArUrUrUr |
| | | | UrUrUrUrArA/AltR2/ |
| MG29-1 | 5092 | MG29-1- | /AltR1/rUrArArUrUrUr |
| sgRNA | | mTRAC- | CrUrArCrUrGrUrUrGrUr |
| targeting | | sgRNA-E5 | ArGrArUrUrUrUrGrCrGr |
| mouse TRAC | | | GrGrUrUrUrArUrUrUrUr |
| | | | UrUrUrArArG/AltR2/ |
| MG29-1 | 5093 | MG29-1- | /AltR1/rUrArArUrUrUr |
| sgRNA | | mTRAC- | CrUrArCrUrGrUrUrGrUr |
| targeting | | sgRNA-F5 | ArGrArUrUrUrGrCrGrGr |
| mouse TRAC | | | GrUrUrUrArUrUrUrUrUr |
| | | | UrUrArArGrC/AltR2/ |
| MG29-1 | 5094 | MG29-1- | /AltR1/rUrArArUrUrUr |
| sgRNA | | mTRAC- | CrUrArCrUrGrUrUrGrUr |
| targeting | | sgRNA-G5 | ArGrArUrUrGrCrGrGrGr |
| mouse TRAC | | | UrUrUrArUrUrUrUrUrUr |
| | | | UrArArGrCrA/AltR2/ |
| MG29-1 | 5095 | MG29-1- | /AltR1/rUrArArUrUrUr |
| sgRNA | | mTRAC- | CrUrArCrUrGrUrUrGrUr |
| targeting | | sgRNA-H5 | ArGrArUrGrCrGrGrGrUr |
| mouse TRAC | | | UrUrArUrUrUrUrUrUrUr |
| | | | ArArGrCrArU/AltR2 |
| MG29-1 | 5096 | MG29-1- | /AltR1/rUrArArUrUrUr |
| sgRNA | | mTRAC- | CrUrArCrUrGrUrUrGrUr |
| targeting | | sgRNA-A6 | ArGrArUrCrGrGrGrUrUr |
| mouse TRAC | | | UrArUrUrUrUrUrUrUrAr |
| | | | ArGrCrArUrC/AltR2/ |
| MG29-1 | 5097 | MG29-1- | /AltR1/rUrArArUrUrUr |
| sgRNA | | mTRAC- | CrUrArCrUrGrUrUrGrUr |
| targeting | | sgRNA-B6 | ArGrArUrUrUrUrUrUrUr |
| mouse TRAC | | | UrArArGrCrArUrCrCrAr |
| | | | UrGrArArGrA/AltR2/ |
| MG29-1 | 5098 | MG29-1- | /AltR1/rUrArArUrUrUr |
| sgRNA | | mTRAC- | CrUrArCrUrGrUrUrGrUr |
| targeting | | sgRNA-C6 | ArGrArUrUrUrUrArArGr |
| mouse TRAC | | | CrArUrCrCrArUrGrArAr |
| | | | GrArArArUrG/AltR2/ |
| MG29-1 | 5099 | MG29-1- | /AltR1/rUrArArUrUrUr |
| sgRNA | | mTRAC- | CrUrArCrUrGrUrUrGrUr |
| targeting | | sgRNA-D6 | ArGrArUrUrUrArArGrCr |
| mouse TRAC | | | ArUrCrCrArUrGrArArGr |
| | | | ArArArUrGrC/AltR2/ |
| MG29-1 | 5100 | MG29-1- | /AltR1/rUrArArUrUrUr |
| sgRNA | | mTRAC- | CrUrArCrUrGrUrUrGrUr |
| targeting | | sgRNA-E6 | ArGrArUrUrArArGrCrAr |
| mouse TRAC | | | UrCrCrArUrGrArArGrAr |
| | | | ArArUrGrCrA/AltR2/ |
| MG29-1 | 5101 | MG29-1- | /AltR1/rUrArArUrUrUr |
| sgRNA | | mTRAC- | CrUrArCrUrGrUrUrGrUr |
| targeting | | sgRNA-F6 | ArGrArUrArArGrCrArUr |
| mouse TRAC | | | CrCrArUrGrArArGrArAr |
| | | | ArUrGrCrArU/AltR2/ |
| MG29-1 | 5102 | MG29-1- | /AltR1/rUrArArUrUrUr |
| sgRNA | | mTRAC- | CrUrArCrUrGrUrUrGrUr |
| targeting | | sgRNA-G6 | ArGrArUrArGrCrArUrCr |
| mouse TRAC | | | CrArUrGrArArGrArArAr |
| | | | UrGrCrArUrA/AltR2/ |
| MG29-1 | 5103 | MG29-1- | /AltR1/rUrArArUrUrUr |
| sgRNA | | mTRAC- | CrUrArCrUrGrUrUrGrUr |
| targeting | | sgRNA-H6 | ArGrArUrArUrCrArArGr |
| mouse TRAC | | | GrUrGrUrArGrArArArUr |
| | | | UrArUrCrUrC/AltR2/ |
| MG29-1 | 5104 | MG29-1- | /AltR1/rUrArArUrUrUr |
| sgRNA | | mTRAC- | CrUrArCrUrGrUrUrGrUr |
| targeting | | sgRNA-A7 | ArGrArUrGrGrUrUrUrUr |
| mouse TRAC | | | UrCrUrGrArArUrCrArCr |
| | | | CrUrUrUrArA/AltR2/ |
| MG29-1 | 5105 | MG29-1- | /AltR1/rUrArArUrUrUr |
| sgRNA | | mTRAC- | CrUrArCrUrGrUrUrGrUr |
| targeting | | sgRNA-B7 | ArGrArUrGrUrUrUrUrUr |
| mouse TRAC | | | CrUrGrArArUrCrArCrCr |
| | | | UrUrUrArArU/AltR2/ |
| MG29-1 | 5106 | MG29-1- | /AltR1/rUrArArUrUrUr |
| sgRNA | | mTRAC- | CrUrArCrUrGrUrUrGrUr |
| targeting | | sgRNA-C7 | ArGrArUrUrCrUrGrArAr |
| mouse TRAC | | | UrCrArCrCrUrUrUrArAr |
| | | | UrGrArUrGrU/AltR2/ |
| MG29-1 | 5107 | MG29-1- | /AltR1/rUrArArUrUrUr |
| sgRNA | | mTRAC- | CrUrArCrUrGrUrUrGrUr |
| targeting | | sgRNA-D7 | ArGrArUrCrUrGrArArUr |
| mouse TRAC | | | CrArCrCrUrUrUrArArUr |
| | | | GrArUrGrUrC/AltR2/ |
| MG29-1 | 5108 | MG29-1- | /AltR1/rUrArArUrUrUr |
| sgRNA | | mTRAC- | CrUrArCrUrGrUrUrGrUr |
| targeting | | sgRNA-E7 | ArGrArUrUrGrArArUrCr |
| mouse TRAC | | | ArCrCrUrUrUrArArUrGr |
| | | | ArUrGrUrCrA/AltR2/ |
| MG29-1 | 5109 | MG29-1- | /AltR1/rUrArArUrUrUr |
| sgRNA | | mTRAC- | CrUrArCrUrGrUrUrGrUr |
| targeting | | sgRNA-F7 | ArGrArUrArUrGrArUrGr |
| mouse TRAC | | | UrCrArUrGrGrArCrArGr |
| | | | CrArGrArArU/AltR2/ |
| MG29-1 | 5110 | MG29-1- | /AltR1/rUrArArUrUrUr |
| sgRNA | | mTRAC- | CrUrArCrUrGrUrUrGrUr |
| targeting | | sgRNA-G7 | ArGrArUrUrArCrArCrCr |
| mouse TRAC | | | UrUrGrArUrGrArArArGr |
| | | | ArGrUrArArU/AltR2/ |
| MG29-1 | 5111 | MG29-1- | /AltR1/rUrArArUrUrUr |
| sgRNA | | mTRAC- | CrUrArCrUrGrUrUrGrUr |
| targeting | | sgRNA-H7 | ArGrArUrUrUrCrArUrGr |
| mouse TRAC | | | GrArUrGrCrUrUrArArAr |
| | | | ArArArArUrA/AltR2/ |
| MG29-1 | 5112 | MG29-1- | /AltR1/rUrArArUrUrUr |
| sgRNA | | mTRAC- | CrUrArCrUrGrUrUrGrUr |
| targeting | | sgRNA-A8 | ArGrArUrUrUrUrUrArCr |
| mouse TRAC | | | ArArCrArUrUrCrUrCrCr |
| | | | ArArGrArGrA/AltR2/ |
| MG29-1 | 5113 | MG29-1- | /AltR1/rUrArArUrUrUr |
| sgRNA | | mTRAC- | CrUrArCrUrGrUrUrGrUr |
| targeting | | sgRNA-B8 | ArGrArUrUrUrUrArCrAr |
| mouse TRAC | | | ArCrArUrUrCrUrCrCrAr |
| | | | ArGrArGrArU/AltR2/ |
| MG29-1 | 5114 | MG29-1- | /AltR1/rUrArArUrUrUr |
| sgRNA | | mTRAC- | CrUrArCrUrGrUrUrGrUr |
| targeting | | sgRNA-C8 | ArGrArUrUrUrArCrArAr |
| mouse TRAC | | | CrArUrUrCrUrCrCrArAr |
| | | | GrArGrArUrU/AltR2/ |
| MG29-1 | 5115 | MG29-1- | /AltR1/rUrArArUrUrUr |
| sgRNA | | mTRAC- | CrUrArCrUrGrUrUrGrUr |
| targeting | | sgRNA-D8 | ArGrArUrUrArCrArArCr |
| mouse TRAC | | | ArUrUrCrUrCrCrArArGr |
| | | | ArGrArUrUrU/AltR2/ |
| MG29-1 | 5116 | MG29-1- | /AltR1/rUrArArUrUrUr |
| sgRNA | | mTRAC- | CrUrArCrUrGrUrUrGrUr |
| targeting | | sgRNA-E8 | ArGrArUrArCrArArCrAr |
| mouse TRAC | | | UrUrCrUrCrCrArArGrAr |
| | | | GrArUrUrUrU/AltR2/ |
| MG29-1 | 5117 | MG29-1- | /AltR1/rUrArArUrUrUr |
| sgRNA | | mTRAC- | CrUrArCrUrGrUrUrGrUr |
| targeting | | sgRNA-F8 | ArGrArUrCrArArCrArUr |
| mouse TRAC | | | UrCrUrCrCrArArGrArGr |
| | | | ArUrUrUrUrA/AltR2/ |
| MG29-1 | 5118 | MG29-1- | /AltR1/rUrArArUrUrUr |
| sgRNA | | mTRAC- | CrUrArCrUrGrUrUrGrUr |
| targeting | | sgRNA-G8 | ArGrArUrArCrArGrGrGr |
| mouse TRAC | | | GrArGrUrCrUrGrCrCrAr |
| | | | UrGrGrGrGrG/AltR2/ |
| MG29-1 | 5119 | MG29-1- | /AltR1/rUrArArUrUrUr |
| sgRNA | | mTRAC- | CrUrArCrUrGrUrUrGrUr |
| targeting | | sgRNA-H8 | ArGrArUrCrArGrGrGrGr |
| mouse TRAC | | | ArGrUrCrUrGrCrCrArUr |
| | | | GrGrGrGrGrA/AltR2/ |
| MG29-1 | 5120 | MG29-1- | /AltR1/rUrArArUrUrUr |
| sgRNA | | mTRAC- | CrUrArCrUrGrUrUrGrUr |
| targeting | | sgRNA-A9 | ArGrArUrUrUrGrUrGrAr |
| mouse TRAC | | | ArUrGrGrUrCrArGrCrAr |
| | | | GrCrArGrUrG/AltR2/ |
| MG29-1 | 5121 | MG29-1- | /AltR1/rUrArArUrUrUr |
| sgRNA | | mTRAC- | CrUrArCrUrGrUrUrGrUr |
| targeting | | sgRNA-B9 | ArGrArUrUrGrUrGrArAr |
| mouse TRAC | | | UrGrGrUrCrArGrCrArGr |
| | | | CrArGrUrGrA/AltR2/ |
| MG29-1 | 5122 | MG29-1- | /AltR1/rUrArArUrUrUr |
| sgRNA | | mTRAC- | CrUrArCrUrGrUrUrGrUr |
| targeting | | sgRNA-C9 | ArGrArUrGrUrGrArArUr |
| mouse TRAC | | | GrGrUrCrArGrCrArGrCr |
| | | | ArGrUrGrArG/AltR2/ |
| MG29-1 | 5123 | MG29-1- | /AltR1/rUrArArUrUrUr |
| sgRNA | | mTRAC- | CrUrArCrUrGrUrUrGrUr |
| targeting | | sgRNA-D9 | ArGrArUrUrGrArArUrGr |
| mouse TRAC | | | GrUrCrArGrCrArGrCrAr |
| | | | GrUrGrArGrG/AltR2/ |
| MG29-1 | 5124 | MG29-1- | /AltR1/rUrArArUrUrUr |
| sgRNA | | mTRAC- | CrUrArCrUrGrUrUrGrUr |
| targeting | | sgRNA-E9 | ArGrArUrGrGrCrUrUrGr |
| mouse TRAC | | | ArArGrArArGrGrArGrCr |
| | | | GrGrArGrGrG/AltR2/ |
| MG29-1 | 5125 | MG29-1- | /AltR1/rUrArArUrUrUr |
| sgRNA | | mTRAC- | CrUrArCrUrGrUrUrGrUr |
| targeting | | sgRNA-F9 | ArGrArUrGrCrUrUrGrAr |
| mouse TRAC | | | ArGrArArGrGrArGrCrGr |
| | | | GrArGrGrGrG/AltR2/ |
| DNA sequence | 5126 | MG29-1- | ACTCCCAAATCAATGTGCCG |
| of TRAC | | mTRAC- | AA |
| target site | | target | |
| | | site-A1 | |
| DNA sequence | 5127 | MG29-1- | AAGATATCTTGGCAGGTGAA |
| of TRAC | | mTRAC- | GC |
| target site | | target | |
| | | site-B1 | |
| DNA sequence | 5128 | MG29-1- | ATGTCCAGCACAGTTTTGTC |
| of TRAC | | mTRAC- | AG |
| target site | | target | |
| | | site-C1 | |
| DNA sequence | 5129 | MG29-1- | GTCAGTGATGAACGTTCCAG |
| of TRAC | | mTRAC- | AT |
| target site | | target | |
| | | site-D1 | |
| DNA sequence | 5130 | MG29-1- | TCAGTGATGAACGTTCCAGA |
| of TRAC | | mTRAC- | TT |
| target site | | target | |
| | | site-E1 | |
| DNA sequence | 5131 | MG29-1- | CGGCACATTGATTTGGGAGT |
| of TRAC | | mTRAC- | CA |
| target site | | target | |
| | | site-F1 | |
| DNA sequence | 5132 | MG29-1- | GGCACATTGATTTGGGAGTC |
| of TRAC | | mTRAC- | AA |
| target site | | target | |
| | | site-G1 | |
| DNA sequence | 5133 | MG29-1- | GGAGTCAAAGTCGGTGAACA |
| of TRAC | | mTRAC- | GG |
| target site | | target | |
| | | site-H1 | |
| DNA sequence | 5134 | MG29-1- | AACTGGTACACAGCAGGTTC |
| of TRAC | | mTRAC- | TG |
| target site | | target | |
| | | site-A2 | |
| DNA sequence | 5135 | MG29-1- | ACTGGTACACAGCAGGTTCT |
| of TRAC | | mTRAC- | GG |
| target site | | target | |
| | | site-B2 | |
| DNA sequence | 5136 | MG29-1- | TTTTCCCTTTTAGACGTTCC |
| of TRAC | | mTRAC- | CT |
| target site | | target | |
| | | site-C2 | |
| DNA sequence | 5137 | MG29-1- | CCCTTTTAGACGTTCCCTGT |
| of TRAC | | mTRAC- | GA |
| target site | | target | |
| | | site-D2 | |
| DNA sequence | 5138 | MG29-1- | CCTTTTAGACGTTCCCTGTG |
| of TRAC | | mTRAC- | AT |
| target site | | target | |
| | | site-E2 | |
| DNA sequence | 5139 | MG29-1- | AGACGTTCCCTGTGATGCCA |
| of TRAC | | mTRAC- | CG |
| target site | | target | |
| | | site-F2 | |
| DNA sequence | 5140 | MG29-1- | GACGTTCCCTGTGATGCCAC |
| of TRAC | | mTRAC- | GT |
| target site | | target | |
| | | site-G2 | |
| DNA sequence | 5141 | MG29-1- | AAAGCTTTTCTCAGTCAACG |
| of TRAC | | mTRAC- | TG |
| target site | | target | |
| | | site-H2 | |
| DNA sequence | 5142 | MG29-1- | CTCAGTCAACGTGGCATCAC |
| of TRAC | | mTRAC- | AG |
| target site | | target | |
| | | site-A3 | |
| DNA sequence | 5143 | MG29-1- | TCAGTCAACGTGGCATCACA |
| of TRAC | | mTRAC- | GG |
| target site | | target | |
| | | site-B3 | |
| DNA sequence | 5144 | MG29-1- | ACAGATATGAACCTAAACTT |
| of TRAC | | mTRAC- | TC |
| target site | | target | |
| | | site-C3 | |
| DNA sequence | 5145 | MG29-1- | CAGATATGAACCTAAACTTT |
| of TRAC | | mTRAC- | CA |
| target site | | target | |
| | | site-D3 | |
| DNA sequence | 5146 | MG29-1- | AAAACCTGTCAGTTATGGGA |
| of TRAC | | mTRAC- | CT |
| target site | | target | |
| | | site-E3 | |
| DNA sequence | 5147 | MG29-1- | ACCTGCTCATGACGCTGAGG |
| of TRAC | | mTRAC- | CT |
| target site | | target | |
| | | site-F3 | |
| DNA sequence | 5148 | MG29-1- | ATGCCTTCTTACCTCAACTG |
| of TRAC | | mTRAC- | GA |
| target site | | target | |
| | | site-G3 | |
| DNA sequence | 5149 | MG29-1- | AGCAGGAGGATTCGGAGTCC |
| of TRAC | | mTRAC- | CA |
| target site | | target | |
| | | site-H3 | |
| DNA sequence | 5150 | MG29-1- | TGAGGAAGGTTGCTGGAGAG |
| of TRAC | | mTRAC- | CT |
| target site | | target | |
| | | site-A4 | |
| DNA sequence | 5151 | MG29-1- | TTGTTTTTTTTTTTTTTGCG |
| of TRAC | | mTRAC- | GG |
| target site | | target | |
| | | site-B4 | |
| DNA sequence | 5152 | MG29-1- | TGTTTTTTTTTTTTTTGCGG |
| of TRAC | | mTRAC- | GT |
| target site | | target | |
| | | site-C4 | |
| DNA sequence | 5153 | MG29-1- | GTTTTTTTTTTTTTTGCGGG |
| of TRAC | | mTRAC- | TT |
| target site | | target | |
| | | site-D4 | |
| DNA sequence | 5154 | MG29-1- | TTTTTTTTTTTTTTGCGGGT |
| of TRAC | | mTRAC- | TT |
| target site | | target | |
| | | site-E4 | |
| DNA sequence | 5155 | MG29-1- | TTTTTTTTTTGCGGGTTTAT |
| of TRAC | | mTRAC- | TT |
| target site | | target | |
| | | site-F4 | |
| DNA sequence | 5156 | MG29-1- | TTTTTTTTTGCGGGTTTATT |
| of TRAC | | mTRAC- | TT |
| target site | | target | |
| | | site-G4 | |
| DNA sequence | 5157 | MG29-1- | TTTTTTTTGCGGGTTTATTT |
| of TRAC | | mTRAC- | TT |
| target site | | target | |
| | | site-H4 | |
| Guide Target | SEQ | Guide Name | SEQUENCE |
| | ID | | |
| | NO | | |
| DNA sequence | 5158 | MG29-1- | TTTTTTTGCGGGTTTATTTT |
| of TRAC | | mTRAC- | TT |
| target site | | target | |
| | | site-A5 | |
| DNA sequence | 5159 | MG29-1- | TTTTTTGCGGGTTTATTTTT |
| of TRAC | | mTRAC- | TT |
| target site | | target | |
| | | site-B5 | |
| DNA sequence | 5160 | MG29-1- | TTTTTGCGGGTTTATTTTTT |
| of TRAC | | mTRAC- | TA |
| target site | | target | |
| | | site-C5 | |
| DNA sequence | 5161 | MG29-1- | TTTTGCGGGTTTATTTTTTT |
| of TRAC | | mTRAC- | AA |
| target site | | target | |
| | | site-D5 | |
| DNA sequence | 5162 | MG29-1- | TTTGCGGGTTTATTTTTTTA |
| of TRAC | | mTRAC- | AG |
| target site | | target | |
| | | site-E5 | |
| DNA sequence | 5163 | MG29-1- | TTGCGGGTTTATTTTTTTAA |
| of TRAC | | mTRAC- | GC |
| target site | | target | |
| | | site-F5 | |
| DNA sequence | 5164 | MG29-1- | TGCGGGTTTATTTTTTTAAG |
| of TRAC | | mTRAC- | CA |
| target site | | target | |
| | | site-G5 | |
| DNA sequence | 5165 | MG29-1- | GCGGGTTTATTTTTTTAAGC |
| of TRAC | | mTRAC- | AT |
| target site | | target | |
| | | site-H5 | |
| DNA sequence | 5166 | MG29-1- | CGGGTTTATTTTTTTAAGCA |
| of TRAC | | mTRAC- | TC |
| target site | | target | |
| | | site-A6 | |
| DNA sequence | 5167 | MG29-1- | TTTTTTTAAGCATCCATGAA |
| of TRAC | | mTRAC- | GA |
| target site | | target | |
| | | site-B6 | |
| DNA sequence | 5168 | MG29-1- | TTTAAGCATCCATGAAGAAA |
| of TRAC | | mTRAC- | TG |
| target site | | target | |
| | | site-C6 | |
| DNA sequence | 5169 | MG29-1- | TTAAGCATCCATGAAGAAAT |
| of TRAC | | mTRAC- | GC |
| target site | | target | |
| | | site-D6 | |
| DNA sequence | 5170 | MG29-1- | TAAGCATCCATGAAGAAATG |
| of TRAC | | mTRAC- | CA |
| target site | | target | |
| | | site-E6 | |
| DNA sequence | 5171 | MG29-1- | AAGCATCCATGAAGAAATGC |
| of TRAC | | mTRAC- | AT |
| target site | | target | |
| | | site-F6 | |
| DNA sequence | 5172 | MG29-1- | AGCATCCATGAAGAAATGCA |
| of TRAC | | mTRAC- | TA |
| target site | | target | |
| | | site-G6 | |
| DNA sequence | 5173 | MG29-1- | ATCAAGGTGTAGAAATTATC |
| of TRAC | | mTRAC- | TC |
| target site | | target | |
| | | site-H6 | |
| DNA sequence | 5174 | MG29-1- | GGTTTTTCTGAATCACCTTT |
| of TRAC | | mTRAC- | AA |
| target site | | target | |
| | | site-A7 | |
| DNA sequence | 5175 | MG29-1- | GTTTTTCTGAATCACCTTTA |
| of TRAC | | mTRAC- | AT |
| target site | | target | |
| | | site-B7 | |
| DNA sequence | 5176 | MG29-1- | TCTGAATCACCTTTAATGAT |
| of TRAC | | mTRAC- | GT |
| target site | | target | |
| | | site-C7 | |
| DNA sequence | 5177 | MG29-1- | CTGAATCACCTTTAATGATG |
| of TRAC | | mTRAC- | TC |
| target site | | target | |
| | | site-D7 | |
| DNA sequence | 5178 | MG29-1- | TGAATCACCTTTAATGATGT |
| of TRAC | | mTRAC- | CA |
| target site | | target | |
| | | site-E7 | |
| DNA sequence | 5179 | MG29-1- | ATGATGTCATGGACAGCAGA |
| of TRAC | | mTRAC- | AT |
| target site | | target | |
| | | site-F7 | |
| DNA sequence | 5180 | MG29-1- | TACACCTTGATGAAAGAGTA |
| of TRAC | | mTRAC- | AT |
| target site | | target | |
| | | site-G7 | |
| DNA sequence | 5181 | MG29-1- | TTCATGGATGCTTAAAAAAA |
| of TRAC | | mTRAC- | TA |
| target site | | target | |
| | | site-H7 | |
| DNA sequence | 5182 | MG29-1- | TTTTACAACATTCTCCAAGA |
| of TRAC | | mTRAC- | GA |
| target site | | target | |
| | | site-A8 | |
| DNA sequence | 5183 | MG29-1- | TTTACAACATTCTCCAAGAG |
| of TRAC | | mTRAC- | AT |
| target site | | target | |
| | | site-B8 | |
| DNA sequence | 5184 | MG29-1- | TTACAACATTCTCCAAGAGA |
| of TRAC | | mTRAC- | TT |
| target site | | target | |
| | | site-C8 | |
| DNA sequence | 5185 | MG29-1- | TACAACATTCTCCAAGAGAT |
| of TRAC | | mTRAC- | TT |
| target site | | target | |
| | | site-D8 | |
| DNA sequence | 5186 | MG29-1- | ACAACATTCTCCAAGAGATT |
| of TRAC | | mTRAC- | TT |
| target site | | target | |
| | | site-E8 | |
| DNA sequence | 5187 | MG29-1- | CAACATTCTCCAAGAGATTT |
| of TRAC | | mTRAC- | TA |
| target site | | target | |
| | | site-F8 | |
| DNA sequence | 5188 | MG29-1- | ACAGGGGAGTCTGCCATGGG |
| of TRAC | | mTRAC- | GG |
| target site | | target | |
| | | site-G8 | |
| DNA sequence | 5189 | MG29-1- | CAGGGGAGTCTGCCATGGGG |
| of TRAC | | mTRAC- | GA |
| target site | | target | |
| | | site-H8 | |
| DNA sequence | 5190 | MG29-1- | TTGTGAATGGTCAGCAGCAG |
| of TRAC | | mTRAC- | TG |
| target site | | target | |
| | | site-A9 | |
| DNA sequence | 5191 | MG29-1- | TGTGAATGGTCAGCAGCAGT |
| of TRAC | | mTRAC- | GA |
| target site | | target | |
| | | site-B9 | |
| DNA sequence | 5192 | MG29-1- | GTGAATGGTCAGCAGCAGTG |
| of TRAC | | mTRAC- | AG |
| target site | | target | |
| | | site-C9 | |
| DNA sequence | 5193 | MG29-1- | TGAATGGTCAGCAGCAGTGA |
| of TRAC | | mTRAC- | GG |
| target site | | target | |
| | | site-D9 | |
| DNA sequence | 5194 | MG29-1- | GGCTTGAAGAAGGAGCGGAG |
| of TRAC | | mTRAC- | GG |
| target site | | target | |
| | | site-E9 | |
| DNA sequence | 5195 | MG29-1- | GCTTGAAGAAGGAGCGGAGG |
| of TRAC | | mTRAC- | GG |
| target site | | target | |
| | | site-F9 | |

r; native RNA linkage comprising the sugar ribose (for example the ribose or RNA form of the A base is written rA), d; deoxyribose sugar (DNA) linkage (for example a deoxyribose form of the A base is written dA), *; between bases in which one of the oxygen molecules in the phosphodiester bond is replaced with sulfur; AltR1 and AltR2 refer to IDT technologies' proprietary 5′ and 3′ AltR modifications

[0506] For analysis by flow cytometry, 3 days post-nucleofection, 100,000 mouse T cells were stained with anti-mouse CD3 antibody (Clone 17A2, Invitrogen 11-0032-82) for 30 minutes at 4C and analyzed on an Attune Nxt flow cytometer. Guides at the 3′ end of the mouse TRAC gene have high levels of indels but fail to produce a knock-out of TRAC. Surprisingly and unexpectedly, the phenotype does not correlate with the genotype near the end of the gene, likely due to the retention of function of truncated alleles and the failure of nonsense-mediated decay pathways to remove prematurely truncated out-of-frame mRNAs (FIG. 65).

### Example 19—Gene Editing Outcomes at the DNA Level for Mouse TRBC1 and TRBC2

[0507] Primary T cells were purified from C57BL/6 mouse spleens. Nucleofection of MG29-1 RNPs (104 pmol protein/120 pmol guide) (TRBC1: SEQ ID NOs: 5196-5210; TRBC2: SEQ ID NOs: 5226-5246) was performed into T cells (200,000) using the Lonza 4D electroporator and 100 pmol transfection enhancer (IDT). Cells were harvested and genomic DNA prepared five days post-transfection. PCR primers appropriate for use in NGS-based DNA sequencing were generated, optimized, and used to amplify the individual target sequences for each guide RNA (TRBC1: SEQ ID NOs: 5211-5225; TRBC2: SEQ ID NOs: 5247-5267). The amplicons were sequenced on an Illumina MiSeq machine and analyzed with a proprietary Python script to measure gene editing (FIGS. 66A and 66B). For analysis by flow cytometry, 3 days post-nucleofection, 100,000 mouse T cells were stained with anti-mouse CD3 antibody (Clone 17A2, Invitrogen 11-0032-82) for 30 minutes at 4C and analyzed on an Attune Nxt flow cytometer.

TABLE 14H
Sequences of Guide RNAs and Sequences
Targeted for Example 45

| | SEQ | | |
|---|---|---|---|
| Guide | ID | Guide | |
| Target | NO | Name | SEQUENCE |
| MG29-1 | 5196 | MG29-1- | /AltR1/rUrArArUrUrUr |
| sgRNA | | mTRBC1- | CrUrArCrUrGrUrUrGrUr |
| targeting | | sgRNA- | ArGrArUrCrUrUrUrCrCr |
| mouse TRBC1 | | A1 | ArGrArGrGrArUrCrUrGr |
| | | | ArGrArArArU/AltR2/ |
| MG29-1 | 5197 | MG29-1- | /AltR1/rUrArArUrUrUr |
| sgRNA | | mTRBC1- | CrUrArCrUrGrUrUrGrUr |
| targeting | | sgRNA- | ArGrArUrCrArGrArGrGr |
| mouse TRBC1 | | B1 | ArUrCrUrGrArGrArArAr |
| | | | UrGrUrGrArC/AltR2/ |
| MG29-1 | 5198 | MG29-1- | /AltR1/rUrArArUrUrUr |
| sgRNA | | mTRBC1- | CrUrArCrUrGrUrUrGrUr |
| targeting | | sgRNA- | ArGrArUrArGrCrCrArUr |
| mouse TRBC1 | | C1 | CrArArArArGrCrArGrAr |
| | | | GrArUrUrGrC/AltR2/ |
| MG29-1 | 5199 | MG29-1- | /AltR1/rUrArArUrUrUr |
| sgRNA | | mTRBC1- | CrUrArCrUrGrUrUrGrUr |
| targeting | | sgRNA- | ArGrArUrArGrArGrGrAr |
| mouse TRBC1 | | D1 | GrGrArCrArArGrUrGrGr |
| | | | CrCrArGrArG/AltR2/ |
| MG29-1 | 5200 | MG29-1- | /AltR1/rUrArArUrUrUr |
| sgRNA | | mTRBC1- | CrUrArCrUrGrUrUrGrUr |
| targeting | | sgRNA- | ArGrArUrGrGrUrGrArGr |
| mouse TRBC1 | | E1 | CrCrCrUrCrUrGrGrCrCr |
| | | | ArCrUrUrGrU/AltR2/ |
| MG29-1 | 5201 | MG29-1- | /AltR1/rUrArArUrUrUr |
| sgRNA | | mTRBC1- | CrUrArCrUrGrUrUrGrUr |
| targeting | | sgRNA- | ArGrArUrGrUrUrUrGrUr |
| mouse TRBC1 | | F1 | UrUrGrCrArArUrCrUrCr |
| | | | UrGrCrUrUrU/AltR2/ |
| MG29-1 | 5202 | MG29-1- | /AltR1/rUrArArUrUrUr |
| sgRNA | | mTRBC1- | CrUrArCrUrGrUrUrGrUr |
| targeting | | sgRNA- | ArGrArUrUrUrUrGrUrUr |
| mouse TRBC1 | | G1 | UrGrCrArArUrCrUrCrUr |
| | | | GrCrUrUrUrU/AltR2/ |
| MG29-1 | 5203 | MG29-1- | /AltR1/rUrArArUrUrUr |
| sgRNA | | mTRBC1- | CrUrArCrUrGrUrUrGrUr |
| targeting | | sgRNA- | ArGrArUrUrUrUrGrCrAr |
| mouse TRBC1 | | H1 | ArUrCrUrCrUrGrCrUrUr |
| | | | UrUrGrArUrG/AltR2/ |
| MG29-1 | 5204 | MG29-1- | /AltR1/rUrArArUrUrUr |
| sgRNA | | mTRBC1- | CrUrArCrUrGrUrUrGrUr |
| targeting | | sgRNA- | ArGrArUrCrArArUrCrUr |
| mouse TRBC1 | | A2 | CrUrGrCrUrUrUrUrGrAr |
| | | | UrGrGrCrUrC/AltR2/ |
| MG29-1 | 5205 | MG29-1- | /AltR1/rUrArArUrUrUr |
| sgRNA | | mTRBC1- | CrUrArCrUrGrUrUrGrUr |
| targeting | | sgRNA- | ArGrArUrGrArUrGrGrCr |
| mouse TRBC1 | | B2 | UrCrArArArCrArArGrGr |
| | | | ArGrArCrCrU/AltR2/ |
| MG29-1 | 5206 | MG29-1- | /AltR1/rUrArArUrUrUr |
| sgRNA | | mTRBC1- | CrUrArCrUrGrUrUrGrUr |
| targeting | | sgRNA- | ArGrArUrArUrGrGrCrUr |
| mouse TRBC1 | | C2 | CrArArArCrArArGrGrAr |
| | | | GrArCrCrUrU/AltR2/ |
| MG29-1 | 5207 | MG29-1- | /AltR1/rUrArArUrUrUr |
| sgRNA | | mTRBC1- | CrUrArCrUrGrUrUrGrUr |
| targeting | | sgRNA- | ArGrArUrUrCrUrCrUrUr |
| mouse TRBC1 | | D2 | CrUrUrUrCrArGrArCrUr |
| | | | GrUrGrGrGrA/AltR2/ |
| MG29-1 | 5208 | MG29-1- | /AltR1/rUrArArUrUrUr |
| sgRNA | | mTRBC1- | CrUrArCrUrGrUrUrGrUr |
| targeting | | sgRNA- | ArGrArUrCrUrGrUrCrAr |
| mouse TRBC1 | | E2 | ArCrArGrCrArUrCrCrUr |
| | | | ArUrCrArArC/AltR2/ |
| MG29-1 | 5209 | MG29-1- | /AltR1/rUrArArUrUrUr |
| sgRNA | | mTRBC1- | CrUrArCrUrGrUrUrGrUr |
| targeting | | sgRNA- | ArGrArUrUrGrUrCrArAr |
| mouse TRBC1 | | F2 | CrArGrCrArUrCrCrUrAr |
| | | | UrCrArArCrA/AltR2/ |
| MG29-1 | 5210 | MG29-1- | /AltR1/rUrArArUrUrUr |
| sgRNA | | mTRBC1- | CrUrArCrUrGrUrUrGrUr |
| targeting | | sgRNA- | ArGrArUrCrCrUrArGrCr |
| mouse TRBC1 | | G2 | ArGrGrArUrCrUrCrArUr |
| | | | ArGrArGrGrA/AltR2/ |
| DNA sequence | 5211 | MG29-1- | CTTTCCAGAGGATCTGAGAA |
| of TRBC1 | | mTRBC1- | AT |
| target site | | target | |
| | | site-A1 | |
| DNA sequence | 5212 | MG29-1- | CAGAGGATCTGAGAAATGTG |
| of TRBC1 | | mTRBC1- | AC |
| target site | | target | |
| | | site-B1 | |
| DNA sequence | 5213 | MG29-1- | AGCCATCAAAAGCAGAGATT |
| of TRBC1 | | mTRBC1- | GC |
| target site | | target | |
| | | site-C1 | |
| DNA sequence | 5214 | MG29-1- | AGAGGAGGACAAGTGGCCAG |
| of TRBC1 | | mTRBC1- | AG |
| target site | | target | |
| | | site-D1 | |
| DNA sequence | 5215 | MG29-1- | GGTGAGCCCTCTGGCCACTT |
| of TRBC1 | | m TRBC1- | GT |
| target site | | target | |
| | | site-E1 | |
| DNA sequence | 5216 | MG29-1- | GTTTGTTTGCAATCTCTGCT |
| of TRBC1 | | mTRBC1- | TT |
| target site | | target | |
| | | site-F1 | |
| DNA sequence | 5217 | MG29-1- | TTTGTTTGCAATCTCTGCTT |
| of TRBC1 | | mTRBC1- | TT |
| target site | | target | |
| | | site-G1 | |
| DNA sequence | 5218 | MG29-1- | TTTGCAATCTCTGCTTTTGA |
| of TRBC1 | | mTRBC1- | TG |
| target site | | target | |
| | | site-H1 | |
| DNA sequence | 5219 | MG29-1- | CAATCTCTGCTTTTGATGGC |
| of TRBC1 | | mTRBC1- | TC |
| target site | | target | |
| | | site-A2 | |
| DNA sequence | 5220 | MG29-1- | GATGGCTCAAACAAGGAGAC |
| of TRBC1 | | mTRBC1- | CT |
| target site | | target | |
| | | site-B2 | |
| DNA sequence | 5221 | MG29-1- | ATGGCTCAAACAAGGAGACC |
| of TRBC1 | | mTRBC1- | TT |
| target site | | target | |
| | | site-C2 | |
| DNA sequence | 5222 | MG29-1- | TCTCTTCTTTCAGACTGTGG |
| of TRBC1 | | mTRBC1- | GA |
| target site | | target | |
| | | site-D2 | |
| DNA sequence | 5223 | MG29-1- | CTGTCAACAGCATCCTATCA |
| of TRBC1 | | mTRBC1- | AC |
| target site | | target | |
| | | site-E2 | |
| DNA sequence | 5224 | MG29-1- | TGTCAACAGCATCCTATCAA |
| of TRBC1 | | mTRBC1- | CA |
| target site | | target | |
| | | site-F2 | |
| DNA sequence | 5225 | MG29-1- | CCTAGCAGGATCTCATAGAG |
| of TRBC1 | | mTRBC1- | GA |
| target site | | target | |
| | | site-G2 | |
| MG29-1 | 5226 | MG29-1- | /AltR1/rUrArArUrUrUr |
| sgRNA | | mTRBC2- | CrUrArCrUrGrUrUrGrUr |
| targeting | | sgRNA- | ArGrArUrCrUrUrUrCrCr |
| mouse TRBC2 | | A1 | ArGrArGrGrArUrCrUrGr |
| | | | ArGrArArArU/AltR2/ |
| MG29-1 | 5227 | MG29-1- | /AltR1/rUrArArUrUrUr |
| sgRNA | | mTRBC2- | CrUrArCrUrGrUrUrGrUr |
| targeting | | sgRNA- | ArGrArUrCrArGrArGrGr |
| mouse TRBC2 | | B1 | ArUrCrUrGrArGrArArAr |
| | | | UrGrUrGrArC/AltR2/ |
| MG29-1 | 5228 | MG29-1- | /AltR1/rUrArArUrUrUr |
| sgRNA | | mTRBC2- | CrUrArCrUrGrUrUrGrUr |
| targeting | | sgRNA- | ArGrArUrArGrCrCrArUr |
| mouse TRBC2 | | C1 | CrArArArArGrCrArGrAr |
| | | | GrArUrUrGrC/AltR2/ |
| MG29-1 | 5229 | MG29-1- | /AltR1/rUrArArUrUrUr |
| sgRNA | | mTRBC2- | CrUrArCrUrGrUrUrGrUr |
| targeting | | sgRNA- | ArGrArUrArGrArGrGrAr |
| mouse TRBC2 | | D1 | GrGrArCrArArGrUrGrGr |
| | | | CrCrArGrArG/AltR2/ |
| MG29-1 | 5230 | MG29-1- | /AltR1/rUrArArUrUrUr |
| sgRNA | | mTRBC2- | CrUrArCrUrGrUrUrGrUr |
| targeting | | sgRNA- | ArGrArUrCrUrCrArUrGr |
| mouse TRBC2 | | E1 | ArGrCrUrCrCrGrCrArCr |
| | | | UrUrArCrCrU/AltR2/ |
| MG29-1 | 5231 | MG29-1- | /AltR1/rUrArArUrUrUr |
| sgRNA | | mTRBC2- | CrUrArCrUrGrUrUrGrUr |
| targeting | | sgRNA- | ArGrArUrGrGrUrGrArGr |
| mouse TRBC2 | | F1 | CrCrCrUrCrUrGrGrCrCr |
| | | | ArCrUrUrGrU/AltR2/ |
| MG29-1 | 5232 | MG29-1- | /AltR1/rUrArArUrUrUr |
| sgRNA | | mTRBC2- | CrUrArCrUrGrUrUrGrUr |
| targeting | | sgRNA- | ArGrArUrGrArGrGrArUr |
| mouse TRBC2 | | G1 | UrGrUrGrCrCrArGrArAr |
| | | | GrGrUrArGrC/AltR2/ |
| MG29-1 | 5233 | MG29-1- | /AltR1/rUrArArUrUrUr |
| sgRNA | | mTRBC2- | CrUrArCrUrGrUrUrGrUr |
| targeting | | sgRNA- | ArGrArUrGrUrUrUrGrUr |
| mouse TRBC2 | | H1 | UrUrGrCrArArUrCrUrCr |
| | | | UrGrCrUrUrU/AltR2/ |
| MG29-1 | 5234 | MG29-1- | /AltR1/rUrArArUrUrUr |
| sgRNA | | mTRBC2- | CrUrArCrUrGrUrUrGrUr |
| targeting | | sgRNA- | ArGrArUrUrUrUrGrUrUr |
| mouse TRBC2 | | A2 | UrGrCrArArUrCrUrCrUr |
| | | | GrCrUrUrUrU/AltR2/ |
| MG29-1 | 5235 | MG29-1- | /AltR1/rUrArArUrUrUr |
| sgRNA | | mTRBC2- | CrUrArCrUrGrUrUrGrUr |
| targeting | | sgRNA- | ArGrArUrUrUrUrGrCrAr |
| mouse TRBC2 | | B2 | ArUrCrUrCrUrGrCrUrUr |
| | | | UrUrGrArUrG/AltR2/ |
| MG29-1 | 5236 | MG29-1- | /AltR1/rUrArArUrUrUr |
| sgRNA | | mTRBC2- | CrUrArCrUrGrUrUrGrUr |
| targeting | | sgRNA- | ArGrArUrCrArArUrCrUr |
| mouse TRBC2 | | C2 | CrUrGrCrUrUrUrUrGrAr |
| | | | UrGrGrCrUrC/AltR2/ |
| MG29-1 | 5237 | MG29-1- | /AltR1/rUrArArUrUrUr |
| sgRNA | | mTRBC2- | CrUrArCrUrGrUrUrGrUr |
| targeting | | sgRNA- | ArGrArUrGrArUrGrGrCr |
| mouse TRBC2 | | D2 | UrCrArArArCrArArGrGr |
| | | | ArGrArCrCrU/AltR2/ |
| MG29-1 | 5238 | MG29-1- | /AltR1/rUrArArUrUrUr |
| sgRNA | | mTRBC2- | CrUrArCrUrGrUrUrGrUr |
| targeting | | sgRNA- | ArGrArUrArUrGrGrCrUr |
| mouse TRBC2 | | E2 | CrArArArCrArArGrGrAr |
| | | | GrArCrCrUrU/AltR2/ |
| MG29-1 | 5239 | MG29-1- | /AltR1/rUrArArUrUrUr |
| sgRNA | | mTRBC2- | CrUrArCrUrGrUrUrGrUr |
| targeting | | sgRNA- | ArGrArUrCrUrCrCrCrUr |
| mouse TRBC2 | | F2 | CrUrCrCrUrUrUrCrUrUr |
| | | | UrCrArGrArC/AltR2/ |
| MG29-1 | 5240 | MG29-1- | /AltR1/rUrArArUrUrUr |
| sgRNA | | mTRBC2- | CrUrArCrUrGrUrUrGrUr |
| targeting | | sgRNA- | ArGrArUrUrCrCrCrUrCr |
| mouse TRBC2 | | G2 | UrCrCrUrUrUrCrUrUrUr |
| | | | CrArGrArCrU/AltR2/ |
| MG29-1 | 5241 | MG29-1- | /AltR1/rUrArArUrUrUr |
| sgRNA | | mTRBC2- | CrUrArCrUrGrUrUrGrUr |
| targeting | | sgRNA- | ArGrArUrUrUrUrCrArGr |
| mouse TRBC2 | | H2 | ArCrUrGrUrGrGrArArUr |
| | | | CrArCrUrUrC/AltR2/ |
| MG29-1 | 5242 | MG29-1- | /AltR1/rUrArArUrUrUr |
| sgRNA | | mTRBC2- | CrUrArCrUrGrUrUrGrUr |
| targeting | | sgRNA- | ArGrArUrArGrArCrUrGr |
| mouse TRBC2 | | A3 | UrGrGrArArUrCrArCrUr |
| | | | UrCrArGrGrU/AltR2/ |
| MG29-1 | 5243 | MG29-1- | /AltR1/rUrArArUrUrUr |
| sgRNA | | mTRBC2- | CrUrArCrUrGrUrUrGrUr |
| targeting | | sgRNA- | ArGrArUrCrUrGrUrCrAr |
| mouse TRBC2 | | B3 | ArCrArGrCrArUrCrCrUr |
| | | | ArUrCrArUrC/AltR2/ |
| MG29-1 | 5244 | MG29-1- | /AltR1/rUrArArUrUrUr |
| sgRNA | | mTRBC2- | CrUrArCrUrGrUrUrGrUr |
| targeting | | sgRNA- | ArGrArUrUrCrCrArUrCr |
| mouse TRBC2 | | C3 | CrUrArCrCrArUrUrCrUr |
| | | | UrArCrCrArU/AltR2/ |
| MG29-1 | 5245 | MG29-1- | /AltR1/rUrArArUrUrUr |
| sgRNA | | mTRBC2- | CrUrArCrUrGrUrUrGrUr |
| targeting | | sgRNA- | ArGrArUrUrCrArGrGrUr |
| mouse TRBC2 | | D3 | CrArArGrArArArArArAr |
| | | | ArArUrUrCrC/AltR2/ |
| MG29-1 | 5246 | MG29-1- | /AltR1/rUrArArUrUrUr |
| sgRNA | | mTRBC2- | CrUrArCrUrGrUrUrGrUr |
| targeting | | sgRNA- | ArGrArUrUrCrUrCrArGr |
| mouse TRBC2 | | E3 | GrArArUrUrUrUrUrUrUr |
| | | | UrCrUrUrGrA/AltR2/ |
| DNA sequence | 5247 | MG29-1- | CTTTCCAGAGGATCTGAGAA |
| of TRBC2 | | mTRBC2- | AT |
| target site | | target | |
| | | site-A1 | |
| DNA sequence | 5248 | MG29-1- | CAGAGGATCTGAGAAATGTG |
| of TRBC2 | | mTRBC2- | AC |
| target site | | target | |
| | | site-B1 | |
| DNA sequence | 5249 | MG29-1- | AGCCATCAAAAGCAGAGATT |
| of TRBC2 | | mTRBC2- | GC |
| target site | | target | |
| | | site-C1 | |
| DNA sequence | 5250 | MG29-1- | AGAGGAGGACAAGTGGCCAG |
| of TRBC2 | | mTRBC2- | AG |
| target site | | target | |
| | | site-D1 | |
| DNA sequence | 5251 | MG29-1- | CTCATGAGCTCCGCACTTAC |
| of TRBC2 | | mTRBC2- | CT |
| target site | | target | |
| | | site-E1 | |
| DNA sequence | 5252 | MG29-1- | GGTGAGCCCTCTGGCCACTT |
| of TRBC2 | | mTRBC2- | GT |
| target site | | target | |
| | | site-F1 | |
| DNA sequence | 5253 | MG29-1- | GAGGATTGTGCCAGAAGGTA |
| of TRBC2 | | mTRBC2- | GC |
| target site | | target | |
| | | site-G1 | |
| DNA sequence | 5254 | MG29-1- | GTTTGTTTGCAATCTCTGCT |
| of TRBC2 | | mTRBC2- | TT |
| target site | | target | |
| | | site-H1 | |
| DNA sequence | 5255 | MG29-1- | TTTGTTTGCAATCTCTGCTT |
| of TRBC2 | | mTRBC2- | TT |
| target site | | target | |
| | | site-A2 | |
| DNA sequence | 5256 | MG29-1- | TTTGCAATCTCTGCTTTTGA |
| of TRBC2 | | mTRBC2- | TG |
| target site | | target | |
| | | site-B2 | |
| DNA sequence | 5257 | MG29-1- | CAATCTCTGCTTTTGATGGC |
| of TRBC2 | | mTRBC2- | TC |
| target site | | target | |
| | | site-C2 | |
| DNA sequence | 5258 | MG29-1- | GATGGCTCAAACAAGGAGAC |
| of TRBC2 | | mTRBC2- | CT |
| target site | | target | |
| | | site-D2 | |
| DNA sequence | 5259 | MG29-1- | ATGGCTCAAACAAGGAGACC |
| of TRBC2 | | mTRBC2- | TT |
| target site | | target | |
| | | site-E2 | |
| DNA sequence | 5260 | MG29-1- | CTCCCTCTCCTTTCTTTCAG |
| of TRBC2 | | mTRBC2- | AC |
| target site | | target | |
| | | site-F2 | |
| DNA sequence | 5261 | MG29-1- | TCCCTCTCCTTTCTTTCAGA |
| of TRBC2 | | mTRBC2- | CT |
| target site | | target | |
| | | site-G2 | |
| DNA sequence | 5262 | MG29-1- | TTTCAGACTGTGGAATCACT |
| of TRBC2 | | mTRBC2- | TC |
| target site | | target | |
| | | site-H2 | |
| DNA sequence | 5263 | MG29-1- | AGACTGTGGAATCACTTCAG |
| of TRBC2 | | mTRBC2- | GT |
| target site | | target | |
| | | site-A3 | |
| DNA sequence | 5264 | MG29-1- | CTGTCAACAGCATCCTATCA |
| of TRBC2 | | mTRBC2- | TC |
| target site | | target | |
| | | site-B3 | |
| DNA sequence | 5265 | MG29-1- | TCCATCCTACCATTCTTACC |
| of TRBC2 | | mTRBC2- | AT |
| target site | | target | |
| | | site-C3 | |
| DNA sequence | 5266 | MG29-1- | TCAGGTCAAGAAAAAAAATT |
| of TRBC2 | | mTRBC2- | CC |
| target site | | target | |
| | | site-D3 | |
| DNA sequence | 5267 | MG29-1- | TCTCAGGAATTTTTTTTCTT |
| of TRBC2 | | mTRBC2- | GA |
| target site | | target | |
| | | site-E3 | |

r; native RNA linkage comprising the sugar ribose (for example the ribose or RNA form of the A base is written rA), d; deoxyribose sugar (DNA) linkage (for example a deoxyribose form of the A base is written dA), *; between bases in which one of the oxygen molecules in the phosphodiester bond is replaced with sulfur; AltR1 and AltR2 refer to IDT technologies' proprietary 5′ and 3′ AltR modifications

### Example 20—Gene Editing Outcomes at the DNA Level for Human TRBC1/2

[0508] Primary T cells were purified from PMBCs using a negative selection kit (Miltenyi) according to the manufacturer's recommendations. Nucleofection of MG29-1 RNPs (106 pmol protein/160 pmol guide) (SEQ ID Nos: 5642-5660) was performed into T cells (200,000) using the Lonza 4D electroporator. For analysis by flow cytometry, 3 days post-nucleofection, 100,000 T cells were stained with anti-CD3 antibody for 30 minutes at 4C and analyzed on an Attune Nxt flow cytometer (FIG. 66C).

TABLE 14I
Sequences of Guide RNAs and Sequences
Targeted for Example 46

| | SEQ | | |
|---|---|---|---|
| Guide | ID | Guide | |
| Target | NO | Name | SEQUENCE |
| MG29-1 | 5642 | MG29-1- | /AltR1/rUrArArUrUrUr |
| sgRNA | | TRBC1/2- | CrUrArCrUrGrUrUrGrUr |
| targeting | | sgRNA- | ArGrArUrArGrCrCrArU |
| human | | A1 | rCrArGrArArGrCrArGrA |
| TRBC1/2 | | | rGrArUrC/AltR2/ |
| MG29-1 | 5643 | MG29-1- | /AltR1/rUrArArUrUrUr |
| sgRNA | | TRBC1/2- | CrUrArCrUrGrUrUrGrUr |
| targeting | | sgRNA- | ArGrArUrGrGrUrGrUrG |
| human | | B1 | rGrGrArGrArUrCrUrCrU |
| TRBC1/2 | | | rGrCrUrU/AltR2/ |
| MG29-1 | 5644 | MG29-1- | /AltR1/rUrArArUrUrUr |
| sgRNA | | TRBC1/2- | CrUrArCrUrGrUrUrGrUr |
| targeting | | sgRNA- | ArGrArUrGrGrGrUrGrU |
| human | | C1 | rGrGrGrArGrArUrCrUrC |
| TRBC1/2 | | | rUrGrCrU/AltR2/ |
| MG29-1 | 5645 | MG29-1- | /AltR1/rUrArArUrUrUr |
| sgRNA | | TRBC1/2- | CrUrArCrUrGrUrUrGrUr |
| targeting | | sgRNA- | ArGrArUrGrCrCrCrUrA |
| human | | D1 | rUrCrCrUrGrGrGrUrCrC |
| TRBC1/2 | | | rArCrUrC/AltR2/ |
| MG29-1 | 5646 | MG29-1- | /AltR1/rUrArArUrUrUr |
| sgRNA | | TRBC1/2- | CrUrArCrUrGrUrUrGrUr |
| targeting | | sgRNA- | ArGrArUrUrUrUrCrArG |
| human | | E1 | rArCrUrGrUrGrGrCrUrU |
| TRBC1/2 | | | rUrArCrC/AltR2/ |
| MG29-1 | 5647 | MG29-1- | /AltR1/rUrArArUrUrUr |
| sgRNA | | TRBC1/2- | CrUrArCrUrGrUrUrGrUr |
| targeting | | sgRNA- | ArGrArUrArGrArCrUrG |
| human | | F1 | rUrGrGrCrUrUrUrArCrC |
| TRBC1/2 | | | rUrCrGrG/AltR2/ |
| MG29-1 | 5648 | MG29-1- | /AltR1/rUrArArUrUrUr |
| sgRNA | | TRBC1/2- | CrUrArCrUrGrUrUrGrUr |
| targeting | | sgRNA- | ArGrArUrUrCrUrUrCrU |
| human | | G1 | rGrCrArGrGrUrCrArArG |
| TRBC1/2 | | | rArGrArA/AltR2/ |
| MG29-1 | 5649 | MG29-1- | /AltR1/rUrArArUrUrUr |
| sgRNA | | TRBC1/2- | CrUrArCrUrGrUrUrGrUr |
| targeting | | sgRNA- | ArGrArUrUrCrUrUrGrA |
| human | | H1 | rCrCrUrGrCrArGrArArG |
| TRBC1/2 | | | rArGrArA/AltR2/ |
| MG29-1 | 5650 | MG29-1- | /AltR1/rUrArArUrUrUr |
| sgRNA | | TRBC1/2- | CrUrArCrUrGrUrUrGrUr |
| targeting | | sgRNA- | ArGrArUrArGrGrUrCrC |
| human | | A2 | rUrCrUrGrGrArArArGrG |
| TRBC1/2 | | | rGrArArG/AltR2/ |
| MG29-1 | 5651 | MG29-1- | /AltR1/rUrArArUrUrUr |
| sgRNA | | TRBC1/2- | CrUrArCrUrGrUrUrGrUr |
| targeting | | sgRNA- | ArGrArUrCrArGrGrUrC |
| human | | B2 | rCrUrCrUrGrGrArArArG |
| TRBC1/2 | | | rGrGrArA/AltR2/ |
| MG29-1 | 5652 | MG29-1- | /AltR1/rUrArArUrUrUr |
| sgRNA | | TRBC1/2- | CrUrArCrUrGrUrUrGrUr |
| targeting | | sgRNA- | ArGrArUrUrCrArGrGrU |
| human | | C2 | rCrCrUrCrUrGrGrArArA |
| TRBC1/2 | | | rGrGrGrA/AltR2/ |
| MG29-1 | 5653 | MG29-1- | /AltR1/rUrArArUrUrUr |
| sgRNA | | TRBC1/2- | CrUrArCrUrGrUrUrGrUr |
| targeting | | sgRNA- | ArGrArUrArGrCrCrArU |
| human | | D2 | rCrArGrArArGrCrArGrA |
| TRBC1/2 | | | rGrArUrC/AltR2/ |
| MG29-1 | 5654 | MG29-1- | /AltR1/rUrArArUrUrUr |
| sgRNA | | TRBC1/2- | CrUrArCrUrGrUrUrGrUr |
| targeting | | sgRNA- | ArGrArUrGrGrUrGrUrG |
| human | | E2 | rGrGrArGrArUrCrUrCrU |
| TRBC1/2 | | | rGrCrUrU/AltR2/ |
| MG29-1 | 5655 | MG29-1- | /AltR1/rUrArArUrUrUr |
| sgRNA | | TRBC1/2- | CrUrArCrUrGrUrUrGrUr |
| targeting | | sgRNA- | ArGrArUrGrGrGrUrGrU |
| human | | F2 | rGrGrGrArGrArUrCrUrC |
| TRBC1/2 | | | rUrGrCrU/AltR2/ |
| MG29-1 | 5656 | MG29-1- | /AltR1/rUrArArUrUrUr |
| sgRNA | | TRBC1/2- | CrUrArCrUrGrUrUrGrUr |
| targeting | | sgRNA- | ArGrArUrGrCrCrCrUrA |
| human | | G2 | rUrCrCrUrGrGrGrUrCrC |
| TRBC1/2 | | | rArCrUrC/AltR2/ |
| MG29-1 | 5657 | MG29-1- | /AltR1/rUrArArUrUrUr |
| sgRNA | | TRBC1/2- | CrUrArCrUrGrUrUrGrUr |
| targeting | | sgRNA- | ArGrArUrCrUrUrUrCrA |
| human | | H2 | rGrArCrUrGrUrGrGrCrU |
| TRBC1/2 | | | rUrCrArC/AltR2/ |
| MG29-1 | 5658 | MG29-1- | /AltR1/rUrArArUrUrUr |
| sgRNA | | TRBC1/2- | CrUrArCrUrGrUrUrGrUr |
| targeting | | sgRNA- | ArGrArUrUrUrUrCrArG |
| human | | A3 | rArCrUrGrUrGrGrCrUrU |
| TRBC1/2 | | | rCrArCrC/AltR2/ |
| MG29-1 | 5659 | MG29-1- | /AltR1/rUrArArUrUrUr |
| sgRNA | | TRBC1/2- | CrUrArCrUrGrUrUrGrUr |
| targeting | | sgRNA- | ArGrArUrArGrArCrUrG |
| human | | B3 | rUrGrGrCrUrUrCrArCrC |
| TRBC1/2 | | | rUrCrCrG/AltR2/ |
| MG29-1 | 5660 | MG29-1- | /AltR1/rUrArArUrUrUr |
| sgRNA | | TRBC1/2- | CrUrArCrUrGrUrUrGrUr |
| targeting | | sgRNA- | ArGrArUrUrCrUrUrGrA |
| human | | C3 | rCrCrUrGrUrGrGrArArG |
| TRBC1/2 | | | rArGrArG/AltR2/ |
| DNA sequence | 5661 | MG29-1- | AGCCATCAGAAGCAGAGATC |
| of TRBC1/2 | | TRBC1/2- | |
| target site | | target | |
| | | site-A1 | |
| DNA sequence | 5662 | MG29-1- | GGTGTGGGAGATCTCTGCTT |
| of TRBC1/2 | | TRBC1/2- | |
| target site | | target | |
| | | site-B1 | |
| DNA sequence | 5663 | MG29-1- | GGGTGTGGGAGATCTCTGCT |
| of TRBC1/2 | | TRBC1/2- | |
| target site | | target | |
| | | site-C1 | |
| DNA sequence | 5664 | MG29-1- | GCCCTATCCTGGGTCCACTC |
| of TRBC1/2 | | TRBC1/2- | |
| target site | | target | |
| | | site-D1 | |
| DNA sequence | 5665 | MG29-1- | TTTCAGACTGTGGCTTTACC |
| of TRBC1/2 | | TRBC1/2- | |
| target site | | target | |
| | | site-E1 | |
| DNA sequence | 5666 | MG29-1- | AGACTGTGGCTTTACCTCGG |
| of TRBC1/2 | | TRBC1/2- | |
| target site | | target | |
| | | site-F1 | |
| DNA sequence | 5667 | MG29-1- | TCTTCTGCAGGTCAAGAGAA |
| of TRBC1/2 | | TRBC1/2- | |
| target site | | target | |
| | | site-G1 | |
| DNA sequence | 5668 | MG29-1- | TCTTGACCTGCAGAAGAGAA |
| of TRBC1/2 | | TRBC1/2- | |
| target site | | target | |
| | | site-H1 | |
| DNA sequence | 5669 | MG29-1- | AGGTCCTCTGGAAAGGGAAG |
| of TRBC1/2 | | TRBC1/2- | |
| target site | | target | |
| | | site-A2 | |
| DNA sequence | 5670 | MG29-1- | CAGGTCCTCTGGAAAGGGAA |
| of TRBC1/2 | | TRBC1/2- | |
| target site | | target | |
| | | site-B2 | |
| DNA sequence | 5671 | MG29-1- | TCAGGTCCTCTGGAAAGGGA |
| of TRBC1/2 | | TRBC1/2- | |
| target site | | target | |
| | | site-C2 | |
| DNA sequence | 5672 | MG29-1- | AGCCATCAGAAGCAGAGATC |
| of TRBC1/2 | | TRBC1/2- | |
| target site | | target | |
| | | site-D2 | |
| DNA sequence | 5673 | MG29-1- | GGTGTGGGAGATCTCTGCTT |
| of TRBC1/2 | | TRBC1/2- | |
| target site | | target | |
| | | site-E2 | |
| DNA sequence | 5674 | MG29-1- | GGGTGTGGGAGATCTCTGCT |
| of TRBC1/2 | | TRBC1/2- | |
| target site | | target | |
| | | site-F2 | |
| DNA sequence | 5675 | MG29-1- | GCCCTATCCTGGGTCCACTC |
| of TRBC1/2 | | TRBC1/2- | |
| target site | | target | |
| | | site-G2 | |
| DNA sequence | 5676 | MG29-1- | CTTTCAGACTGTGGCTTCAC |
| of TRBC1/2 | | TRBC1/2- | |
| target site | | target | |
| | | site-H2 | |
| DNA sequence | 5677 | MG29-1- | TTTCAGACTGTGGCTTCACC |
| of TRBC1/2 | | TRBC1/2- | |
| target site | | target | |
| | | site-A3 | |
| DNA sequence | 5678 | MG29-1- | AGACTGTGGCTTCACCTCCG |
| of TRBC1/2 | | TRBC1/2- | |
| target site | | target | |
| | | site-B3 | |
| DNA sequence | 5679 | MG29-1- | TCTTGACCTGTGGAAGAGAG |
| of TRBC1/2 | | TRBC1/2- | |
| target site | | target | |
| | | site-C3 | |

r; native RNA linkage comprising the sugar ribose (for example the ribose or RNA form of the A base is written rA), d; deoxyribose sugar (DNA) linkage (for example a deoxyribose form of the A base is written dA), *; between bases in which one of the oxygen molecules in the phosphodiester bond is replaced with sulfur; AltR1 and AltR2 refer to IDT technologies' proprietary 5′ and 3′ AltR modifications

### Example 21—Gene Editing Outcomes at the DNA Level for HPRT

[0509] Primary T cells were purified from PMBCs using a negative selection kit (Miltenyi) according to the manufacturer's recommendations. Nucleofection of MG29-1 RNPs (126 pmol protein/160 pmol guide) (SEQ ID NOs: 5482-5561) was performed into T cells (200,000) using the Lonza 4D electroporator. Cells were harvested and genomic DNA prepared five days post-transfection. PCR primers appropriate for use in NGS-based DNA sequencing were generated, optimized, and used to amplify the individual target sequences for each guide RNA (SEQ ID NOs: 5562-5641). The amplicons were sequenced on an Illumina MiSeq machine and analyzed with a proprietary Python script to measure gene editing (FIG. 67).

TABLE 14J
Sequences of Guide RNAs and Sequences
Targeted for Example 47

| | SEQ | | |
|---|---|---|---|
| Guide | ID | Guide | |
| Target | NO | Name | SEQUENCE |
| MG29-1 | 5482 | MG29-1- | /AltR1/rUrArArUrUrUr |
| sgRNA | | HPRT- | CrUrArCrUrGrUrUrGrUr |
| targeting | | sgRNA-A1 | ArGrArUrUrCrUrCrCrCr |
| HPRT | | | UrGrGrCrUrUrArCrCrUr |
| | | | UrUrArGrGrA/AltR2/ |
| MG29-1 | 5483 | MG29-1- | /AltR1/rUrArArUrUrUr |
| sgRNA | | HPRT- | CrUrArCrUrGrUrUrGrUr |
| targeting | | sgRNA-B1 | ArGrArUrGrArArCrArCr |
| HPRT | | | ArArGrCrCrCrArCrCrAr |
| | | | UrUrArArArA/AltR2/ |
| MG29-1 | 5484 | MG29-1- | /AltR1/rUrArArUrUrUr |
| sgRNA | | HPRT- | CrUrArCrUrGrUrUrGrUr |
| targeting | | sgRNA-C1 | ArGrArUrArArUrGrGrUr |
| HPRT | | | GrGrGrCrUrUrGrUrGrUr |
| | | | UrCrUrArArA/AltR2/ |
| MG29-1 | 5485 | MG29-1- | /AltR1/rUrArArUrUrUr |
| sgRNA | | HPRT- | CrUrArCrUrGrUrUrGrUr |
| targeting | | sgRNA-D1 | ArGrArUrArUrGrGrUrGr |
| HPRT | | | GrGrCrUrUrGrUrGrUrUr |
| | | | CrUrArArArG/AltR2/ |
| MG29-1 | 5486 | MG29-1- | /AltR1/rUrArArUrUrUr |
| sgRNA | | HPRT- | CrUrArCrUrGrUrUrGrUr |
| targeting | | sgRNA-E1 | ArGrArUrCrCrCrUrArAr |
| HPRT | | | CrArArArGrArUrGrGrGr |
| | | | UrUrUrGrUrU/AltR2/ |
| MG29-1 | 5487 | MG29-1- | /AltR1/rUrArArUrUrUr |
| sgRNA | | HPRT- | CrUrArCrUrGrUrUrGrUr |
| targeting | | sgRNA-F1 | ArGrArUrArArGrGrCrAr |
| HPRT | | | CrCrCrArArArUrUrArAr |
| | | | UrArArCrGrC/AltR2/ |
| MG29-1 | 5488 | MG29-1- | /AltR1/rUrArArUrUrUr |
| sgRNA | | HPRT- | CrUrArCrUrGrUrUrGrUr |
| targeting | | sgRNA-G1 | ArGrArUrUrArGrCrGrUr |
| HPRT | | | UrArUrUrArArUrUrUrGr |
| | | | GrGrUrGrCrC/AltR2/ |
| MG29-1 | 5489 | MG29-1- | /AltR1/rUrArArUrUrUr |
| sgRNA | | HPRT- | CrUrArCrUrGrUrUrGrUr |
| targeting | | sgRNA-H1 | ArGrArUrUrCrGrArGrUr |
| HPRT | | | GrUrArGrUrCrUrGrUrUr |
| | | | ArGrCrCrArC/AltR2/ |
| MG29-1 | 5490 | MG29-1- | /AltR1/rUrArArUrUrUr |
| sgRNA | | HPRT- | CrUrArCrUrGrUrUrGrUr |
| targeting | | sgRNA-A2 | ArGrArUrUrUrArGrGrGr |
| HPRT | | | ArGrUrUrArUrGrArUrGr |
| | | | UrUrGrUrCrC/AltR2/ |
| MG29-1 | 5491 | MG29-1- | /AltR1/rUrArArUrUrUr |
| sgRNA | | HPRT- | CrUrArCrUrGrUrUrGrUr |
| targeting | | sgRNA-B2 | ArGrArUrUrArGrGrUrGr |
| HPRT | | | CrArGrGrArUrCrArArUr |
| | | | GrArCrArGrC/AltR2/ |
| MG29-1 | 5492 | MG29-1- | /AltR1/rUrArArUrUrUr |
| sgRNA | | HPRT- | CrUrArCrUrGrUrUrGrUr |
| targeting | | sgRNA-C2 | ArGrArUrGrUrArGrGrUr |
| HPRT | | | GrCrArGrGrArUrCrArAr |
| | | | UrGrArCrArG/AltR2/ |
| MG29-1 | 5493 | MG29-1- | /AltR1/rUrArArUrUrUr |
| sgRNA | | HPRT- | CrUrArCrUrGrUrUrGrUr |
| targeting | | sgRNA-D2 | ArGrArUrCrUrGrUrCrAr |
| HPRT | | | UrUrGrArUrCrCrUrGrCr |
| | | | ArCrCrUrArC/AltR2/ |
| MG29-1 | 5494 | MG29-1- | /AltR1/rUrArArUrUrUr |
| sgRNA | | HPRT- | CrUrArCrUrGrUrUrGrUr |
| targeting | | sgRNA-E2 | ArGrArUrCrArGrCrArCr |
| HPRT | | | ArGrUrArArUrUrCrUrCr |
| | | | ArCrCrArArA/AltR2/ |
| MG29-1 | 5495 | MG29-1- | /AltR1/rUrArArUrUrUr |
| sgRNA | | HPRT- | CrUrArCrUrGrUrUrGrUr |
| targeting | | sgRNA-F2 | ArGrArUrGrGrUrGrArGr |
| HPRT | | | ArArUrUrArCrUrGrUrGr |
| | | | CrUrGrArArA/AltR2/ |
| MG29-1 | 5496 | MG29-1- | /AltR1/rUrArArUrUrUr |
| sgRNA | | HPRT- | CrUrArCrUrGrUrUrGrUr |
| targeting | | sgRNA-G2 | ArGrArUrUrCrCrUrGrAr |
| HPRT | | | ArUrArGrCrArUrGrGrCr |
| | | | ArGrArGrGrA/AltR2/ |
| MG29-1 | 5497 | MG29-1- | /AltR1/rUrArArUrUrUr |
| sgRNA | | HPRT- | CrUrArCrUrGrUrUrGrUr |
| targeting | | sgRNA-H2 | ArGrArUrCrArArGrGrGr |
| HPRT | | | GrGrCrCrCrArArArArUr |
| | | | CrCrUrCrUrG/AltR2/ |
| MG29-1 | 5498 | MG29-1- | /AltR1/rUrArArUrUrUr |
| sgRNA | | HPRT- | CrUrArCrUrGrUrUrGrUr |
| targeting | | sgRNA-A3 | ArGrArUrGrCrArArGrGr |
| HPRT | | | GrGrGrCrCrCrArArArAr |
| | | | UrCrCrUrCrU/AltR2/ |
| MG29-1 | 5499 | MG29-1- | /AltR1/rUrArArUrUrUr |
| sgRNA | | HPRT- | CrUrArCrUrGrUrUrGrUr |
| targeting | | sgRNA-B3 | ArGrArUrGrGrGrCrCrCr |
| HPRT | | | CrCrUrUrGrCrArArArAr |
| | | | UrUrArArGrA/AltR2/ |
| MG29-1 | 5500 | MG29-1- | /AltR1/rUrArArUrUrUr |
| sgRNA | | HPRT- | CrUrArCrUrGrUrUrGrUr |
| targeting | | sgRNA-C3 | ArGrArUrGrGrCrCrCrCr |
| HPRT | | | CrUrUrGrCrArArArArUr |
| | | | UrArArGrArA/AltR2/ |
| MG29-1 | 5501 | MG29-1- | /AltR1/rUrArArUrUrUr |
| sgRNA | | HPRT- | CrUrArCrUrGrUrUrGrUr |
| targeting | | sgRNA-D3 | ArGrArUrArCrUrArCrAr |
| HPRT | | | GrArCrArCrArArArGrAr |
| | | | ArGrArUrGrC/AltR2/ |
| MG29-1 | 5502 | MG29-1- | /AltR1/rUrArArUrUrUr |
| sgRNA | | HPRT- | CrUrArCrUrGrUrUrGrUr |
| targeting | | sgRNA-E3 | ArGrArUrUrUrArUrUrAr |
| HPRT | | | ArGrUrCrGrGrCrCrUrCr |
| | | | ArCrCrUrCrC/AltR2/ |
| MG29-1 | 5503 | MG29-1- | /AltR1/rUrArArUrUrUr |
| sgRNA | | HPRT- | CrUrArCrUrGrUrUrGrUr |
| targeting | | sgRNA-F3 | ArGrArUrUrArUrUrArAr |
| HPRT | | | GrUrCrGrGrCrCrUrCrAr |
| | | | CrCrUrCrCrU/AltR2/ |
| MG29-1 | 5504 | MG29-1- | /AltR1/rUrArArUrUrUr |
| sgRNA | | HPRT- | CrUrArCrUrGrUrUrGrUr |
| targeting | | sgRNA-G3 | ArGrArUrArUrUrArArGr |
| HPRT | | | UrCrGrGrCrCrUrCrArCr |
| | | | CrUrCrCrUrC/AltR2/ |
| MG29-1 | 5505 | MG29-1- | /AltR1/rUrArArUrUrUr |
| sgRNA | | HPRT- | CrUrArCrUrGrUrUrGrUr |
| targeting | | sgRNA-H3 | ArGrArUrUrUrArArGrUr |
| HPRT | | | CrGrGrCrCrUrCrArCrCr |
| | | | UrCrCrUrCrA/AltR2/ |
| MG29-1 | 5506 | MG29-1- | /AltR1/rUrArArUrUrUr |
| sgRNA | | HPRT- | CrUrArCrUrGrUrUrGrUr |
| targeting | | sgRNA-A4 | ArGrArUrUrArUrGrUrAr |
| HPRT | | | GrGrGrGrUrCrArGrGrUr |
| | | | ArArUrGrUrU/AltR2/ |
| MG29-1 | 5507 | MG29-1- | /AltR1/rUrArArUrUrUr |
| sgRNA | | HPRT- | CrUrArCrUrGrUrUrGrUr |
| targeting | | sgRNA-B4 | ArGrArUrArUrGrUrArGr |
| HPRT | | | GrGrGrUrCrArGrGrUrAr |
| | | | ArUrGrUrUrC/AltR2/ |
| MG29-1 | 5508 | MG29-1- | /AltR1/rUrArArUrUrUr |
| sgRNA | | HPRT- | CrUrArCrUrGrUrUrGrUr |
| targeting | | sgRNA-C4 | ArGrArUrUrGrUrArGrGr |
| HPRT | | | GrGrUrCrArGrGrUrArAr |
| | | | UrGrUrUrCrU/AltR2/ |
| MG29-1 | 5509 | MG29-1- | /AltR1/rUrArArUrUrUr |
| sgRNA | | HPRT- | CrUrArCrUrGrUrUrGrUr |
| targeting | | sgRNA-D4 | ArGrArUrGrArArArArAr |
| HPRT | | | ArUrCrArCrGrGrUrArUr |
| | | | CrUrGrUrCrG/AltR2/ |
| MG29-1 | 5510 | MG29-1- | /AltR1/rUrArArUrUrUr |
| sgRNA | | HPRT- | CrUrArCrUrGrUrUrGrUr |
| targeting | | sgRNA-E4 | ArGrArUrArArUrCrArGr |
| HPRT | | | ArGrUrArArGrCrCrUrUr |
| | | | CrUrArGrUrG/AltR2/ |
| MG29-1 | 5511 | MG29-1- | /AltR1/rUrArArUrUrUr |
| sgRNA | | HPRT- | CrUrArCrUrGrUrUrGrUr |
| targeting | | sgRNA-F4 | ArGrArUrGrGrArCrArGr |
| HPRT | | | GrUrArCrUrArUrGrArGr |
| | | | ArGrUrArUrA/AltR2/ |
| MG29-1 | 5512 | MG29-1- | /AltR1/rUrArArUrUrUr |
| sgRNA | | HPRT- | CrUrArCrUrGrUrUrGrUr |
| targeting | | sgRNA-G4 | ArGrArUrArArArUrGrUr |
| HPRT | | | CrArArCrCrUrArCrUrGr |
| | | | UrGrGrCrArU/AltR2/ |
| MG29-1 | 5513 | MG29-1- | /AltR1/rUrArArUrUrUr |
| sgRNA | | HPRT- | CrUrArCrUrGrUrUrGrUr |
| targeting | | sgRNA-H4 | ArGrArUrArArUrGrUrCr |
| HPRT | | | ArArCrCrUrArCrUrGrUr |
| | | | GrGrCrArUrA/AltR2/ |
| MG29-1 | 5514 | MG29-1- | /AltR1/rUrArArUrUrUr |
| sgRNA | | HPRT- | CrUrArCrUrGrUrUrGrUr |
| targeting | | sgRNA-A5 | ArGrArUrGrUrUrGrUrUr |
| HPRT | | | CrUrUrUrCrCrUrGrGrUr |
| | | | ArUrArUrGrC/AltR2/ |
| MG29-1 | 5515 | MG29-1- | /AltR1/rUrArArUrUrUr |
| sgRNA | | HPRT- | CrUrArCrUrGrUrUrGrUr |
| targeting | | sgRNA-B5 | ArGrArUrCrUrGrGrUrAr |
| HPRT | | | UrArUrGrCrUrGrUrGrGr |
| | | | ArArUrUrGrA/AltR2/ |
| MG29-1 | 5516 | MG29-1- | /AltR1/rUrArArUrUrUr |
| sgRNA | | HPRT- | CrUrArCrUrGrUrUrGrUr |
| targeting | | sgRNA-C5 | ArGrArUrArGrCrArUrGr |
| HPRT | | | UrCrCrUrArCrCrUrGrUr |
| | | | GrGrCrArArC/AltR2/ |
| MG29-1 | 5517 | MG29-1- | /AltR1/rUrArArUrUrUr |
| sgRNA | | HPRT- | CrUrArCrUrGrUrUrGrUr |
| targeting | | sgRNA-D5 | ArGrArUrGrUrGrUrUrGr |
| HPRT | | | CrCrArCrArGrGrUrArGr |
| | | | GrArCrArUrG/AltR2/ |
| MG29-1 | 5518 | MG29-1- | /AltR1/rUrArArUrUrUr |
| sgRNA | | HPRT- | CrUrArCrUrGrUrUrGrUr |
| targeting | | sgRNA-E5 | ArGrArUrUrGrUrUrGrCr |
| HPRT | | | CrArCrArGrGrUrArGrGr |
| | | | ArCrArUrGrC/AltR2/ |
| MG29-1 | 5519 | MG29-1- | /AltR1/rUrArArUrUrUr |
| sgRNA | | HPRT- | CrUrArCrUrGrUrUrGrUr |
| targeting | | sgRNA-F5 | ArGrArUrCrArUrArCrUr |
| HPRT | | | GrUrArArArUrGrGrGrUr |
| | | | ArArCrCrGrU/AltR2/ |
| MG29-1 | 5520 | MG29-1- | /AltR1/rUrArArUrUrUr |
| sgRNA | | HPRT- | CrUrArCrUrGrUrUrGrUr |
| targeting | | sgRNA-G5 | ArGrArUrCrCrArUrArCr |
| HPRT | | | UrGrUrArArArUrGrGrGr |
| | | | UrArArCrCrG/AltR2/ |
| MG29-1 | 5521 | MG29-1- | /AltR1/rUrArArUrUrUr |
| sgRNA | | HPRT- | CrUrArCrUrGrUrUrGrUr |
| targeting | | sgRNA-H5 | ArGrArUrArUrArArArGr |
| HPRT | | | CrUrCrCrArUrCrUrCrUr |
| | | | ArArGrGrCrA/AltR2/ |
| MG29-1 | 5522 | MG29-1- | /AltR1/rUrArArUrUrUr |
| sgRNA | | HPRT- | CrUrArCrUrGrUrUrGrUr |
| targeting | | sgRNA-A6 | ArGrArUrGrUrGrArUrAr |
| HPRT | | | CrCrUrUrUrUrCrUrGrGr |
| | | | ArGrCrArUrU/AltR2/ |
| MG29-1 | 5523 | MG29-1- | /AltR1/rUrArArUrUrUr |
| sgRNA | | HPRT- | CrUrArCrUrGrUrUrGrUr |
| targeting | | sgRNA-B6 | ArGrArUrCrUrGrGrArGr |
| HPRT | | | CrArUrUrCrCrUrGrArGr |
| | | | UrUrCrArGrG/AltR2/ |
| MG29-1 | 5524 | MG29-1- | /AltR1/rUrArArUrUrUr |
| sgRNA | | HPRT- | CrUrArCrUrGrUrUrGrUr |
| targeting | | sgRNA-C6 | ArGrArUrUrGrGrArGrCr |
| HPRT | | | ArUrUrCrCrUrGrArGrUr |
| | | | UrCrArGrGrU/AltR2/ |
| MG29-1 | 5525 | MG29-1- | /AltR1/rUrArArUrUrUr |
| sgRNA | | HPRT- | CrUrArCrUrGrUrUrGrUr |
| targeting | | sgRNA-D6 | ArGrArUrUrGrCrUrGrUr |
| HPRT | | | GrArUrUrGrGrCrUrUrGr |
| | | | UrUrArUrGrU/AltR2 |
| MG29-1 | 5526 | MG29-1- | /AltR1/rUrArArUrUrUr |
| sgRNA | | HPRT- | CrUrArCrUrGrUrUrGrUr |
| targeting | | sgRNA-E6 | ArGrArUrGrCrUrGrUrGr |
| HPRT | | | ArUrUrGrGrCrUrUrGrUr |
| | | | UrArUrGrUrU/AltR2/ |
| MG29-1 | 5527 | MG29-1- | /AltR1/rUrArArUrUrUr |
| sgRNA | | HPRT- | CrUrArCrUrGrUrUrGrUr |
| targeting | | sgRNA-F6 | ArGrArUrCrUrGrUrGrAr |
| HPRT | | | UrUrGrGrCrUrUrGrUrUr |
| | | | ArUrGrUrUrC/AltR2/ |
| MG29-1 | 5528 | MG29-1- | /AltR1/rUrArArUrUrUr |
| sgRNA | | HPRT- | CrUrArCrUrGrUrUrGrUr |
| targeting | | sgRNA-G6 | ArGrArUrUrUrGrGrArAr |
| HPRT | | | GrArGrUrCrArUrGrArGr |
| | | | GrGrArCrArU/AltR2/ |
| MG29-1 | 5529 | MG29-1- | /AltR1/rUrArArUrUrUr |
| sgRNA | | HPRT- | CrUrArCrUrGrUrUrGrUr |
| targeting | | sgRNA-H6 | ArGrArUrCrArGrArUrGr |
| HPRT | | | UrUrArArArGrGrCrArGr |
| | | | UrCrUrCrArA/AltR2/ |
| MG29-1 | 5530 | MG29-1- | /AltR1/rUrArArUrUrUr |
| sgRNA | | HPRT- | CrUrArCrUrGrUrUrGrUr |
| targeting | | sgRNA-A7 | ArGrArUrCrUrUrGrArGr |
| HPRT | | | ArCrUrGrCrCrUrUrUrAr |
| | | | ArCrArUrCrU/AltR2/ |
| MG29-1 | 5531 | MG29-1- | /AltR1/rUrArArUrUrUr |
| sgRNA | | HPRT- | CrUrArCrUrGrUrUrGrUr |
| targeting | | sgRNA-B7 | ArGrArUrUrUrGrArGrAr |
| HPRT | | | CrUrGrCrCrUrUrUrArAr |
| | | | CrArUrCrUrG/AltR2/ |
| MG29-1 | 5532 | MG29-1- | /AltR1/rUrArArUrUrUr |
| sgRNA | | HPRT- | CrUrArCrUrGrUrUrGrUr |
| targeting | | sgRNA-C7 | ArGrArUrUrArArCrCrCr |
| HPRT | | | ArArArUrGrCrUrGrCrCr |
| | | | UrGrUrUrGrA/AltR2/ |
| MG29-1 | 5533 | MG29-1- | /AltR1/rUrArArUrUrUr |
| sgRNA | | HPRT- | CrUrArCrUrGrUrUrGrUr |
| targeting | | sgRNA-D7 | ArGrArUrArUrArArCrCr |
| HPRT | | | CrArArArUrGrCrUrGrCr |
| | | | CrUrGrUrUrG/AltR2/ |
| MG29-1 | 5534 | MG29-1- | /AltR1/rUrArArUrUrUr |
| sgRNA | | HPRT- | CrUrArCrUrGrUrUrGrUr |
| targeting | | sgRNA-E7 | ArGrArUrUrCrArArCrAr |
| HPRT | | | GrGrCrArGrCrArUrUrUr |
| | | | GrGrGrUrUrA/AltR2/ |
| MG29-1 | 5535 | MG29-1- | /AltR1/rUrArArUrUrUr |
| sgRNA | | HPRT- | CrUrArCrUrGrUrUrGrUr |
| targeting | | sgRNA-F7 | ArGrArUrCrArArCrArGr |
| HPRT | | | GrCrArGrCrArUrUrUrGr |
| | | | GrGrUrUrArU/AltR2/ |
| MG29-1 | 5536 | MG29-1- | /AltR1/rUrArArUrUrUr |
| sgRNA | | HPRT- | CrUrArCrUrGrUrUrGrUr |
| targeting | | sgRNA-G7 | ArGrArUrArArCrArGrGr |
| HPRT | | | CrArGrCrArUrUrUrGrGr |
| | | | GrUrUrArUrA/AltR2/ |
| MG29-1 | 5537 | MG29-1- | /AltR1/rUrArArUrUrUr |
| sgRNA | | HPRT- | CrUrArCrUrGrUrUrGrUr |
| targeting | | sgRNA-H7 | ArGrArUrGrArArCrArAr |
| HPRT | | | ArArGrCrUrGrGrArGrGr |
| | | | UrGrGrUrArU/AltR2/ |
| MG29-1 | 5538 | MG29-1- | /AltR1/rUrArArUrUrUr |
| sgRNA | | HPRT- | CrUrArCrUrGrUrUrGrUr |
| targeting | | sgRNA-A8 | ArGrArUrGrGrUrArGrAr |
| HPRT | | | GrUrUrGrArCrUrUrArUr |
| | | | ArCrCrArCrC/AltR2/ |
| MG29-1 | 5539 | MG29-1- | /AltR1/rUrArArUrUrUr |
| sgRNA | | HPRT- | CrUrArCrUrGrUrUrGrUr |
| targeting | | sgRNA-B8 | ArGrArUrGrUrArGrArGr |
| HPRT | | | UrUrGrArCrUrUrArUrAr |
| | | | CrCrArCrCrU/AltR2/ |
| MG29-1 | 5540 | MG29-1- | /AltR1/rUrArArUrUrUr |
| sgRNA | | HPRT- | CrUrArCrUrGrUrUrGrUr |
| targeting | | sgRNA-C8 | ArGrArUrGrGrArArCrAr |
| HPRT | | | ArArArGrCrUrGrGrArGr |
| | | | GrUrGrGrUrA/AltR2/ |
| MG29-1 | 5541 | MG29-1- | /AltR1/rUrArArUrUrUr |
| sgRNA | | HPRT- | CrUrArCrUrGrUrUrGrUr |
| targeting | | sgRNA-D8 | ArGrArUrUrGrGrArArCr |
| HPRT | | | ArArArArGrCrUrGrGrAr |
| | | | GrGrUrGrGrU/AltR2/ |
| MG29-1 | 5542 | MG29-1- | /AltR1/rUrArArUrUrUr |
| sgRNA | | HPRT- | CrUrArCrUrGrUrUrGrUr |
| targeting | | sgRNA-E8 | ArGrArUrUrUrUrUrUrGr |
| HPRT | | | GrArArCrArArArArGrCr |
| | | | UrGrGrArGrG/AltR2/ |
| MG29-1 | 5543 | MG29-1- | /AltR1/rUrArArUrUrUr |
| sgRNA | | HPRT- | CrUrArCrUrGrUrUrGrUr |
| targeting | | sgRNA-F8 | ArGrArUrGrGrGrUrArAr |
| HPRT | | | ArArCrArArCrUrArGrUr |
| | | | GrUrGrCrCrA/AltR2/ |
| MG29-1 | 5544 | MG29-1- | /AltR1/rUrArArUrUrUr |
| sgRNA | | HPRT- | CrUrArCrUrGrUrUrGrUr |
| targeting | | sgRNA-G8 | ArGrArUrGrGrCrArCrAr |
| HPRT | | | CrUrArGrUrUrGrUrUrUr |
| | | | UrArCrCrCrU/AltR2/ |
| MG29-1 | 5545 | MG29-1- | /AltR1/rUrArArUrUrUr |
| sgRNA | | HPRT- | CrUrArCrUrGrUrUrGrUr |
| targeting | | sgRNA-H8 | ArGrArUrGrCrArCrArCr |
| HPRT | | | UrArGrUrUrGrUrUrUrUr |
| | | | ArCrCrCrUrA/AltR2/ |
| MG29-1 | 5546 | MG29-1- | /AltR1/rUrArArUrUrUr |
| sgRNA | | HPRT- | CrUrArCrUrGrUrUrGrUr |
| targeting | | sgRNA-A9 | ArGrArUrCrCrCrUrArAr |
| HPRT | | | ArGrUrUrCrCrUrCrUrUr |
| | | | UrGrUrArArG/AltR2/ |
| MG29-1 | 5547 | MG29-1- | /AltR1/rUrArArUrUrUr |
| sgRNA | | HPRT- | CrUrArCrUrGrUrUrGrUr |
| targeting | | sgRNA-B9 | ArGrArUrGrGrGrArUrUr |
| HPRT | | | GrUrArUrUrUrCrCrArAr |
| | | | GrGrUrUrUrC/AltR2/ |
| MG29-1 | 5548 | MG29-1- | /AltR1/rUrArArUrUrUr |
| sgRNA | | HPRT- | CrUrArCrUrGrUrUrGrUr |
| targeting | | sgRNA-C9 | ArGrArUrCrArArGrGrUr |
| HPRT | | | UrUrCrUrArGrArCrUrGr |
| | | | ArGrArGrCrC/AltR2/ |
| MG29-1 | 5549 | MG29-1- | /AltR1/rUrArArUrUrUr |
| sgRNA | | HPRT- | CrUrArCrUrGrUrUrGrUr |
| targeting | | sgRNA-D9 | ArGrArUrUrArGrArCrUr |
| HPRT | | | GrArGrArGrCrCrCrUrUr |
| | | | UrUrCrArUrC/AltR2/ |
| MG29-1 | 5550 | MG29-1- | /AltR1/rUrArArUrUrUr |
| sgRNA | | HPRT- | CrUrArCrUrGrUrUrGrUr |
| targeting | | sgRNA-E9 | ArGrArUrCrArUrCrUrUr |
| HPRT | | | UrGrCrUrCrArUrUrGrAr |
| | | | CrArCrUrCrU/AltR2/ |
| MG29-1 | 5551 | MG29-1- | /AltR1/rUrArArUrUrUr |
| sgRNA | | HPRT- | CrUrArCrUrGrUrUrGrUr |
| targeting | | sgRNA-F9 | ArGrArUrArUrCrUrUrUr |
| HPRT | | | GrCrUrCrArUrUrGrArCr |
| | | | ArCrUrCrUrG/AltR2/ |
| MG29-1 | 5552 | MG29-1- | /AltR1/rUrArArUrUrUr |
| sgRNA | | HPRT- | CrUrArCrUrGrUrUrGrUr |
| targeting | | sgRNA-G9 | ArGrArUrCrUrCrArUrUr |
| HPRT | | | GrArCrArCrUrCrUrGrUr |
| | | | ArCrCrCrArU/AltR2/ |
| MG29-1 | 5553 | MG29-1- | /AltR1/rUrArArUrUrUr |
| sgRNA | | HPRT- | CrUrArCrUrGrUrUrGrUr |
| targeting | | sgRNA-H9 | ArGrArUrArCrArCrArCr |
| HPRT | | | CrCrArArGrGrArArArGr |
| | | | ArCrUrArUrG/AltR2/ |
| MG29-1 | 5554 | MG29-1- | /AltR1/rUrArArUrUrUr |
| sgRNA | | HPRT- | CrUrArCrUrGrUrUrGrUr |
| targeting | | sgRNA-A10 | ArGrArUrArArCrArCrAr |
| HPRT | | | CrCrCrArArGrGrArArAr |
| | | | GrArCrUrArU/AltR2/ |
| MG29-1 | 5555 | MG29-1- | /AltR1/rUrArArUrUrUr |
| sgRNA | | HPRT- | CrUrArCrUrGrUrUrGrUr |
| targeting | | sgRNA-B10 | ArGrArUrGrCrUrCrUrCr |
| HPRT | | | CrArUrUrUrCrArUrArGr |
| | | | UrCrUrUrUrC/AltR2/ |
| MG29-1 | 5556 | MG29-1- | /AltR1/rUrArArUrUrUr |
| sgRNA | | HPRT- | CrUrArCrUrGrUrUrGrUr |
| targeting | | sgRNA-C10 | ArGrArUrArUrArGrUrCr |
| HPRT | | | UrUrUrCrCrUrUrGrGrGr |
| | | | UrGrUrGrUrU/AltR2/ |
| MG29-1 | 5557 | MG29-1- | /AltR1/rUrArArUrUrUr |
| sgRNA | | HPRT- | CrUrArCrUrGrUrUrGrUr |
| targeting | | sgRNA-D10 | ArGrArUrCrUrUrGrGrGr |
| HPRT | | | UrGrUrGrUrUrArArArAr |
| | | | GrUrGrArCrC/AltR2/ |
| MG29-1 | 5558 | MG29-1- | /AltR1/rUrArArUrUrUr |
| sgRNA | | HPRT- | CrUrArCrUrGrUrUrGrUr |
| targeting | | sgRNA-E10 | ArGrArUrArUrCrCrGrUr |
| HPRT | | | GrCrUrGrArGrUrGrUrAr |
| | | | CrCrArUrGrG/AltR2/ |
| MG29-1 | 5559 | MG29-1- | /AltR1/rUrArArUrUrUr |
| sgRNA | | HPRT- | CrUrArCrUrGrUrUrGrUr |
| targeting | | sgRNA-F10 | ArGrArUrArUrUrUrCrAr |
| HPRT | | | UrCrCrGrUrGrCrUrGrAr |
| | | | GrUrGrUrArC/AltR2/ |
| MG29-1 | 5560 | MG29-1- | /AltR1/rUrArArUrUrUr |
| sgRNA | | HPRT- | CrUrArCrUrGrUrUrGrUr |
| targeting | | sgRNA-G10 | ArGrArUrGrArArArCrGr |
| HPRT | | | UrCrArGrUrCrUrUrCrUr |
| | | | CrUrUrUrUrG/AltR2/ |
| MG29-1 | 5561 | MG29-1- | /AltR1/rUrArArUrUrUr |
| sgRNA | | HPRT- | CrUrArCrUrGrUrUrGrUr |
| targeting | | sgRNA-H10 | ArGrArUrUrArGrArGrAr |
| HPRT | | | GrGrCrArCrArUrUrUrGr |
| | | | CrCrArGrUrA/AltR2/ |
| DNA sequence | 5562 | MG29-1- | TCTCCCTGGCTTACCTTTAG |
| of HPRT | | HPRT- | GA |
| target site | | target | |
| | | site-A1 | |
| DNA sequence | 5563 | MG29-1- | GAACACAAGCCCACCATTAA |
| of HPRT | | HPRT- | AA |
| target site | | target | |
| | | site-B1 | |
| DNA sequence | 5564 | MG29-1- | AATGGTGGGCTTGTGTTCTA |
| of HPRT | | HPRT- | AA |
| target site | | target | |
| | | site-C1 | |
| DNA sequence | 5565 | MG29-1- | ATGGTGGGCTTGTGTTCTAA |
| of HPRT | | HPRT- | AG |
| target site | | target | |
| | | site-D1 | |
| DNA sequence | 5566 | MG29-1- | CCCTAACAAAGATGGGTTTG |
| of HPRT | | HPRT- | TT |
| target site | | target | |
| | | site-E1 | |
| DNA sequence | 5567 | MG29-1- | AAGGCACCCAAATTAATAAC |
| of HPRT | | HPRT- | GC |
| target site | | target | |
| | | site-F1 | |
| DNA sequence | 5568 | MG29-1- | TAGCGTTATTAATTTGGGTG |
| of HPRT | | HPRT- | CC |
| target site | | target | |
| | | site-G1 | |
| DNA sequence | 5569 | MG29-1- | TCGAGTGTAGTCTGTTAGCC |
| of HPRT | | HPRT- | AC |
| target site | | target | |
| | | site-H1 | |
| DNA sequence | 5570 | MG29-1- | TTAGGGAGTTATGATGTTGT |
| of HPRT | | HPRT- | CC |
| target site | | target | |
| | | site-A2 | |
| DNA sequence | 5571 | MG29-1- | TAGGTGCAGGATCAATGACA |
| of HPRT | | HPRT- | GC |
| target site | | target | |
| | | site-B2 | |
| DNA sequence | 5572 | MG29-1- | GTAGGTGCAGGATCAATGAC |
| of HPRT | | HPRT- | AG |
| target site | | target | |
| | | site-C2 | |
| DNA sequence | 5573 | MG29-1- | CTGTCATTGATCCTGCACCT |
| of HPRT | | HPRT- | AC |
| target site | | target | |
| | | site-D2 | |
| DNA sequence | 5574 | MG29-1- | CAGCACAGTAATTCTCACCA |
| of HPRT | | HPRT- | AA |
| target site | | target | |
| | | site-E2 | |
| DNA sequence | 5575 | MG29-1- | GGTGAGAATTACTGTGCTGA |
| of HPRT | | HPRT- | AA |
| target site | | target | |
| | | site-F2 | |
| DNA sequence | 5576 | MG29-1- | TCCTGAATAGCATGGCAGAG |
| of HPRT | | HPRT- | GA |
| target site | | target | |
| | | site-G2 | |
| DNA sequence | 5577 | MG29-1- | CAAGGGGGCCCAAAATCCTC |
| of HPRT | | HPRT- | TG |
| target site | | target | |
| | | site-H2 | |
| DNA sequence | 5578 | MG29-1- | GCAAGGGGGCCCAAAATCCT |
| of HPRT | | HPRT- | CT |
| target site | | target | |
| | | site-A3 | |
| DNA sequence | 5579 | MG29-1- | GGGCCCCCTTGCAAAATTAA |
| of HPRT | | HPRT- | GA |
| target site | | target | |
| | | site-B3 | |
| DNA sequence | 5580 | MG29-1- | GGCCCCCTTGCAAAATTAAG |
| of HPRT | | HPRT- | AA |
| target site | | target | |
| | | site-C3 | |
| DNA sequence | 5581 | MG29-1- | ACTACAGACACAAAGAAGAT |
| of HPRT | | HPRT- | GC |
| target site | | target | |
| | | site-D3 | |
| DNA sequence | 5582 | MG29-1- | TTATTAAGTCGGCCTCACCT |
| of HPRT | | HPRT- | CC |
| target site | | target | |
| | | site-E3 | |
| DNA sequence | 5583 | MG29-1- | TATTAAGTCGGCCTCACCTC |
| of HPRT | | HPRT- | CT |
| target site | | target | |
| | | site-F3 | |
| DNA sequence | 5584 | MG29-1- | ATTAAGTCGGCCTCACCTCC |
| of HPRT | | HPRT- | TC |
| target site | | target | |
| | | site-G3 | |
| DNA sequence | 5585 | MG29-1- | TTAAGTCGGCCTCACCTCCT |
| of HPRT | | HPRT- | CA |
| target site | | target | |
| | | site-H3 | |
| DNA sequence | 5586 | MG29-1- | TATGTAGGGGTCAGGTAATG |
| of HPRT | | HPRT- | TT |
| target site | | target | |
| | | site-A4 | |
| DNA sequence | 5587 | MG29-1- | ATGTAGGGGTCAGGTAATGT |
| of HPRT | | HPRT- | TC |
| target site | | target | |
| | | site-B4 | |
| DNA sequence | 5588 | MG29-1- | TGTAGGGGTCAGGTAATGTT |
| of HPRT | | HPRT- | CT |
| target site | | target | |
| | | site-C4 | |
| DNA sequence | 5589 | MG29-1- | GAAAAAATCACGGTATCTGT |
| of HPRT | | HPRT- | CG |
| target site | | target | |
| | | site-D4 | |
| DNA sequence | 5590 | MG29-1- | AATCAGAGTAAGCCTTCTAG |
| of HPRT | | HPRT- | TG |
| target site | | target | |
| | | site-E4 | |
| DNA sequence | 5591 | MG29-1- | GGACAGGTACTATGAGAGTA |
| of HPRT | | HPRT- | TA |
| target site | | target | |
| | | site-F4 | |
| DNA sequence | 5592 | MG29-1- | AAATGTCAACCTACTGTGGC |
| of HPRT | | HPRT- | AT |
| target site | | target | |
| | | site-G4 | |
| DNA sequence | 5593 | MG29-1- | AATGTCAACCTACTGTGGCA |
| of HPRT | | HPRT- | TA |
| target site | | target | |
| | | site-H4 | |
| DNA sequence | 5594 | MG29-1- | GTTGTTCTTTCCTGGTATAT |
| of HPRT | | HPRT- | GC |
| target site | | target | |
| | | site-A5 | |
| DNA sequence | 5595 | MG29-1- | CTGGTATATGCTGTGGAATT |
| of HPRT | | HPRT- | GA |
| target site | | target | |
| | | site-B5 | |
| DNA sequence | 5596 | MG29-1- | AGCATGTCCTACCTGTGGCA |
| of HPRT | | HPRT- | AC |
| target site | | target | |
| | | site-C5 | |
| DNA sequence | 5597 | MG29-1- | GTGTTGCCACAGGTAGGACA |
| of HPRT | | HPRT- | TG |
| target site | | target | |
| | | site-D5 | |
| DNA sequence | 5598 | MG29-1- | TGTTGCCACAGGTAGGACAT |
| of HPRT | | HPRT- | GC |
| target site | | target | |
| | | site-E5 | |
| DNA sequence | 5599 | MG29-1- | CATACTGTAAATGGGTAACC |
| of HPRT | | HPRT- | GT |
| target site | | target | |
| | | site-F5 | |
| DNA sequence | 5600 | MG29-1- | CCATACTGTAAATGGGTAAC |
| of HPRT | | HPRT- | CG |
| target site | | target | |
| | | site-G5 | |
| DNA sequence | 5601 | MG29-1- | ATAAAGCTCCATCTCTAAGG |
| of HPRT | | HPRT- | CA |
| target site | | target | |
| | | site-H5 | |
| DNA sequence | 5602 | MG29-1- | GTGATACCTTTTCTGGAGCA |
| of HPRT | | HPRT- | TT |
| target site | | target | |
| | | site-A6 | |
| DNA sequence | 5603 | MG29-1- | CTGGAGCATTCCTGAGTTCA |
| of HPRT | | HPRT- | GG |
| target site | | target | |
| | | site-B6 | |
| DNA sequence | 5604 | MG29-1- | TGGAGCATTCCTGAGTTCAG |
| of HPRT | | HPRT- | GT |
| target site | | target | |
| | | site-C6 | |
| DNA sequence | 5605 | MG29-1- | TGCTGTGATTGGCTTGTTAT |
| of HPRT | | HPRT- | GT |
| target site | | target | |
| | | site-D6 | |
| DNA sequence | 5606 | MG29-1- | GCTGTGATTGGCTTGTTATG |
| of HPRT | | HPRT- | TT |
| target site | | target | |
| | | site-E6 | |
| DNA sequence | 5607 | MG29-1- | CTGTGATTGGCTTGTTATGT |
| of HPRT | | HPRT- | TC |
| target site | | target | |
| | | site-F6 | |
| DNA sequence | 5608 | MG29-1- | TTGGAAGAGTCATGAGGGAC |
| of HPRT | | HPRT- | AT |
| target site | | target | |
| | | site-G6 | |
| DNA sequence | 5609 | MG29-1- | CAGATGTTAAAGGCAGTCTC |
| of HPRT | | HPRT- | AA |
| target site | | target | |
| | | site-H6 | |
| DNA sequence | 5610 | MG29-1- | CTTGAGACTGCCTTTAACAT |
| of HPRT | | HPRT- | CT |
| target site | | target | |
| | | site-A7 | |
| DNA sequence | 5611 | MG29-1- | TTGAGACTGCCTTTAACATC |
| of HPRT | | HPRT- | TG |
| target site | | target | |
| | | site-B7 | |
| DNA sequence | 5612 | MG29-1- | TAACCCAAATGCTGCCTGTT |
| of HPRT | | HPRT- | GA |
| target site | | target | |
| | | site-C7 | |
| DNA sequence | 5613 | MG29-1- | ATAACCCAAATGCTGCCTGT |
| of HPRT | | HPRT- | TG |
| target site | | target | |
| | | site-D7 | |
| DNA sequence | 5614 | MG29-1- | TCAACAGGCAGCATTTGGGT |
| of HPRT | | HPRT- | TA |
| target site | | target | |
| | | site-E7 | |
| DNA sequence | 5615 | MG29-1- | CAACAGGCAGCATTTGGGTT |
| of HPRT | | HPRT- | AT |
| target site | | target | |
| | | site-F7 | |
| DNA sequence | 5616 | MG29-1- | AACAGGCAGCATTTGGGTTA |
| of HPRT | | HPRT- | TA |
| target site | | target | |
| | | site-G7 | |
| DNA sequence | 5617 | MG29-1- | GAACAAAAGCTGGAGGTGGT |
| of HPRT | | HPRT- | AT |
| target site | | target | |
| | | site-H7 | |
| DNA sequence | 5618 | MG29-1- | GGTAGAGTTGACTTATACCA |
| of HPRT | | HPRT- | CC |
| target site | | target | |
| | | site-A8 | |
| DNA sequence | 5619 | MG29-1- | GTAGAGTTGACTTATACCAC |
| of HPRT | | HPRT- | CT |
| target site | | target | |
| | | site-B8 | |
| DNA sequence | 5620 | MG29-1- | GGAACAAAAGCTGGAGGTGG |
| of HPRT | | HPRT- | TA |
| target site | | target | |
| | | site-C8 | |
| DNA sequence | 5621 | MG29-1- | TGGAACAAAAGCTGGAGGTG |
| of HPRT | | HPRT- | GT |
| target site | | target | |
| | | site-D8 | |
| DNA sequence | 5622 | MG29-1- | TTTTTGGAACAAAAGCTGGA |
| of HPRT | | HPRT- | GG |
| target site | | target | |
| | | site-E8 | |
| DNA sequence | 5623 | MG29-1- | GGGTAAAACAACTAGTGTGC |
| of HPRT | | HPRT- | CA |
| target site | | target | |
| | | site-F8 | |
| DNA sequence | 5624 | MG29-1- | GGCACACTAGTTGTTTTACC |
| of HPRT | | HPRT- | CT |
| target site | | target | |
| | | site-G8 | |
| DNA sequence | 5625 | MG29-1- | GCACACTAGTTGTTTTACCC |
| of HPRT | | HPRT- | TA |
| target site | | target | |
| | | site-H8 | |
| DNA sequence | 5626 | MG29-1- | CCCTAAAGTTCCTCTTTGTA |
| of HPRT | | HPRT- | AG |
| target site | | target | |
| | | site-A9 | |
| DNA sequence | 5627 | MG29-1- | GGGATTGTATTTCCAAGGTT |
| of HPRT | | HPRT- | TC |
| target site | | target | |
| | | site-B9 | |
| DNA sequence | 5628 | MG29-1- | CAAGGTTTCTAGACTGAGAG |
| of HPRT | | HPRT- | CC |
| target site | | target | |
| | | site-C9 | |
| DNA sequence | 5629 | MG29-1- | TAGACTGAGAGCCCTTTTCA |
| of HPRT | | HPRT- | TC |
| target site | | target | |
| | | site-D9 | |
| DNA sequence | 5630 | MG29-1- | CATCTTTGCTCATTGACACT |
| of HPRT | | HPRT- | CT |
| target site | | target | |
| | | site-E9 | |
| DNA sequence | 5631 | MG29-1- | ATCTTTGCTCATTGACACTC |
| of HPRT | | HPRT- | TG |
| target site | | target | |
| | | site-F9 | |
| DNA sequence | 5632 | MG29-1- | CTCATTGACACTCTGTACCC |
| of HPRT | | HPRT- | AT |
| target site | | target | |
| | | site-G9 | |
| DNA sequence | 5633 | MG29-1- | ACACACCCAAGGAAAGACTA |
| of HPRT | | HPRT- | TG |
| target site | | target | |
| | | site-H9 | |
| DNA sequence | 5634 | MG29-1- | AACACACCCAAGGAAAGACT |
| of HPRT | | HPRT- | AT |
| target site | | target | |
| | | site-A10 | |
| DNA sequence | 5635 | MG29-1- | GCTCTCCATTTCATAGTCTT |
| of HPRT | | HPRT- | TC |
| target site | | target | |
| | | site-B10 | |
| DNA sequence | 5636 | MG29-1- | ATAGTCTTTCCTTGGGTGTG |
| of HPRT | | HPRT- | TT |
| target site | | target | |
| | | site-C10 | |
| DNA sequence | 5637 | MG29-1- | CTTGGGTGTGTTAAAAGTGA |
| of HPRT | | HPRT- | CC |
| target site | | target | |
| | | site-D10 | |
| DNA sequence | 5638 | MG29-1- | ATCCGTGCTGAGTGTACCAT |
| of HPRT | | HPRT- | GG |
| target site | | target | |
| | | site-E10 | |
| DNA sequence | 5639 | MG29-1- | ATTTCATCCGTGCTGAGTGT |
| of HPRT | | HPRT- | AC |
| target site | | target | |
| | | site-F10 | |
| DNA sequence | 5640 | MG29-1- | GAAACGTCAGTCTTCTCTTT |
| of HPRT | | HPRT- | TG |
| target site | | target | |
| | | site-G10 | |
| DNA sequence | 5641 | MG29-1- | TAGAGAGGCACATTTGCCAG |
| of HPRT | | HPRT- | TA |
| target site | | target | |
| | | site-H10 | |

r; native RNA linkage comprising the sugar ribose (for example the ribose or RNA form of the A base is written rA), d; deoxyribose sugar (DNA) linkage (for example a deoxyribose form of the A base is written dA), *; between bases in which one of the oxygen molecules in the phosphodiester bond is replaced with sulfur; AltR1 and AltR2 refer to IDT technologies' proprietary 5′ and 3′ AltR modifications

### Example 22—Additional MG29-1 Guide Chemistry Optimization

[0510] The editing activity of 5 guides with the same base sequence but different chemical modifications was evaluated in Hepa1-6 cells by co-transfection of mRNA encoding MG29-1 and the guide; the results are shown in Table 15 and FIG. 68. A guide with the same base sequence and a commercially available chemical modification called A1tR1/A1tR2 was used as a control. The spacer sequence in these guides targets a 22 nucleotide region in albumin intron1 of the mouse genome. Guide mA1b298-44 exhibited 67.5% of the editing activity of the control AltR1/AltR2 guide while the other 4 guides did not result in measurable editing. When co-transfection of mRNA and guide with a lipid transfection reagent such as Messenger MAX is used, the mixture of the two RNA forms a complex with the positively charged lipid and the complex enters the cells via endocytosis and eventually reaches the cytoplasm, where the mRNA is translated into protein. In the case of an RNA guided nuclease such as MG29-1, the resulting MG29-1 protein presumably forms a complex with the guide RNA in the cytoplasm before entering the nucleus in a process mediated by the nuclear localization signals that were engineered into the MG29-1 protein. Because translation of the mRNA into sufficient amounts of MG29-1 protein followed by the binding of the MG29-1 protein to the guide RNA takes a finite amount of time, the guide RNA may require increased stability in the cytoplasm for longer than is the case when pre-formed RNP is delivered by nucleofection. Thus, lipid-based mRNA/sgRNA co-transfection may require a more stable guide than is the case for RNP nucleofection, which may result in some guide chemistries being active as RNP but inactive when co-transfected with mRNA using cationic lipid reagents.

TABLE 15
Activity of chemically modified MG29-1
guides in Hepa1-6 cells transfected with
MG29-1 mRNA and the guide RNA

| | | | Editing |
|---|---|---|---|
| | | sgRNA sequence | activity |
| | SEQ | and | (% of |
| sgRNA | ID | chemical | AltR1/AltR2 |
| name | No. | modifications | control) |
| mAlb298-40 | 5745 | mC*mU*mU*U*UAAU | 0 |
| | | UmUmCmUmACU*G*U | |
| | | *U*GUAGAUi2FCi2 | |
| | | FUI2FGi2FUi2FAi | |
| | | 2FAi2FCi2FGi2FA | |
| | | i2FUi2FCi2FGi2F | |
| | | Gi2FGi2FAi2FAi2 | |
| | | FC*i2FU*i2FGi2F | |
| | | G*i2FC*mA | |
| mAlb298-41 | 5746 | mC*mU*mU*U*UAAU | 0 |
| | | UmUmCmUmACU*G*U | |
| | | *U*dGdTdAdGdAdT | |
| | | i2FCi2FUi2FGi2F | |
| | | Ui2FAi2FAi2FCi2 | |
| | | FGi2FAi2FUi2FCi | |
| | | 2FGi2FGi2FGi2FA | |
| | | i2FAi2FC*i2FU*i | |
| | | 2FGi2FG*i2FC*MA | |
| mAlb298-42 | 5747 | mC*mU*mU*U*UAAU | 0 |
| | | UmUmCmUmACU*G*U | |
| | | *U*i2FGi2FUi2FA | |
| | | i2FGi2FAi2FUi2F | |
| | | Ci2FUi2FGi2FUi2 | |
| | | FAi2FAi2FCi2FGi | |
| | | 2FAi2FUi2FCi2FG | |
| | | i2FGi2FGi2FAi2F | |
| | | Ai2FC*i2FU*i2FG | |
| | | i2FG*12FC*mA | |
| mAlb298-43 | 5748 | mC*mU*mU*U*UAAU | 0 |
| | | UmUmCmUmAmCU*G* | |
| | | U*U*GUAGAUi2FCi | |
| | | 2FUI2FGi2FUi2FA | |
| | | i2FAi2FCi2FGi2F | |
| | | Ai2FUi2FCi2FGi2 | |
| | | FGi2FGi2FAi2FAi | |
| | | 2FC*12FU*i2FGi2 | |
| | | FG*i2FC*MA | |

Nomenclature of chemical modifications: a “/” is used to separate bases with 2′-flourine modifications, m; 2′-O-methyl base (for example a A base with 2′-O-methyl modification is written as mA), i2F; internal 2′-flourine base (for example an internal C with 2′-flourine modification is written as /12FC/), 52F; 2′-flourine base at the 5′ end of the sequence (for example a 5′ C with 2′-flourine modification is written as /52FC/), 32F; 2′-flourine base at the 3′ end of the sequence (for example a 3′ A base with 2′- flourine modification is written as /32FA/), r; native RNA linkage comprising the sugar ribose (for example the ribose or RNA form of the A base is written rA), d; deoxyribose sugar (DNA) linkage (for example a deoxyribose form of the A base is written dA), *; between bases in which one of the oxygen molecules in the phosphodiester bond is replaced with sulfur; AltR1 and AltR2 refer to DDT technologies' proprietary 5′ and 3′ AltR modifications

[0511] In order to test the stability of these chemically modified guides compared to the guide with no chemical modification (native RNA), a stability assay using crude cell extracts was used. Crude cell extracts from mammalian cells were selected because they contain the mixture of nucleases that a guide RNA will be exposed to when delivered to mammalian cells in vitro or in vivo. Hepa1-6 cells were collected by adding 3 ml of cold PBS per 15 cm dish of confluent cells and releasing the cells from the surface of the dish using a cell scraper. The cells were pelleted at 200 g for 10 min and frozen at −80° C. for future use. For the stability assays, cells were resuspended in 4 volumes of cold PBS (i.e. for a 100 mg pellet cells were resuspended in 400 ul of cold PBS). Triton X-100 was added to a ending concentration of 0.2% (v/v), cells were vortexed for 10 seconds, put on ice for 10 minutes and vortexed again for 10 seconds. Triton X-100 is a mild non-ionic detergent that disrupts cell membranes but does not inactivate or denature proteins at the concentration used. Stability reactions were set up on ice and comprised 20 ul of cell crude extract with 2 pmoles of each guide (1 ul of a 2 uM stock). Six reactions were set up per guide comprising: input, 0.5 hour, 1 hour, 4 hours, 9 hours and 21 hours (the time in hours referring to the length of time each sample was incubated). Samples were incubated at 37° C. from 0.5 hours up to 21 hours while the input control was left on ice for 5 minutes. After each incubation period, the reaction was stopped by adding 300 ul of a mixture of phenol and guanidine thiocyanate (Tri reagent, Zymo Research) which immediately denatures all proteins and efficiently inhibits ribonucleases and facilitates the subsequent recovery of RNA. After adding Tri Reagent the samples were vortexed for 15 seconds and stored at −20° C. RNA was extracted from the samples using Direct-zol RNA miniprep kit (Zymo Research) and eluted in 100 ul of nuclease-free water. Detection of the modified guide was performed using Taqman RT-qPCR using the Taqman miRNA Assay technology (Thermo Fisher) and primers and probes designed to specifically detect the sequence in the mA1b298 sgRNA, which is the same for all of the guides. Data was plotted as a function of percentage of sgRNA remaining in relation to the input sample (Table 16 and FIG. 69).

TABLE 16
Stability of Chemically Modified MG29-1 Guides

| | Percentage of guide left | | |
|---|---|---|---|
| Time | mAlb298 | mAlb298- | mAlb298- |
| (H) | unmodified | AltR | 44 |
| 0.5 | 31.8640157 | 46.1691 | 89.5025 |
| 1 | 19.6826994 | 18.8809 | 68.7771 |
| 4 | 3.80753207 | 7.99366 | 55.0953 |
| 9 | 1.67464604 | 2.14928 | 50 |
| 21 | 1.17190546 | 0.4044 | 44.1351 |

[0512] Guide mA1b289-44 exhibited significantly improved stability in the cell lysate compared to both un-modified guide and the guide with AltR1/AltR2 modifications. Thus, the chemical modifications present in the mA1b289-44 guide may be useful for optimizing editing in vivo. The chemical modifications present on the mA1b289-44 guide are detailed in Table 15. The mA1b289-44 guide chemistry differs from another highly stable guide chemistry called the mA1b289-37 by the presence of 3 additional phosphorothioate linkages

### Example 23—Improving the Stability of the Guide RNA for MG29-1 by Addition of a Stem-Loop at the 5′ End

[0513] A comparison of the stability in cell lysates in vitro of the guide RNA for MG29-1 to that of the guide RNA for a type II CRISPR nuclease called MG3-6/3-4 shows that the MG29-1 guide is inherently less stable (Table 17 and FIGS. 70A-B).

TABLE 17
Stability of Type II Versus Type V Guides

| | Percentage of guide left | | | |
|---|---|---|---|---|
| | Unmodified | | Only 5′ and 3′ End Modifications | |
| Time (H) | Type II | Type V | Type II | Type V |
| 0.5 | 68.30201 | 31.86402 | 61.98539 | 46.16912 |
| 1 | 51.05061 | 19.6827 | 59.66679 | 18.88091 |
| 4 | 9.672281 | 3.807532 | 51.05061 | 7.99366 |
| 9 | 1.757904 | 1.674646 | 40.47211 | 2.149284 |
| 21 | 0.034051 | 1.171905 | 1.447794 | 0.4044 |

[0514] As shown in FIG. 70A, when comparing guide RNA without chemical modifications, the Type V guide (MG29-1 guide) was degraded more rapidly than the Type II guide (MG3-6/3-4 guide). As shown in FIG. 70B, when comparing guide RNA with chemical modifications of both ends of the RNA, the difference in stability between the Type V guide (MG29-1 guide) and the Type II guide (MG3-6/3-4 guide) was even more pronounced. The end-modified type V guide was almost completely degraded in 10 h while 40% of the Type II guide remained at the same time points. The secondary structures of the backbone (CRISPR repeat and tracr) of the MG29-1 (Type V) guide and the backbone of the MG3-6/3-4 (Type II) guide were predicted using the folding algorithm in Geneious Prime and are shown in FIG. 71. The backbone of the MG29-1 guide is 24 nucleotides long while that of MG3-6/3-4 is 88 nucleotides long. The backbone (CRISPR repeat) of the MG29-1 guide is predicted to form a single stem loop with a stem comprised of 5 nucleotides and a free energy of −1.22 kcal/mol while the backbone (CRISPR repeat and tracr) of MG3-6/3-4 is predicted to form 3 stem loops with a free energy of −14.8 kcal/mol. The three stem-loops of the MG3-6/3-4 guide RNA are comprised of stem 1 (at the 5′ end of the TRACR) that has a 10 nucleotide stem, stem 2 (in the middle) that has a 5 nucleotide stem, and stem 3 (at the 3′ end of the backbone) that has a 11 nucleotide stem. The larger size and more extensive stem structures in the MG3-6/3-4 guide RNA may contribute to the greater stability of this guide compared to the MG29-1 guide. The addition of a stem-loop forming RNA sequence at the 5′ end of the MG29-1 guide may improve its stability and thereby potentially improve the efficiency of editing in vivo. In one embodiment, stem 1 of the MG3-6/3-4 guide comprises the sequence (GUUGAGAAUCGAAAGAUUCUUAAU), wherein the underlined bases are predicted to form non-canonical G-U base pairs. To improve the stability of the stem, the underlined bases were changed from U to C to convert these to G-C base pairs in the predicted stem (GUUGAGAAUCGAAAGAUUCUCAAC). In one embodiment, this stem-loop forming sequence is added at the 5′ end of the MG29-1 guide RNA with chemistry #37. In addition, the chemical modifications on the 5′-most 4 nucleotides of the #37 chemistry (comprised of 2′ O-methyl and phosphorothioate linkages) were replicated at the new 5′ end of the guide in order to protect the 5′ end of the guide from nuclease attack. This gave rise to the guide RNA sequence called mA1b29-8-50 (Table 18). In an alternative guide design, the chemically modified bases at the original 5′ end of the mA1b298-37 were moved to the new 5′ end of the guide after the addition of the stem-loop sequence as in mA1b29-8-49. In another design for a potentially more stable MG29-1 guide, the RNA sequence from the MG3-6/3-4 backbone that encompasses stem-loop 1 and stem-loop 2 was added to the 5′ end of the MG29-1 guide to create mA1b29-8-48 and mA1b29-8-47, which differ in the chemically modified bases included. In another version, guide mA1b29-8-48 is further chemically modified by inclusion of phosphorothioate and 2′ O-methyl bases in the loop 1 (mALb29-8-47) or loop 1 and loop 2 ((mALb29-8-46). The activity of these guides can be tested in mammalian cells by transfection of mRNA and guide RNA mixtures using MessengerMax lipid reagent or other methodologies. The stability of these guides can be tested in the same mammalian cell lysate assay system as described above. Guides that retain editing activity and exhibit improvements in stability are candidates for testing in vivo in mice.

TABLE 18
Activity of chemically modified MG29-1
guides in Hepa1-6 cells transfected with
MG29-1 mRNA and the guide RNA

| | SEQ | sgRNA sequence and |
|---|---|---|
| | ID | chemical |
| sgRNA name | NO. | modifications |
| mAlb298-37 | 5750 | mC*mU*mU*U*rUrArArUrUmUmC |
| | | mUmArCrU*rG*rU*rU*rGrUrA |
| | | rGrArUrCrUrGrUrArArCi2FGi |
| | | 2FAi2FUi2FCi2FGi2FGi2FGi |
| | | 2FAi2FAi2FC*i2FU*i2FGi2FG |
| | | *i2FC*MA |
| mAlb29-8-50 | 5751 | mG*mU*mU*GrArGrArArUrC*mG |
| | | *mA*mA*mArGrArUrUrCrUrCr |
| | | ArArC*mC*mU*mU*U*UrArArU |
| | | rUmUmCmUmArCrU*G*U*U*GrU |
| | | rArGrArUrCrUrGrUrArArCfGf |
| | | AfUfCfGfGfGfAfAfC*fU*fGf |
| | | G*fC*mA |
| mAlb29-8-49 | 5752 | mG*mU*mU*GrArGrArArUrCrGr |
| | | ArArArGrArUrUrCrUrCrArAr |
| | | C*mC*mU*mU*U*UrArArUrUmUm |
| | | CmUmArCrU*G*U*U*GrUrArGr |
| | | ArUrCrUrGrUrArArCfGfAfUfC |
| | | fGfGfGfAfAfC*fU*fGfG*fC* |
| | | mA |
| mAlb29-8-48 | 5753 | mG*mU*mU*GAGAAUCGAAAGAUUC |
| | | UUAAUAAGGCAUCCUUCCGAUGCm |
| | | C*mU*mU*U*rUrArArUrUmUmCm |
| | | UmArCrU*rG*rU*rU*rGrUrAr |
| | | GrArUrCrUrGrUrArArCi2FGi |
| | | 2FAi2FUi2FCi2FGi2FGi2FGi2 |
| | | FAi2FAi2FC*12FU*i2FGi2FG |
| | | *i2FC*mA |
| mAlb29-8-47 | 5754 | mG*mU*mU*GAGAAUCGAAAGAUUC |
| | | UUAAUAAGGCAUCCUUCCGAUGCC |
| | | UUUrUrArArUrUmUmCmUmArCrU |
| | | *rG*rU*rU*rGrUrArGrArUrC |
| | | rUrGrUrArArCi2FGi2FAi2FU |
| | | I2FCi2FGi2FGi2FGi2FAi2FAi |
| | | 2FC*12FU*i2FGi2FG*i2FC*m |
| | | A |
| mAlb29-8-46 | 5755 | mG*mU*mU*GAGAAUCmG*mA*mA* |
| | | MAGAUUCUUAAUAAGGCAUCmC*m |
| | | U*mU*mC*mCGAUGCmC*mU*mU*U |
| | | *rUrArArUrUmUmCmUmArCrU* |
| | | rG*rU*rU*rGrUrArGrArUrCr |
| | | UrGrUrArArCi2FGi2FAi2FUi2 |
| | | FCi2FGi2FGi2FGi2FAi2FAi2 |
| | | FC*i2FU*i2FGi2FG*i2FC*MA |

Nomenclature of chemical modifications: a “/” is used to separate bases with 2′-flourine modifications, m; 2′-O-methyl base (for example a A base with 2′-O-methyl modification is written as mA), i2F; internal 2′-flourine base (for example an internal C with 2′-flourine modification is written as /12FC/), 52F; 2′-flourine base at the 5′ end of the sequence (for example a 5′ C with 2′-flourine modification is written as /52FC/), 32F; 2′-flourine base at the 3′ end of the sequence (for example a 3′ A base with 2′-flourine modification is written as /32FA/), r; native RNA linkage comprising the sugar ribose (for example the ribose or RNA form of the A base is written rA), d; deoxyribose sugar (DNA) linkage (for example a deoxyribose form of the A base is written dA), *; between bases in which one of the oxygen molecules in the phosphodiester bond is replaced with sulfur; AltR1 and AltR2 refer to IDT technologies' proprietary 5′ and 3′ AltR modifications

### Example 24—In Vivo Genome Editing with the MG29-1 Nuclease

[0515] To evaluate the ability of the MG29-1 Type V nuclease to edit the genome in vivo in a living animal, we used a lipid nanoparticle to deliver a mRNA encoding the MG29-1 nuclease and one of four guide RNA. The four guide RNA tested are mA1b298-37, mA1b2912-37, mA1b2918-37, and mA1b298-34, the sequences of which are shown in Table 19. Guides mA1b298-37 and mA1b298-34 have the same nucleotide sequence but different chemical modifications while guides mA1b298-37, mA1b2912-37, and mA1b2918-37 have different spacer sequences but the same chemical modifications.

TABLE 19
Sequences and chemical modifications of
guide RNA tested in vivo in mice

| | SEQ | |
|---|---|---|
| | ID | |
| Guide name | NO. | Sequence |
| mAlb298-37 | 5756 | mC*mU*mU*U*UAAUUmUmC |
| | | mUmACU*G*U*U*GUAGAUC |
| | | UGUAACfGfAfUfCfGfGfG |
| | | fAfAfC*fU*fGfG*fC*mA |
| mAlb2912-37 | 5757 | mC*mU*mU*U*UAAUUmUmC |
| | | mUmACU*G*U*U*GUAGAUA |
| | | GUGUAGfCfAfGfAfGfAfG |
| | | fGfAfA*fC*fCfA*fU*mU |
| mAlb2918-37 | 5758 | mC*mU*mU*U*UAAUUmUmC |
| | | mUmACU*G*U*U*GUAGAUA |
| | | AGAUUGfAfUfGfAfAfGfA |
| | | fCfAfA*fC*fUfA*fA*mC |
| mAlb298-34 | 5759 | mC*rU*rUrArArUrUmUmC |
| | | mUmArCrUrGrUrUrGmUmA |
| | | mGmArUrCrUrGrUrArArC |
| | | rGrArUrCrGrGrGrA*rAf |
| | | C*fUfG*fGfC*mA |

Nomenclature of chemical modifications: a “/” is used to separate bases with 2'-flourine modifications, m; 2'-O-methyl base (for example a A base with 2'-O-methyl modification is written as mA), i2F; internal 2'-flourine base (for example an internal C with 2'-flourine modification is written as /i2FC/), 52F; 2'-flourine base at the 5' end of the sequence (for example a 5' C with 2'-flourine modification is written as /52FC/), 32F; 2'-flourine base at the 3' end of the sequence (for example a 3' A base with 2'-flourine modification is written as /32FA/), r; native RNA linkage comprising the sugar ribose (for example the ribose or RNA form of the A base is written rA), d; deoxyribose sugar (DNA) linkage (for example a deoxyribose form of the A base is written dA), *; between bases in which one of the oxygen molecules in the phosphodiester bond is replaced with sulfur; AltR1 and AltR2 refer to IDT technologies' proprietary 5' and 3' AltR modifications

[0516] In the in vitro stability assay in Hepa1-6 cell lysates, the mA1b298-37 guide was more stable than the mA1b298-34 guide (FIG. 72), demonstrating that the chemical modifications on the mA1b298-37 guide were more effective at protecting the guide RNA against degradation.

[0517] The mRNA encoding MG29-1 was generated by in vitro transcription of a linearized plasmid template using T7 RNA polymerase and standard conditions using nucleotides and enzymes purchased from New England Biolabs or Trilink Biotechnologies. The sequence of the MG29-1 coding sequence is shown in SEQ ID No. 5680. The protein coding sequence of the MG29-1 cassette comprises the following elements from 5′ to 3′: the nuclear localization signal from SV40, a five amino acid linker(GGGS), the protein coding sequence of the MG29-1 nuclease from which the initiating methionine codon was removed, a 3 amino acid linker (SGG) and the nuclear localization signal from nucleoplasmin. The DNA sequence of this cassette was codon optimized for human using a commercially available algorithm. An approximately 100 nucleotide polyA tail was encoded in the plasmid used for in vitro transcription, and the mRNA was co-transcriptionally capped using the CleanCAP (™) reagent purchased from Trilink Biotechnologies. Uridine in the mRNA was replaced with N1-methyl pseudouridine.

[0518] The lipid nanoparticle (LNP) formulation used to deliver the MG29-1 mRNA and the guide RNA is based on LNP formulations described in the literature including Kauffman et al. (see e.g. Nano Lett. 2015, 15, 11, 7300-7306, which is incorporated by reference herein). The four lipid components were dissolved in ethanol and mixed in an appropriate molar ratio to make the lipid working mix. The mRNA and the guide RNA were either mixed before formulation at a 1:1 mass ratio or formulated in separate LNP that were later co-injected into mice at a 1:1 mass ratio of the two RNA's. In either case, the RNA was diluted in 100 mM Sodium Acetate (pH4.0) to make the RNA working stock. The lipid working stock and the RNA working stock were mixed in a microfluidics device (Ignite NanoAssembler, Precision Nanosystems) at a flow rate ratio of 1:3, respectively, and a flow rate of 12 mls/min. The LNP were dialyzed against phosphate buffered saline (PBS) for 2 to 16 hours and then concentrated using Amicon spin concentrators (Millipore) until the ending volume was achieved. The concentration of RNA in the LNP formulation was measured using the Ribogreen reagent (Thermo Fisher). The diameter and polydispersity (PDI) of the LNP were determined by dynamic light scattering. Example LNP had diameters ranging from 65 nm to 120 nm and PDI of 0.05 to 0.20. LNP were injected intravenously into 8 to 12 week old C57B16 wild type mice via the tail vein (0.1 ml per mouse) at a total RNA dose of 1 mg RNA per kg body weight. The mice were sacrificed three days post dosing, and the liver was collected and homogenized using a bead beater (Omni International) in a digestion buffer supplied in the PureLink Genomic DNA Isolation Kit (Thermo Fisher Scientific). Genomic DNA was purified from the resulting homogenate using the PureLink Genomic DNA Isolation Kit (Thermo Fisher Scientific) and quantified by measuring the absorbance at 260 nm. Genomic DNA purified from mice injected with buffer alone was used as a control. The liver genomic DNA was then PCR amplified using primers flanking the region targeted by the guides. The PCR primers used are shown in Table 20. PCR was performed using Pfusion flash high fidelity PCR master mix (Thermo Fisher Scientific) on 50 ng of genomic DNA and an annealing temperature of 64° C.

TABLE 20
Sequences of PCR primers and Sequencing
primers used to analyze in vivo
genome editing in mice

| Primer name | SEQ ID NO. | Sequence |
|---|---|---|
| mAlb90F | 5760 | CTCCTCTTCGTCTCCGGC |
| mAlb1073 | 5761 | CTGCCACATTGCTCAGCAC |
| mALb460F | 5762 | GCCTGCTCGACCATGCTAT |
| | | A |

[0519] The resulting PCR product was a single band by agarose gel electrophoresis and was purified using the DNA Clean & Concentrator-5 kit (Zymo Research), then subjected to Sanger sequencing with the primer mA1b460F that is located between 100 and 300 bases from the target sites of the different guides. The Sanger sequencing chromatograms were analyzed for insertions and deletions (INDELS) at the predicted target site for each guide by Tracking of Indels by DEcomposition (TIDE) as described by Brinkman et al (Nucleic Acids Res. 2014 Dec. 16; 42 (22): e168)_The presence of INDELS at the target site is the consequence of the generation of double strand breaks in the DNA, which are then repaired by the error prone cellular repair machinery which introduces insertions and deletions.

[0520] The results of the TIDE analysis are shown in FIG. 73 and Table 21. Group A mice received LNP encapsulating guide RNA mA1b298-37. Group B mice received LNP encapsulating guide RNA mA1b2912-37. Group C mice received LNP encapsulating guide RNA mA1b2918-37. Group D mice received LNP encapsulating guide RNA mA1b298-34. All mice also received LNP encapsulating the MG29-1 mRNA. The average INDEL frequency in group A that received guide mA1b298-37 was 21%. The average INDEL frequency in group B that received guide mA1b2912-37 was 20%. The average INDEL frequency in group C that received guide mA1b2918-37 was 15%. The average INDEL frequency in group D that received guide mA1b298-34 was 0%. This data demonstrates that the MG29-1 nuclease together with a guide RNA comprised of chemical modified bases (chemistry #37) was active in vivo in the liver of mice. Guide mA1b298-34 that has the same nucleotide sequence as guide mA1b298-37, but with different chemical modifications, was not active. Guide mA1b298-34 exhibited less stability in cell lysate than guide mA1b298-37, which correlates to in vivo activity.

TABLE 21
Gene editing at the on target site in the liver of mice at 3 days after IV
injection of nuclease mRNA and guide RNA packaged in LNP

| | | Editing | |
|---|---|---|---|
| Group | Animal | Efficiency (%) | R-Squared |
| A | 1281 | 20 | 0.98 |
| | 1282 | 19 | 0.98 |
| | 1283 | 25 | 0.98 |
| | 1284 | 24 | 0.98 |
| | 1285 | 17 | 0.99 |
| B | 1286 | 24 | 0.97 |
| | 1287 | 12 | 0.98 |
| | 1288 | 16 | 0.98 |
| | 1289 | 22 | 0.97 |
| | 1290 | 27 | 0.97 |
| C | 1291 | 12 | 0.99 |
| | 1292 | 19 | 0.99 |
| | 1293 | Not analyzed | |
| | 1294 | 13 | 0.99 |
| | 1295 | 17 | 0.99 |
| D | 1296 | 0 | 1 |
| | 1297 | 0 | 1 |
| | 1298 | 0 | 1 |
| | 1299 | 0 | 1 |
| | 1300 | 0 | 1 |

### Example 25—MG29-1 Guide Screen for Mouse HAO-1 Gene Using mRNA Transfection

[0521] From a guide screen of exons 1 to 4 of the mouse HAO-1 gene that was performed using MG29-1 protein complexed to the guide RNA that was nucleofected into Hepa1-6 cells, 5 highly active guides were selected for further evaluation by transfection of mRNA encoding MG29-1 mixed with the guide RNA. 300 ng mRNA and 120 ng single guide RNA were transfected into Hepa1-6 cells as follows. One day before to transfection, Hepa1-6 cells that have been cultured for less than 10 days in DMEM, 10% FBS, 1×NEAA media, without Pen/Strep, were seeded into a TC-treated 24 well plate. Cells were counted, and the equivalent volume to 60,000 viable cells were added to each well. Additional pre-equilibrated media was added to each well to bring the total volume to 500 μL. On the day of transfection, 25 μL of OptiMEM media and 1.25 ul of Lipofectamine Messenger Max Solution (Thermo Fisher) were mixed in a mastermix solution, vortexed, and allowed to sit for at least 5 minutes at room temperature. In separate tubes, 300 ng of the MG29-1 mRNA and 120 ng of the sgRNA were mixed together with 25 μL of OptiMEM media, and vortexed briefly. The appropriate volume of MessengerMax solution was added to each RNA solution, mixed by flicking the tube and briefly spun down at a low speed. The complete editing reagent solutions were allowed to incubate for 10 minutes at room temperature, then added directly to the Hepa1-6 cells. Two days post transfection, the media was aspirated off of each well of Hepa1-6 cells and genomic DNA was purified by automated magnetic bead purification, via the KingFisher Flex with the MagMAX™ DNA Multi-Sample Ultra 2.0 Kit. The activity of the guides is summarized in Table 22, while the primers used are summarized in Table 23.

TABLE 22
Average Activity of MG29-1 guides at
mouse HAO1 delivered by mRNA
Transfection

| | | | | Editing |
|---|---|---|---|---|
| | | SEQ | | Activity |
| Guide | | ID | Spacer | (Average |
| Name | PAM | NO. | Sequence | % INDELs) |
| mH29-1 | TTTG | 5763 | CCCCAGACCTGTA | 26.0 |
| | | | ATAGTCATA | |
| mH29-15 | TTTG | 5764 | TGACTGTGGACAC | 32.7 |
| | | | CCCTTACCT | |
| mH29-16 | TTTC | 5765 | ATTACAGCCTGTC | 15.0 |
| | | | AGACCATGG | |
| mH29-26 | \|TTTC | 5766 | TCCATTTCATTAC | 10.0 |
| | | | AGCCTGTCA | |
| mH29-29 | TTTC | 5767 | CCTTAGGAGAAAA | 36.7 |
| | | | TGCCAAATC | |

TABLE 23
Primers designed for the mouse HAO1 gene,
used for PCR at each of the first
four exons, and for sanger sequencing

| | | | SEQ | Primer |
|---|---|---|---|---|
| Target | | Primer | ID | Se- |
| Exon | Use | Name | NO: | quence |
| Mouse | Fwd PCR | PCR_mHE1_ | 5768 | GTGACC |
| HA01 | | F_+233 | | AACCCT |
| Exon 1 | | | | ACCCGT |
| | | | | TT |
| | Rev PCR | PCR_mHE1_ | 5769 | GCAAGC |
| | | R_−553 | | ACCTAC |
| | | | | TGTCTC |
| | | | | GT |
| | Sequencing | Seq_mHE1_ | 5770 | GTCTAG |
| | | F_+139 | | GCATAC |
| | | | | AATGTT |
| | | | | TGCTCA |
| Mouse | Fwd PCR | HA01_E2_ | 5771 | CAACGA |
| HA01 | | F5721 | | AGGTTC |
| Exon 2 | | | | CCTCCA |
| | | | | GG |
| | Rev PCR | HA01_E2_ | 5772 | GGAAGG |
| | | R6271 | | GTGTTC |
| | | | | GAGAAG |
| | | | | GA |
| | Sequencing | 5938F_Seq_ | 5773 | CTATGC |
| | | HAO1_E2 | | AAGGAA |
| | | | | AAGATT |
| | | | | TGGCC |
| Mouse | Fwd PCR | HA01_E3_ | 5774 | TGCCCT |
| HA01 | | F23198 | | AGACAA |
| Exon 3 | | | | GCTGAC |
| | | | | AC |
| | Rev PCR | HA01_E3_ | 5775 | CAGATT |
| | | R23879 | | CTGGAA |
| | | | | GTGGCC |
| | | | | CA |
| | Sequencing | HA01_E3_ | 5774 | Same as |
| | | F23198 | | Fwd |
| | | | | PCR |
| | | | | Primer |
| Mouse | Fwd PCR | PCR_mHE4_ | 5776 | GGCTGG |
| HA01 | | F_+300 | | CTGAAA |
| Exon 4 | | | | ATAGCA |
| | | | | TCC |
| | Rev PCR | HA01_E4_ | 5777 | AGGTTT |
| | | R31650 | | GGTTCC |
| | | | | CCTCAC |
| | | | | CT |
| | Sequencing | PCR_mHE4_ | 5778 | TCTGCC |
| | | R_−149 | | ATGAAG |
| | | | | GCATAT |
| | | | | GGAC |

### Example 52—Efficiency of mRNA Electroporation in T Cells

[0522] Primary T cells were purified from PMBCs using a negative selection kit (Miltenyi) according to the manufacturer's recommendations. Nucleofection of mRNA was performed as follow: 200,000 cells were co-transfected with 500 ng of mRNA and the indicated amount of guide RNA using a Lonza 4D electroporator (DS-120). Cells were harvested and genomic DNA prepared three days post initial transfection. For conditions labeled “+gRNA”: 15 h post initial transfection, cells were nucleofected with indicated amount of additional guide. PCR primers appropriate for use in NGS-based DNA sequencing were generated, optimized, and used to amplify the individual target sequences for each guide RNA. The amplicons were sequenced on an Illumina MiSeq machine and analyzed with a proprietary Python script to measure gene editing (FIG. 74).

### Example 53—Editing with Chemically Modified Guides

[0523] Primary T cells were purified from PBMCs using a negative selection kit (Miltenyi) according to the manufacturer's recommendations. Nucleofection of mRNA was performed as follow: 200,000 cells were co-transfected with 500 ng of mRNA and the indicated amount of guide using a Lonza 4D electroporator (DS-120). Cells were harvested and genomic DNA prepared three days post initial transfection. Nucleofection of RNPs was performed by combining 120 pmol protein and 160 pmol guide RNA. PCR primers appropriate for use in NGS-based DNA sequencing were generated, optimized, and used to amplify the individual target sequences for each guide RNA. The amplicons were sequenced on an Illumina MiSeq machine and analyzed with a proprietary Python script to measure gene editing (FIG. 75).

### Example 54—ELISA Assay to Assess Pre-Existing Antibody Response

[0524] MG29-1 was expressed in and purified from human HEK293 cells using the Expi293™ Expression System Kit (ThermoFisher Scientific). Briefly, 293 cells were lipofected with plasmids encoding the nucleases driven by a strong viral promoter. Cells were grown in suspension culture with agitation and harvested two days post-transfection. The nuclease proteins were fused to a Six-His affinity tag and purified by metal-affinity chromatography to between 50-60% purity. Parallel lysates were made from mock-transfected cells and were subjected to an identical metal-affinity chromatography process. Cas9 was purchased from IDT and is >95% pure.

[0525] MaxiSorp® ELISA plates (Thermo Scientific) were coated with 0.5 μg of nucleases or control proteins diluted in 1× phosphate buffered saline (PBS) and incubated overnight at room temperature. Plates were then washed and incubated with a 1% (w/v) bovine serum albumin (BSA) (Sigma-Aldrich)/1× PBS solution (1% BSA-PBS) for an hour at room temperature. After another washing operation, wells were incubated for 1 h at room temperature with more than 50 separate serum samples taken from randomly selected human donors (1:50 dilution in 1% BSA-PBS). Plates were then washed and incubated for an hour at room temperature with a peroxidase-labeled goat anti-human (Fcγ fragment-specific) secondary antibody (Jackson Immuno Research), diluted 1:50,000 in 1% BSA-PBS. The assay was developed using a 3,3′,5,5′-Tetramethylbenzidine (TMB) Liquid Substrate System kit (Sigma-Aldrich), according to the manufacturer's specifications. Antibody titers are reported as absorbance values measured at 450 nm (FIG. 76). Tetanus toxoid was used as the positive control due to wide-spread vaccination against this antigen and was purchased from Sigma Aldrich. The data indicated that, in contrast to SpCas9 and tetanus toxoid (positive control), MG29-1 had similar antibody response to albumin and 293T cell extract, indicating that the donors did not have existing exposure to antigenic epitopes of MG29-1. This suggests this enzyme may be more efficacious for in vivo editing as it would be less susceptible to inactivation in vivo by existing antibody responses.

### Example 55—In Vivo Editing of Mouse HAO-1 with MG29-1 Delivered via Lipid Nanoparticle (LNP)

[0526] The human genetic disease Primary Hyperoxaluria Type I (PH1) is caused by mutations in the alanine-glyoxylate aminotransferase gene (AGXT) that disrupt glycolate metabolism in the liver and result in the overproduction of oxalate. Oxalate is an insoluble metabolite that is cleared from the body by the kidney and excreted in the urine. Elevated levels of oxalate production result in the accumulation of oxalate in the kidney and other organs which results in kidney failure as well as damage to other organs. The available curative treatment for PH1 is a liver transplant which is often combined with a kidney transplant to replace the defective kidney function. The HAO-1 gene encodes the enzyme glycolate oxidase (GO) which lies upstream of AGXT in the glycolate metabolic pathway. Reduction in the amount of GO protein reduces the production of oxalate and is thus an effective approach for the treatment of PH1 as demonstrated in a mouse model of PH1 (see Martin-Higueras et al. Molecular Therapy vol. 24 no. 4, 719-725 (2016) doi: 10.1038/mt.2015.224, which is incorporated by reference in its entirety herein) and in clinical studies with a RNAi drug that targets HAO-1 (see Frishberg et al. CJASN July 2021, 16 (7) 1025-1036 doi: 10.2215/CJN.14730920, which is incorporated by reference in its entirety herein).

[0527] A genome editing approach that knocks down the HAO-1 gene is an attractive approach for a curative therapy for PH1 patients. One approach for a genome editing therapy for PH1 is to create a double strand break within the coding region of the HAO-1 gene in hepatocytes which is repaired by the non-homologous end joining (NHEJ) DNA repair pathway. Hepatocytes are the cell type in the liver that express the HAO-1 gene and the NHEJ pathway is the dominant DNA repair pathway in these cells. The NHEJ repair pathway is error-prone and introduces insertions or deletions at the site of the double strand break which can lead to frame shifts (if the insertions or deletions are not multiples of 3 nucleotides) or to deletions or insertions of amino acids. The introduction of a frame shift can lead to the induction of nonsense-mediated mRNA decay which reduces the level of the mRNA, which further contributes to protein knockdown.

[0528] Double-strand breaks can be generated in a sequence specific manner by RNA guided CRISPR-Cas nucleases. MG29-1 is a type V CRISPR nuclease that utilizes a short guide RNA of between 38 and 42 nucleotides. MG29-1 primarily generates deletions at the cut site when tested in cultured mammalian cells which makes it attractive for the purposes of knocking down a gene. In order to be useful for in vivo therapeutics, MG29-1 activity is ideally preserved in living mammals when delivered using a clinically appropriate delivery system. Lipid nanoparticles represent an attractive delivery system for in vivo genome editing of hepatocytes in the liver because they efficiently deliver mRNA and sgRNA to hepatocytes after intravenous administration in rodents and primates. We therefore evaluated MG29-1 as a genome editing system for use in knocking down the HAO-1 gene as a potential therapy for PH1.

[0529] Messenger RNA encoding the MG29-1 nuclease was generated by in vitro transcription of a linearized plasmid template using T7 RNA polymerase and a mixture of ribonucleotides rATP, rCTP and rGTP and N1-methyl pseudouridine in place of rUTP and CleanCAP (Trilink). The plasmid also encoded an approximately 100 nt polyA tail at the 3′ end of the coding sequence. In addition to an mRNA encoding the wild type MG29-1 protein, a second mRNA encoding the MG29-1 protein with a single amino acid change of S168R was synthesized. The mRNA was purified on commercial spin columns, the concentration was determined by absorbance at 260 nM, and the purity was determined by Tape Station (Agilent).

[0530] Guide RNAs were selected based on editing efficiency evaluations of multiple guides spanning exons 1 to 4 of the mouse HAO-1 gene in the mouse liver cell line Hepa1-6. Three guides were chemically synthesized incorporating a combination of chemical modifications of bases at specific positions referred to collectively as chemical modification #37; these guide RNAs are shown below in Table 25.

TABLE 25
Sequences and chemical modifications of
guide RNA tested in vivo in mice

| guide RNA | SEQ | |
|---|---|---|
| Name | ID No. | Sequence |
| mH29-1 37 | 5779 | mC*mU*mU*U*UAAUUmUmC |
| | | mUmACU*G*U*U*GUAGAUC |
| | | CCCAGAfCfCfUfGfUfAfA |
| | | fUfAfG*fU*fCfA*fU*mA |
| mH29-15 37 | 5780 | mC*mU*mU*U*UAAUUmUmC |
| | | mUmACU*G*U*U*GUAGAUU |
| | | GACUGUfGfGfAfCfAfCfC |
| | | fCfCfU*fU*fAfC*fC*mU |
| mH29-29 37 | 5781 | mC*mU*mU*U*UAAUUmUmC |
| | | mUmACU*G*U*U*GUAGAUC |
| | | CUUAGGfAfGfAfAfAfAfU |
| | | fGfCfC*fA*fAfA*fU*mC |

Code for modified bases and linkages: m: 2′-O-methyl modified base, f: 2′-fluoro modifed base, *: phosphorothioate linkage

[0531] The MG29-1 mRNA and the guide RNA were separately packaged inside lipid nanoparticles (LNP) using a process essentially as described by Kaufmann et al (Nano Lett. 2015, 15, 11, 7300-7306, PMID: 26469188, DOI:10.1021/acs.nanolett.5b02497, which is incorporated by reference herein in its entirety). Lipids were purchased from Avanti Polar Lipids or from Corden Pharma and dissolved in ethanol. The mRNA or sgRNA was prepared in water then diluted in 100 mM sodium acetate (pH 4.0) to make the RNA working stock. The four lipid components were combined in ethanol at the specific ratios to make the lipid working stock. An example lipid mixture comprised cholesterol, 1,2-dioleoyl-sn-glycero-3-phosphoethanolamine (DOPE), 1,1′-((2-(4-(2-((2-(bis(2-hydroxydodecyl)amino)ethyl)(2-hydroxydodecyl)amino)ethyl)piperazin-1-yl)ethyl)azanediyl)bis(dodecan-2-ol) (C12-200), and DMG-PEG-2000 at molar ratios of 47.5:16:35:1.5. The lipid working stock and the RNA working stock were combined in a microfluidics mixing device (Precision Nanosystems) at a flow rate of 12 mL/min and a ratio of 1 volume of lipid working stock to 3 volumes of RNA working stock. The mass ratio of C12-200 to RNA in the formulation was 10 to 1. The formulated LNPs were diluted 1:1 with 1× PBS then dialyzed twice in 1× PBS for 1 hour each followed by concentration in Amicon spin concentrators. The resultant LNPs were formulated in 1× PBS buffer, filter sterilized through a 0.2 uM filter, and stored at 4° C. The concentration of the RNA inside and outside of the LNP was measured using the Ribogreen reagent (Thermo Fisher). The average diameter and polydispersity of the LNPs were measured in the resultant concentrated LNP by dynamic light scattering using a NanoBrook 90Plus (Brookhaven Instruments).

[0532] LNPs encapsulating a guide RNA and the MG29-1 mRNA or MG29-1_S168R mRNA were mixed at a RNA mass ratio of 1:1, then injected intravenously into wild type C57Bl/6 mice via the tail vein at a dose of 1 mg of RNA per kg in a total volume of 0.1 ml per mouse. Mice were sacrificed at 10 days post dosing and the 3 lobes of the liver (left lateral, right lateral, medial) were collected, flash frozen, and stored at −80° C. The entire left lateral lobe of the liver was homogenized in Genomic Digestion Buffer (Purelink Genomic DNA Purification Kit, Thermo Fisher) using 0.4 mL of buffer per 100 mg of tissue weight in a Bead Mill. Genomic DNA was purified from an aliquot of the homogenate using the Purelink Genomic DNA Purification Kit (Thermo Fisher). The region of the HAO-1 gene targeted by each specific guide RNA was PCR amplified using gene specific primers with adapters complementary to the barcoded primers used for next generation sequencing (NGS) in a PCR reaction comprised of the Q5 high fidelity DNA polymerase and a total of 29 cycles. The product of this first PCR reaction was PCR amplified using the barcoded primers for NGS using a total of 10 cycles. The resulting product was subjected to NGS on an Illumina MiSeq instrument and the results were processed using a custom script to generate the percentage of sequencing reads that contain insertions or deletions (INDELS) at the targeted site in the HAO-1 gene. The genomic DNA from livers of mice injected with PBS buffer were used as controls. The average sequencing read count was 142,000 reads (range 54,000 to 205,000). The NGS data also enabled a prediction of the percentage of INDELS that generate a frame shift as well as a determination of the INDEL profile (FIG. 80).

[0533] Total protein was extracted from the entire right lateral lobe of the liver from the same mice by homogenization in PBS in a bead mill followed by three rounds of freeze-thaw at −80° C. and room temperature. The lysate was centrifuged to remove tissue debris and the supernatant was collected. The concentration of total protein in the supernatant was determined using the BCA assay. Equal amounts of total protein were fractionated on SDS-PAGE gels and transferred to nitrocellulose membranes which were then probed with an anti-glycolate oxidase antibody (R&D Systems AF6197, sheep anti-HAO1). Detection utilized an HRP-conjugated secondary antibody (R&D Systems HAF016, Donkey anti-Sheep IgG) followed by detection with SuperSignal West Dura Chemiluminescent substrate (ThermoFisher Cat. #34076) and visualization with the Bio-Rad ChemiDoc MP imager.

[0534] Editing activity of the tested guides is summarized below in Table 26.

TABLE 26
Editing activity of guide RNA tested in vivo in mice

| | | Editing activity in | Editing activity in |
|---|---|---|---|
| guide | Exon of | Hepa1-6 cells (% | Hepa1-6 cells (% |
| RNA | HAO-1 | INDELS) by mRNA | INDELS) by RNP |
| name | targeted | transfection | nucleofection |
| mH29-1_37 | Exon 1 | 17% | 92.6% |
| mH29-15_37 | Exon 3 | 34% | 96.8% |
| mH29-29_37 | Exon 4 | 35% | 93.8% |

[0535] By nucleofection of ribonuclear protein complexes, these guide RNA all had editing activity of 90% or greater in Hepa1-6 cells. The level of editing in Hepa1-6 cells when the MG29-1 mRNA and the guide RNA were co-transfected using lipofection (MessengerMax reagent, Thermo Fisher) was lower due to the lower transfection efficiency, and guides mH29-15 and mH29-29 were significantly more potent than mH29-1 when tested by this transfection method.

[0536] The characteristics of the LNP encapsulating MG29-1 mRNA and the guide RNA are summarized in Table 27 below.

TABLE 27
Characteristics of lipid nanoparticles (LNP)

| | | LNP | LNP | % Recovery | % of RNA |
|---|---|---|---|---|---|
| LNP | Payload | Diameter | PDI | of RNA (yield) | Encapsulated |
| L012-A | mH29-1_37 | 74 | 0.15 | 71 | 92.7 |
| L012-B | mH29-15_37 | 85 | 0.08 | 87 | 93.5 |
| L012-C | mH29-29_37 | 83 | 0.121 | 78 | 92.1 |
| L012-M | MG29-1 mRNA | 98 | 0.13 | 97 | 92.9 |
| L012-S | MG29-1_S168R mRNA | 76 | 0.10 | 84 | 92.8 |

[0537] The LNP encapsulating the 3 guide RNAs had diameters between 74 nm and 85 nm with polydispersity (PDI) of 0.08 to 0.15. The LNP encapsulating the MG29-1 mRNA and the MG29-1_S168R mRNA had diameters of 98 nm and 76 nm, respectively, and PDI values less than 0.15 indicative of low polydispersity. The percentage of input RNA recovered in the resultant LNP ranged from 71% to 97% and the percentage of the total RNA that was encapsulated inside the LNP was 92% or greater for all the LNPs. These data demonstrate that both the guide RNA and the MG29-1 mRNA can be efficiently encapsulated in LNPs and that the resulting LNPs were of small size (less than 100 nM) and low polydispersity.

[0538] The level of editing at the target site in the HAO-1 gene 10 days after intravenous injection of LNP encapsulating MG29-1 mRNA and each of the guide RNAs is shown in FIG. 77. As expected, a mouse injected with PBS buffer had no editing. Mice injected with LNP encapsulating MG29-1 mRNA and the guide RNA mH29-1_37 exhibited variable levels of editing that ranged from 1% to 52%. Mice injected with LNP encapsulating MG29-1 mRNA and the guide RNA mH29-15_37 exhibited consistent levels of editing with a mean of 50.4% (range 45% to 54%). Mice injected with LNP encapsulating MG29-1 mRNA and the guide RNA mH29-29_37 exhibited consistent levels of editing with a mean of 57.7% (range 54% to 63%). Mice injected with LNP encapsulating MG29-1_S168R mRNA and the guide RNA mH29-15_37 exhibited consistent levels of editing with a mean of 50.8% (range 38% to 61%). These results demonstrate that mRNA encoding the MG29-1 nuclease together with a guide RNA with an optimized chemistry can edit a target locus in the liver of mice when delivered in an LNP. Among the 3 guide RNAs with different spacer sequences that were tested, two exhibited consistently high levels of editing while one exhibited more variable editing. Because LNP of this type deliver their payload almost exclusively to hepatocytes, and because hepatocytes make up 60 to 65% of the total number of cells in the rat liver (Bale et al, Scientific Reports volume 6, Article number: 25329 (2016) doi: 10.1038/srep25329, which is incorporated by reference in its entirety herein) and 52% of the total cells in the mouse liver (Barratta et al, Histochemistry and Cell Biology volume 131, pages 713-726 (2009) doi: 10.1007/s00418-009-0577-1, which is incorporated by reference in its entirety herein), the maximum level of editing achievable if every hepatocyte were edited at each copy of the HAO-1 gene is predicted to be 60% to 65%. Thus, 50% editing measured in total genomic DNA purified from the liver represents editing in approximately 75 to 80% of the hepatocytes. The inclusion of the S168R amino acid change in MG29-1, which can improve editing efficiency in cultured cells, did not improve editing efficiency in this study with the one guide RNA tested. The improvement in editing efficiencies with the S168R amino acid variant of MG29-1 was previously observed with guide RNAs that exhibited low editing, which may explain why no improvement was observed here with a guide RNA that was already selected for high levels of editing. The INDEL profile (FIG. 80) was composed entirely of deletions. The majority of the deletions were between 1 and 11 nucleotides with a small number of larger deletions. The frequency of predicted frame shift creation among the mice treated with guides mH29-15 and mH29-29 ranged from 70 to 80% of the total INDELS with a mean of 75%. Thus, on average, 75% of the observed INDELS are predicted to create a frame shift in the HAO-1 coding sequence which will result in disruption of the amino acid sequence downstream of the editing site and a high chance of creating a stop codon.

[0539] The other main lobe of the liver from the same mice was analyzed for the level of the protein glycolate oxidase (GO) that is the product of the HAO-1 gene to determine if the INDELS introduced into the HAO-1 gene resulted in a reduction in GO protein levels in the liver. Western blot analysis using an antibody to the GO protein detected a band of the expected size (Table 28 and FIGS. 78A-B).

TABLE 28
Editing of glycolate oxidase in mice

| Mouse | Treatment | Editing % |
|---|---|---|
| 1 | PBS | 0 |
| 2 | | 0 |
| 3 | mH29-1_37 | 23 |
| 4 | MG29-1_mRNA | 1 |
| 5 | | 52 |
| 6 | | ND |
| 8 | mH29-15_37 | 54 |
| 9 | MG29-1_mRNA | 54 |
| 10 | | 49 |
| 11 | | 45 |
| 12 | | 51 |
| 13 | mH29-29_37 | 56 |
| 14 | MG29-1_mRNA | 63 |
| 15 | | 58 |
| 16 | | 58 |
| 17 | | 54 |
| 18 | mH29-15_37 | 61 |
| 19 | MG29-1 S168R_mRNA | 39 |
| 20 | | 51 |
| 21 | | 52 |
| 22 | | ND |

[0540] In comparison to mice that received PBS buffer, mice that received LNP encapsulating MG29-1 mRNA and the various guide RNAs exhibited reduced levels of the GO protein. In general, the magnitude of the reduction in GO protein correlated to the editing efficiency at the HAO-1 gene as measured in the same mouse by NGS. Liver protein from 2 of the mice that showed reductions in GO protein were further tested by loading 3 different amounts of total protein on the gel and repeating the Western blot. As shown in FIG. 79, the reduction of GO protein in the 2 mice treated with LNP encapsulating MG29-1 mRNA and either guide RNA mH29-1_37 or mH29-15_37 was clearly observed at the different loadings of total protein. These data demonstrate that the editing of the HAO-1 gene resulted in reductions in the level of GO protein in the liver of the mice.

### Example 56—Gene Editing Outcomes at the DNA Level for TRAC in Human Peripheral Blood B Cells

[0541] Human Peripheral Blood B cells were purchased from STEMCELL Technologies and expanded using ImmunoCult™ Human B Cell Expansion Kit for 2 days prior to nucleofection. Nucleofection of MG29-1 RNPs (126 pmol protein/160 pmol guide) was performed into B cells (200,000) using the Lonza 4D electroporator. Cells were harvested and genomic DNA prepared three days post-transfection. For NGS analysis PCR primers appropriate for use in NGS-based DNA sequencing were used to amplify the target sequence for the TRAC 35 guide RNA (SEQ ID NO: 5681). The amplicon was sequenced on an Illumina MiSeq machine and analyzed with a proprietary Python script to measure gene editing (FIG. 81).

TABLE 28B
Sequences of Guide RNAs and Sequences
Targeted for Example 56

| | SEQ | | |
|---|---|---|---|
| Guide | ID | Guide | |
| Target | NO | Name | SEQUENCE |
| MG29-1 | 5681 | MG29-1- | mU*rArArUrUrUrCrUrArCrUr |
| sgRNA | | TRAC- | GrUrUrGrUrArGrArUrGrArGr |
| target- | | sgRNA-35 | UrCrUrCrUrCrArGrCrUrGrGr |
| ing | | | UrArCrArCrG*mG |
| TRAC | | | |
| DNA | 5682 | MG29-1- | GAGTCTCTCAGCTGGTACACGG |
| Sequence | | TRAC- | |
| of | | Target | |
| TRAC | | site-35 | |
| target | | | |
| site | | | |
| MG29-1 | 5683 | MG29-1- | /AltR1/rUrArArUrUrUrCrUr |
| sgRNA | | TRAC- | ArCrUrGrUrUrGrUrArGrArUr |
| target- | | sgRNA-35- | GrArGrUrCrUrCrUrCrArGrCr |
| ing | | AltR | UrGrGrUrArCrArCrGrG/ |
| TRAC | | | AltR2/ |
| DNA | 5684 | MG29-1- | GAGTCTCTCAGCTGGTACACGG |
| sequence | | TRAC- | |
| of | | target | |
| TRAC | | site- | |
| target | | 35-AltR | |
| site | | | |

r; native RNA linkage comprising the sugar ribose (for example the ribose or RNA form of the A base is written rA), d; deoxyribose sugar (DNA) linkage (for example a deoxyribose form of the A base is written dA), *; between bases in which one of the oxygen molecules in the phosphodiester bond is replaced with sulfur; AltR1 and AltR2 refer to IDT technologies' proprietary 5′ and 3′ AltR modifications

### Example 57—Gene Editing Outcomes at the DNA Level for TRAC in Hematopoietic Stem Cells (HSCs)

[0542] Mobilized peripheral blood CD34+ cells were acquired from AllCells and cultured in STEMCELL StemSpan™ SFEM II media supplemented with StemSpan™ CC110 cytokine cocktail for 48 hours prior to nucleofection. Nucleofection of MG29-1 RNPs (126 pmol protein/160 pmol guide) was performed into HSCs (200,000) using the Lonza 4D electroporator. Cells were harvested and genomic DNA prepared three days post-transfection. PCR primers appropriate for use in NGS-based DNA sequencing used to amplify the individual target sequences for MG29-1 TRAC 35 gRNA (SEQ ID NO: 5681). The NGS amplicons were sequenced on an Illumina MiSeq machine and analyzed with a proprietary Python script to measure gene editing (FIG. 82).

### Example 58—Gene Editing Outcomes at the DNA Level for TRAC in Induced Pluripotent Stem Cells (iPSCs)

[0543] ATCC-BXS0116 Human [Non-Hispanic Caucasian Female] Induced Pluripotent Stem (IPS) Cells are cultured on Corning Matrigel-coated plasticware in mTESR Plus (STEMCELL Technologies) containing 10 μM ROCK inhibitor Y-27632 for 24 hr prior to nucleofection. Nucleofection of MG29-1 RNP (126 pmol protein/160 pmol guide) was performed into iPSCs (200,000) using the Lonza 4D electroporator. Cells were harvested with Accutase for genomic DNA extraction five days post-transfection. PCR primers appropriate for use in NGS-based DNA sequencing were used to amplify the individual target sequences for the TRAC 35 gRNA (SEQ ID NO: 5681). The amplicons were sequenced on an Illumina MiSeq machine and analyzed with a proprietary Python script to measure gene editing (FIG. 83).

### Example 59—In Vivo Genome Editing with the MG29-1 Nuclease Quantified by Next Generation Sequencing (NGS)

[0544] To evaluate the ability of the MG29-1 Type V nuclease to edit the genome in vivo in a living animal, an mRNA encoding the MG29-1 nuclease and one of four guide RNAs were delivered in a lipid nanoparticle. The four guide RNAs tested were mA1b298-37, mA1b2912-37, mA1b2918-37, and mA1b298-34, the sequences of which are shown below in Table 29. Guides mA1b298-37 and mA1b298-34 have the same nucleotide sequence but different chemical modifications, while guides mA1b298-37, mA1b2912-37, and mA1b2918-37 have different spacer sequences but the same chemical modifications.

Sequences and chemical modifications of
guide RNA tested in vivo in mice

| | SEQ | |
|---|---|---|
| | ID | |
| Guide name | NO. | Sequence |
| mAlb298-37 | 5756 | mC*mU*mU*U*UAAUUmUmC |
| | | mUmACU*G*U*U*GUAGAUC |
| | | UGUAACfGfAfUfCfGfGfG |
| | | fAfAfC*fU*fGfG*fC*mA |
| mAlb2912-37 | 5757 | mC*mU*mU*U*UAAUUmUmC |
| | | mUmACU*G*U*U*GUAGAUA |
| | | GUGUAGfCfAfGfAfGfAfG |
| | | fGfAfA*fC*fCfA*fU*mU |
| mAlb2918-37 | 5758 | mC*mU*mU*U*UAAUUmUmC |
| | | mUmACU*G*U*U*GUAGAUA |
| | | AGAUUGfAfUfGfAfAfGfA |
| | | fCfAfA*fC*fUfA*fA*mC |
| mAlb298-34 | 5759 | mC*rU*rUrArArUrUmUmC |
| | | mUmArCrUrGrUrUrGmUmA |
| | | mGmArUrCrUrGrUrArArC |
| | | rGrArUrCrGrGrGrA*rAf |
| | | C*fUfG*fGfC*mA |

M: 2′-O methyl modified base; f: 2′-fluorine modified base; *: phosphorothioate backbone

[0545] In an in vitro stability assay in Hepa1-6 cell lysates, the mA1b298-37 guide was more stable than the mA1b298-34 guide, demonstrating that the chemical modifications on the mA1b298-37 guide were more effective at protecting the guide RNA against degradation.

[0546] The mRNA encoding MG29-1 (SEQ ID NO: 5687) was generated by in vitro transcription of a linearized plasmid template using T7 RNA polymerase using nucleotides and enzymes purchased from New England Biolabs or Trilink Biotechnologies. The protein coding sequence of the MG29-1 cassette comprises the following elements from 5′ to 3′: the nuclear localization signal from SV40, a five amino acid linker (GGGS), the protein coding sequence of the MG29-1 nuclease from which the initiating methionine codon was removed, a 3 amino acid linker (SGG), and the nuclear localization signal from nucleoplasmin. The DNA sequence of this cassette was codon optimized for human using a commercially available algorithm. An approximately 100 nucleotide polyA tail was encoded in the plasmid used for in vitro transcription and the mRNA was co-transcriptionally capped using the CleanCAP (™) reagent purchased from Trilink Biotechnologies. Uridine in the mRNA was replaced with N1-methyl pseudouridine.

[0547] To generate the lipid nanoparticle (LNP) formulation used to deliver the MG29-1 mRNA and the guide RNA, the four lipid components were dissolved in ethanol and mixed in an appropriate molar ratio to make the lipid working mix. The mRNA and the guide RNA were either mixed prior to formulation at a 1:1 mass ratio or formulated in separate LNP that were later co-injected into mice at a 1:1 mass ratio of the two RNA's. In either case, the RNA was diluted in 100 mM Sodium Acetate (pH 4.0) to make the RNA working stock. The lipid working stock and the RNA working stock were mixed in a microfluidics device (Ignite NanoAssembler, Precision Nanosystems) at a flow rate ratio of 1:3, respectively, and a flow rate of 12 mL/min. The LNP were dialyzed against phosphate buffered saline (PBS) for 2 to 16 hours and then concentrated using Amicon spin concentrators (Milipore) until the pre-determined volume was achieved. The concentration of RNA in the LNP formulation was measured using the Ribogreen reagent (Thermo Fisher). The diameter and polydispersity (PDI) of the LNP were determined by dynamic light scattering. Example LNP had diameters ranging from 65 nm to 120 nm with PDI of 0.05 to 0.20. LNP were injected intravenously into 8 to 12 week old C57B16 wild type mice via the tail vein (0.1 mL per mouse) at a total RNA dose of 1 mg RNA per kg body weight. Three days post dosing, the mice were sacrificed and the liver was collected and homogenized using a bead beater (Omni International) in a digestion buffer supplied in the PureLink Genomic DNA Isolation Kit (Thermo Fisher Scientific). Genomic DNA was purified from the resulting homogenate using the PureLink Genomic DNA Isolation Kit (Thermo Fisher Scientific) and quantified by measuring the absorbance at 260 nm. Genomic DNA purified from mice injected with buffer alone was used as a control.

[0548] The liver genomic DNA was then PCR amplified using a first set of primers flanking the region targeted by the guides. The PCR primers used are shown below in Table 30. The 5′ end of these primers comprise conserved regions complementary to the PCR primers used in the second PCR, followed by 5 Ns in order to give sequence diversity and improve MiSeq sequencing quality, and end with sequences complementary to the target region in the mouse genome. PCR was performed using Q5@ Hot Start High-Fidelity 2× Master Mix (New England Biolabs) on 100 ng of genomic DNA and an annealing temperature of 60° C. for a total of 30 cycl^{es}. This was followed by a 2nd round of 10 cycles of PCR using primers designed to add unique dual Illumina barcodes (IDT) for next generation sequencing on a MiSeq instrument. Each sample was sequenced to a depth of greater than 10,000 reads using 150 bp paired end reads. Reads were merged to generate a single 250 bp sequence from which Indel percentage and INDEL profile was calculated using a proprietary Python Script.

TABLE 30
Sequences of PCR primers and Next Generation Sequencing primers used to
analyze in vivo genome editing in mice

| | | SEQ | |
|---|---|---|---|
| Primer name | Purpose | ID NO. | Sequence |
| mAlb298_NGS_F | Amplify the target | 5782 | GCTCTTCCGATCTNNNNNCTTG |
| | site in albumin | | AGTTTGAATGCACAGATA |
| | intron 1 | | |
| mAlb298_NGS_R | Amplify the target | 5783 | GCTCTTCCGATCTNNNNNTGG |
| | site in albumin | | AAACAGGGAGAGAAAAACC |
| | intron 1 | | |
| mAlb2912_NGS_F | Amplify the target | 5784 | GCTCTTCCGATCTNNNNNTACA |
| | site in albumin | | AACATGACAGAAACACTAA |
| | intron 1 | | |
| mAlb2912_NGS_R | Amplify the target | 5785 | GCTCTTCCGATCTNNNNNGATT |
| | site in albumin | | GATGAAGACAACTAACTGT |
| | intron 1 | | |
| mAlb2918_NGS_F | Amplify the target | 5786 | GCTCTTCCGATCTNNNNNCTTT |
| | site in albumin | | GAGTGTAGCAGAGAGG |
| | intron 1 | | |
| mAlb2918_NGS_R | Amplify the target | 5787 | GCTCTTCCGATCTNNNNNCATT |
| intron 1 | site in albumin | | ATACCGATGGGCGATC |

[0549] The results of the NGS analysis are shown in FIG. 84 and Table 31. Group A mice received LNP encapsulating guide RNA mASb298-37. Group B mice received LNP encapsulating guide RNA mA1b2912-37. Group C mice received LNP encapsulating guide RNA mA1b2918-37. Group D mice received LNP encapsulating guide RNA mA1b298-34. All mice in groups A to D also received LNP encapsulating the MG29-1 mRNA that was mixed with the guide RNA containing LNP at a 1:1 RNA mass ratio prior to injection. Two mice were injected with PBS as controls (Group E).

TABLE 31
Gene editing at the on target site in the liver of mice at 3 days after IV
injection of nuclease mRNA and guide RNA packaged in LNP

| | | | | Standard |
|---|---|---|---|---|
| | | Editing | | deviation |
| | | Efficiency (%) | Mean per | per |
| Group | Animal | by NGS | group | group |
| A | 1281 | 50.65 | 53.9 | 2.8 |
| | 1282 | 53.80 | | |
| | 1283 | 53.50 | | |
| | 1284 | 58.43 | | |
| | 1285 | 53.14 | | |
| B | 1286 | 53.19 | 52.3 | 4.5 |
| | 1287 | 44.49 | | |
| | 1288 | 53.73 | | |
| | 1289 | 55.90 | | |
| | 1290 | 54.27 | | |
| C | 1291 | 22.46 | 26.5 | 4.9 |
| | 1292 | 31.98 | | |
| | 1293 | 31.59 | | |
| | 1294 | 21.74 | | |
| | 1295 | 24.88 | | |
| D | 1296 | 12.94 | 12.7 | 1.1 |
| | 1297 | 14.35 | | |
| | 1298 | 11.98 | | |
| | 1299 | 12.78 | | |
| | 1300 | 11.52 | | |
| E | 1209 | 5.6 | | |
| | 1209 | 0.45 | | |

[0550] The average INDEL frequency in group A that received guide mA1b298-37 was 53.9%. The average INDEL frequency in group B that received guide mA1b2912-37 was 52.3%. The average INDEL frequency in group C that received guide mA1b2918-37 was 26.5%. The average INDEL frequency in group D that received guide mA1b298-34 was 12.7%. These data demonstrate that the MG29-1 nuclease together with a guide RNA comprised of chemical modified bases (chemistry #37 or chemistry #34) was active in vivo in the liver of mice. Guide mA1b298-34, which resulted in about 50% of the editing as guide mA1b298-37, has the same nucleotide sequence as mA1b298-37 but different chemical modifications, demonstrating that chemical modifications #37 enable significantly more editing activity in vivo than chemical modifications #34. The improved in vivo editing observed with chemistry #37 compared to chemistry #34 is consistent with the superior in vitro stability of chemistry #37.

[0551] An example INDEL profile generated by the MG29-1 nuclease and guide 298-37 as measured by NGS is shown in FIG. 85. The INDEL profiles from the other 4 mice treated with the same LNP were essentially identical. The majority of the INDELS were deletions, with very few insertions detectable. This INDEL profile is distinct from that seen with spCas9, which commonly generates a mixture of insertions and deletions with a tendency to generate +1 and −1 INDELS. The deletions resulting from in vivo cleavage by MG29-1 range from −1 to −30, with the majority of deletions between −1 and −10 nucleotides.

### Example 59—Spacer Length Optimization for MG29-1 Single Guide RNA

[0552] The guides tested comprised 5 different spacers targeting different regions of human albumin intron 1 (spacers 74, 83, 84, 78, and 87) with chemical modifications called “A1tR1/A1tR2” provided by Integrated DNA Technologies. The spacer length was titrated from 22 nucleotides (nt) to 17 nt by removal of nucleotides from the 3′ end of the guide RNA. Each of these guides (6 per spacer sequence) were evaluated for their editing efficiency in the human liver cell line Hep3B. Hep3B cells (1×10⁵ cells/sample) were electroporated using an Amaxa nucleofection device and program EH-100 with pre-formed ribonucleoprotein complex made by mixing 120 pmol MG29-1 protein and 160 pmol guide RNA. After electroporation, the cells were plated in 24 well plates and cultured for 3 days after which genomic DNA was purified from the cells using a commercial kit (Purelink, Invitrogen). The genomic DNA was analyzed for editing at the on target site (human albumin intron 1) by next generation sequencing (NGS). The NGS data was analyzed by a custom Python script (IndelCalculator v1.3.1). As shown in FIG. 86, editing activity was unchanged for all 5 guides when the spacer length was titrated from 22 nucleotides to 20 nucleotides. Shortening the spacer to 19 nucleotides reduced the editing activity of all 5 guides, with more pronounced 75% reductions in activity for 3 of the 5 guides. Reduction of the spacer length to 18 or 17 nucleotides further reduced the editing activity such that a 17 nucleotide spacer was inactive for all 5 guides. Similar data were obtained for 4 different guide RNA targeting a different genomic locus, the human HAO-1 gene (FIG. 86). In the case of the HAO-1 guides, editing activity dropped by 75 to 95% when the guide length was reduced from 20 nt to 22 nt. These data demonstrate that across a range of different guide spacer sequences targeting different genomic loci, the minimal MG29-1 spacer length that retained maximal editing activity was 20 nt. Because longer spacer sequences may increase the risk of off-target editing, identification of the shortest spacers that retain full activity is beneficial.

[0553] A guide RNA (“guide 29”) was identified as a highly active guide in a screen for guides with 22 nt spacers for MG29-1 that target the human HAO-1 locus. The spacer length of this guide was reduced to 20 nt by removing the 3′ most 2 nt from the spacer to create guides designated as mH29-29.1_37 (SEQ ID NO: 5710) and mH29-29.2_37 (SEQ ID NO: 5711) which differ in their chemical modifications.

[0554] These guides contain the same chemical modifications as chemistry #37 which was based on a 22 nt spacer, except that the modifications on the 5′ end where the spacer was shortened had to be adjusted. In mH29-29.1_37, the number of fluoro bases was reduced by 2, but the 4 PS bonds and 1 2′-O-methyl base at the 5′ remained the same as in the original #37 chemistry. In mH29-29.2_37, the number of fluoro bases was reduced by 2 and the 2′-O-methyl on the last base was retained, but the number of PS bonds at the 5′ end was increased from 4 to 5. The relative potency of these guides will be tested in cells in culture and in mice.

### Example 60—Design of a Guide RNA for MG29-1 with an 24 Nucleotide Stem-Loop Structure at the 5′ End to Improve Stability (Chemistry #50)

[0555] An in vitro stability assay for MG29-1 and MG3-6/3-4 guides demonstrated that MG29-1 guides can be less stable (FIG. 87). In this assay, the guide RNA was incubated in a crude extract from mammalian cells (Hepa1-6) that contains nucleases that can degrade RNA. An MG29-1 guide with chemical modifications on the 5′ and 3′ ends (Alt-R) was degraded in about 200 mins while about 50% of a MG3-6/3-4 guide with chemical modifications of the 5′ and 3′ ends (Mod 1) remained intact after 500 mins (FIG. 87).

[0556] The structures of the MG29-1 and MG3-6/3-4 guide RNAs (FIG. 88) were predicted using the Geneious Prime Software (Turner 2004 algorithm: https://rna.urmc.rochester_edu/NNDB/index.html) and were noted to be significantly different. The MG29-1 guide is about one third of the length of the guide RNA for MG3-6/3-4. In addition, the MG29-1 guide contains minimal secondary structure comprising one stem of 5 nucleotides in length. In contrast, the guide RNA for MG3-6/3-4 contains 3 stem-loops with stem lengths of 10, 6, and 10 nucleotides (FIG. 88). The highly active MG3-6/3-4 guide containing a spacer targeting mouse albumin that was used to generate the data in FIG. 86 was also predicted to contain a stem of 10 nucleotides (Stem-loop 1 in FIG. 89) identical to the 10 nt stem-loop predicted for the backbone alone.

[0557] It was hypothesized that the minimal secondary structure of the MG29-1 guide made it less stable in a cellular milieu that is mimicked by the in vitro stability assay. Given the significantly greater in vitro stability of the MG3-6/3-4 guide RNA, a modified MG29-1 sgRNA backbone was designed in which the largest stem loop of MG3-6/3-4 (Stem-loop 1) was added at the 5′ end of the MG29-1 guide. The predicted structure of this modified MG29-1 guide is shown in FIG. 89. The chemical modifications designated chemistry #37 that had been previously demonstrated to significantly improve the stability and activity of the standard MG29-1 guide RNA were incorporated in the design of chemistry #50; specifically, the same phosphorothioate, 2′-O-methyl, and 2′-fluoro modifications present in the backbone and spacer of chemistry #37 were included in chemistry #50. To further stabilize this new design, the 3 nucleotides at the 5′ end were modified with phosphorothioate linkages and 2′-O-methyl bases. In addition, phosphorothioate linkages and 2′-O-methyl bases were included in the loop of the added stem loop (stem loop 1 in FIG. 90).

[0558] Additional variants of chemistry #50 were designed as shown in Table 32 below. The designs for chemistries #44, #50, #51, #52, #53, and #54 for any spacer sequence are shown in SEQ ID NOs: 5695-5701, in which N is any ribonucleotide base in the spacer.

TABLE 32
Summary of chemistry #50 and additional variants

| | | Spacer | Extra | Chemistry | |
|---|---|---|---|---|---|
| | SEQ | length | stem | on | |
| Guide name | ID | (nt) | loop | spacer/stem 2 | Additional changes |
| mAlb29-8-50 | 5689 | 22 | Yes | #37 | |
| mAlb29-8-50b | 5690 | 20 | Yes | #37 | |
| mAlb29-8-51b | 5691 | 20 | Yes | No 2′-fluoro in | |
| | | | | spacer | |
| mAlb29-8-52b | 5692 | 20 | Yes | Reduced 2′- | |
| | | | | fluoro in spacer | |
| mAlb29-8-53b | 5693 | 20 | Yes | #37 | PS and methyl on every |
| | | | | | base in stem loop 1 |
| mAlb29-8-54b | 5694 | 20 | Yes | No 2′-fluoro in | PS and methyl on every |
| | | | | spacer | base in stem loop 1 |

### Example 61—In Vitro Editing with MG29-1 Guide Chemistry #50 Containing a 24 Nucleotide Stem-Loop Structure at the 5′ End

[0559] The mouse liver cell line Hepa1-6 (1×10⁵ cells/sample) was electroporated using an Amaxa nucleofection device and program: EH-100 with either pre-formed ribonucleoprotein complex (120 pmol MG29-1 protein mixed with 160 pmol guide RNA) or with a mixture of 500 ng MG29-1 miRNA and 210 pmol guide RNA. The guides tested were mA1b29-8-44 (spacer 8, chemistry 44) and mA1b29-8-50 (spacer 8, chemistry 50). Chemistry 44 comprises the MG29-1 backbone plus the 22 nt spacer and a specific set of chemical modifications of either the bases or the backbone that had been optimized for activity and stability. The sequence of mALb29-8-44 with chemical modifications is shown in SEQ ID NO: 5688. The sequence of mA1b29-8-50 is shown in SEQ ID NO: 5689. Both of these guides contain 22 nucleotide spacers. After electroporation, the cells were plated in 24 well plates and cultured for 3 days after which genomic DNA was purified from the cells using a commercial kit (Purelink, Invitrogen). The genomic DNA was analyzed for editing at the on target site (albumin intron 1) by next generation sequencing (NGS). The NGS data was analyzed by a custom Python script (IndelCalculator v11.3.1). As shown in FIG. 91, when the MG29-1 nuclease was delivered by mRNA transfection, chemistry 50 improved editing efficiency from 46% to 94%. When the MG29-1 nuclease was delivered as a protein that was pre-complexed to the guide, both chemistries exhibited editing of 94%. When the nuclease is delivered as a mRNA, the guide is ideally stable enough to survive inside the cell until the mRNA is translated into protein, after which the nuclease can complex with the guide and transit to the nucleus. Thus guide stability is likely more critical when the nuclease is delivered as mRNA. In contrast, the guide may be stabilized when complexed with the nuclease as a RNP prior to electroporation into the cells, in line with the observation that both chemistry 44 and 50 resulted in 94% editing by RNP electroporation (FIG. 91). These data suggest that chemistry 50 on the MG29-1 guide RNA containing an additional stem loop mediates improved editing in cells in culture.

### Example 62—In Vivo Gene Editing in the Liver of Mice with MG29-1 Guide Chemistry 50

[0560] To evaluate the impact of different guide chemistries on gene editing in the liver of mice, we delivered the MG29-1 mRNA and the guide RNA using a lipid nanoparticle (LNP). Messenger RNA encoding the MG29-1 nuclease was generated by in vitro transcription of a linearized plasmid template using T7 RNA polymerase and a mixture of ribonucleotides rATP, rCTP, and rGTP and N1-methyl pseudouridine in place of rUTP and CleanCAP (Trilink). The plasmid also encoded an approximately 100 nt polyA tail at the 3′ end of the coding sequence. The mRNA was purified on commercial spin columns, the concentration was determined by absorbance at 260 nM, and the purity was determined by Tape Station (Agilent). Three different guide RNAs that comprise the same spacer sequence but with different chemistries/backbones were evaluated in a single mouse study: mA1b29-8-44 (SEQ ID NO: 5688), mA1b29-8-50 (SEQ ID NO: 5689), and mA1b29-8-37 (SEQ ID NO: 5702). Guide mA1b29-12-44 (SEQ ID NO: 5703), which contains a different spacer (spacer 12) with chemistry 44, was also tested. The MG29-1 mRNA and the guide RNA were separately packaged inside lipid nanoparticles (LNP) using a process essentially as described by Kaufmann et al (PMID: 26469188, DOI:10.1021/acs.nanolett.5b02497, which is incorporated by reference herein in its entirety). Lipids were purchased from Avanti Polar Lipids or from Corden Pharma and dissolved in ethanol. The mRNA or sgRNA was prepared in water then diluted in 100 mM sodium acetate (pH 4.0) to make the RNA working stock. The four lipid components were combined in ethanol at specified ratios to make the lipid working stock. An example lipid mixture comprised cholesterol, DOPE, C12-200, and DMG-PEG-2000 at molar ratios of 47.5:16:35:1.5. The lipid working stock and the RNA working stock were combined in a microfluidics mixing device (Precision Nanosystems) at a flow rate of 12 mL/min and a ratio of 1 volume of lipid working stock to 3 volumes of RNA working stock. The mass ratio of C12-200 to RNA in the formulation was 10 to 1. The formulated LNP were diluted 1:1 with 1× PBS then dialyzed twice in 1× PBS for 1 hour each followed by concentration in Amicon spin concentrators. The resultant LNPs were formulated into 1× PBS buffer, filter sterilized through a 0.2 uM filter, and stored at 4° C. The concentration of the RNA inside and outside of the LNP was measured using the Ribogreen reagent (Thermo Fisher). The average diameter and polydispersity of the LNPs were measured in the resultant concentrated LNPs by dynamic light scattering using a NanoBrook 90Plus (Brookhaven Instruments). Representative LNPs ranged in size from 80 to 100 nanometers with a PDI<0.15 and an RNA encapsulation ratio of greater than 90%. LNP encapsulating a guide RNA and the MG29-1 mRNA were mixed at an RNA mass ratio of 1:1 then injected intravenously into wild type C57Bl/6 mice via the tail vein at a dose of 0.5 mg of RNA per kg in a total volume of 0.1 ml per mouse (N=5 mice per LNP). Mice were sacrificed at 4 days post dosing and the 3 lobes of the liver (left lateral, right lateral, medial) were collected, flash frozen, and stored at −80° C. The entire left lateral lobe of the liver was homogenized in Genomic Digestion Buffer (Purelink Genomic DNA Purification Kit, Thermo Fisher) using 0.4 mL of buffer per 100 mg of tissue weight in a Bead Mill. Genomic DNA was purified from an aliquot of the homogenate using the Purelink Genomic DNA Purification Kit (Thermo Fisher). The albumin intron 1 region was PCR amplified from 50 ng of the genomic DNA in a reaction containing 0.5 micro molar each of the primers mA1b90F (CTCCTCTTCGTCTCCGGC) and mA1b1073R (CTGCCACATTGCTCAGCAC) and 1× Pfusion Flash PCR Master Mix. The resulting 984 bp PCR product which spans the entire intron 1 of mouse albumin was purified using a column based purification kit (DNA Clean and Concentrator, Zymo Research) and sequenced using primers located within 150 to 350 bp of the predicted target site for each guide RNA. The PCR product generated using primers mA1b90F and mA1b1073R from a PBS buffer injected mouse was sequenced in parallel as a control. The Sanger sequencing chromatograms were analyzed using Inference of CRISPR Edits (ICE) that determines the frequency of INDELS as well as the INDEL profile (Hsiau et. al, Inference of CRISPR Edits from Sanger Trace Data. BioArxiv. 2018 https://www.biorxiv.org/content/early/2018/01/20/251082).

[0561] Without wishing to be bound by theory, it is understood that when a nuclease creates a double strand break (DSB) in DNA inside a living cell, the DSB is repaired by the cellular DNA repair machinery. In actively dividing cells, such as transformed mammalian cells in culture, and in the absence of a repair template, it is understood that this repair occurs by the NHEJ pathway. Without wishing to be bound by theory, it is understood that the NHEJ pathway is an error prone process that introduces insertions or deletions of bases at the site of the double strand break (Lieber, M. R, Annu Rey Biochem. 2010; 79: 181-211). These insertions and deletions are understood to be a hallmark of a double strand break that occurred and was subsequently repaired, and are thus widely used as a readout of the editing or cutting efficiency of the nuclease.

[0562] The editing efficiency in the liver of the mice is shown in FIG. 92. Comparing guides with the same spacer sequence (guide 8) but different chemistries or backbones, the guide with chemistry #44 (SEQ ID NO: 5688) was the least active (mean 1.6% editing) while the guide with chemistry #37 (SEQ ID NO: 5702) was more active (mean 4% editing). Chemistry #44 differs from chemistry #37 by the addition of 2 additional PS bonds in the spacer region (chemistry #44 has 6 PS bonds in the spacer region while chemistry #37 has 4 PS bonds in the spacer region). The guide with chemistry #50 (SEQ ID NO: 5689) was significantly more active with mean editing of 22%, approximately 5-fold higher than the guide with chemistry #37 and 10-fold higher than the guide with chemistry #44. When the same genomic DNA was analyzed for editing by next generation sequencing (NGS), the levels of editing with guide spacer 8 were determined to be 7%, 7%, and 42% for chemistries 44, 37, and 50, respectively. For guide spacer 12 with chemistry 44, the level of editing was 4% and 9% when measured by ICE and NGS, respectively confirming that chemistry 44 has similar activity to chemistry 37. These data demonstrate that chemistry #50, which contains a stem-loop from the MG3-6/3-4 guide added to the 5′ end of the normal MG29-1 guide backbone, exhibits significantly improved editing in the liver of mice after systemic delivery in an LNP. Thus, guide chemistry 50 provides improved in vivo potency of the MG29-1 nuclease.

### Example 63—Further Improvements to MG29-1 Guide Chemistry 50

[0563] Further improvements to the MG29-1 guide chemistry #50 are contemplated. In one potentially improved version, all of the nucleotides in the stem-loop 1 that was added to the 5′ end of the standard MG29-1 guide backbone are chemically modified with both 2′-O-methyl on the bases and phosphorothioate linkages as in chemistries 53 (SEQ ID NO: 5700) and 54 (SEQ ID NO: 5701). In one potentially improved version, all of the 2′-flouro bases in the spacer are changed to standard nucleotides as in chemistries 51 (SEQ ID NO: 5698) and 54 (SEQ ID NO: 5701). In another potentially improved version, the number of 2′-flouro bases in the spacer are reduced by 2-fold as in chemistry 52 (SEQ ID NO: 5699). The reduction in the number of 2′-fluoro bases may have impacts on guide specificity.

### Example 64—Design of a MG29-1 Single Guide RNA Comprising the Native Guide Array

[0564] An alternative approach to improving the stability, and thus the potency, of the MG29-1 single guide RNA is to design a native like CRISPR array for MG29-1, mimicking the documented process in which MG29-1 nuclease cleaves its own CRISPR array to generate a mature guide. The array was designated as mA1b29-g8-37-array (SEQ ID NO: 5712) and it comprises two copies of a 22 nt spacer targeting mouse albumin (spacer 8) embedded in the native CRISPR array for MG29-1.

[0565] The designed array is 126 nt long and it comprises a repeat, followed by a spacer, followed by a repeat, followed by a spacer. The predicted secondary structure of mA1b29-g8-37-array is shown in FIG. 93 in which the 5′ end is circled in blue and the 3′ end is circled in red. This RNA is designed to be cleaved inside mammalian cells by an expressed MG29-1 nuclease to generate two functional sgRNAs. Chemical modifications were included in mA1b29-g8-37-array to promote stability. The modifications in the spacer and the MG29-1 backbone portions are based on those used in chemistry #37 but with additional modifications and some changes.

### Example 65—Guides for MG29-1 Nuclease with 20 nt Spacers Targeting Human Albumin Intron 1 with Chemistry #37

[0566] A guide screen against human albumin intron 1 using the MG29-1 nuclease and single guide RNA with 22 nt spacers identified 5 guides with high editing activity in human Hep3B cells. These guides were designated as spacer numbers 87, 78, 74, 83, and 84. Versions of these single guide RNA's with 20 nt spacers were designed incorporating the chemistry #37 chemical modifications and these were designated as hA29-87-37B (SEQ ID NO: 5713), hA29-78-37B (SEQ ID NO: 5714), hA29-74-37B (SEQ ID NO: 5715), hA29-83-37B (SEQ ID NO: 5716), and hA29-84-37B (SEQ ID NO: 5717).

### Example 66—Guides for MG29-1 Nuclease with 20 nt Spacers Targeting Human HAO1 with Chemistry #37

[0567] A guide screen against human HAO-1 (encoding glycolate oxidase) using the MG29-1 nuclease and single guide RNA with 22 nt spacers identified 4 guides with high editing activity in human Hep3B cells. These guides were designated as spacer numbers 4, 21, 23, and 41. Versions of these single guide RNA's with 20 nt spacers were designed incorporating the chemistry #37 chemical modifications and these were designated as hH29-4_37b (SEQ ID NO: 5718), hH29-21_37b (SEQ ID NO: 5719), hH29-23_37b (SEQ ID NO: 5720), and hH29-41_37b (SEQ ID NO: 5721).

### Example 67—Guides for MG29-1 Nuclease with 22 nt Spacers Targeting Human HAO1 with Chemistry #50

[0568] A guide screen against human HAO-1 (encoding glycolate oxidase) using the MG29-1 nuclease and single guide RNA with 22 nt spacers identified 4 guides with high editing activity in human Hep3B cells. These guides were designated as spacer numbers 4, 21, 23, and 41. Versions of these single guide RNA's with 22 nt spacers were designed incorporating the chemistry #50 chemical modifications and these were designated as hH29-4_50 (SEQ ID NO: 5722), hH29-21_50 (SEQ ID NO: 5723), hH29-23_50 (SEQ ID NO: 5724), and hH29-41_50 (SEQ ID NO: 5725).

### Example 68—Guides for MG29-1 with 20 nt Spacers Targeting Human HAO1 with Chemistry #50

[0569] A guide screen against human HAO-1 (encoding glycolate oxidase) using the MG29-1 nuclease and single guide RNA with 22 nt spacers identified 4 guides with high editing activity in human Hep3B cells. These guides were designated as spacer numbers 4, 21, 23, and 41. Versions of these single guide RNA's with 20 nt spacers were designed incorporating the chemistry #50 chemical modifications and these were designated as hH29-4_50b (SEQ ID NO: 5726), hH29-21_50b (SEQ ID NO: 5727), hH29-23_50b (SEQ ID NO: 5728), and hH29-41_50b (SEQ ID NO: 5729).

### Example 69—Guides for MG29-1 with 22 nt Spacers Targeting Mouse HAO1 with Chemistry #50

[0570] A guide screen against mouse HAO-1 (encoding glycolate oxidase) using the MG29-1 nuclease and single guide RNA with 22 nt spacers identified 3 guides with high editing activity in mouse Hepa1-6 cells. These guides were designated as spacer numbers 1, 15, and 29. Versions of these single guide RNA's with 22 nt spacers were designed incorporating the chemistry #50 chemical modifications and these were designated as mH29-1-50 (SEQ ID NO: 5730), mH29-15-50 (SEQ ID NO: 5731), and mH29-29-50 (SEQ ID NO: 5704).

### Example 70—Guides for MG29-1 with 20 nt Spacers Targeting Mouse HAO1 with Chemistry #50

[0571] A guide screen against mouse HAO-1 (encoding glycolate oxidase) using the MG29-1 nuclease and single guide RNA with 22 nt spacers identified 4 guides with high editing activity in mouse Hepa1-6 cells. These guides were designated as spacer numbers 1, 15, and 29. Versions of these single guide RNA's with 20 nt spacers were designed incorporating the chemistry #50 chemical modifications and these were designated as mH29-1-50b (SEQ ID NO: 5732), mH29-15-50b (SEQ ID NO: 5733), and mH29-29-50b (SEQ ID NO: 5705).

### Example 71—Comparison of the In Vivo Editing Efficiency of MG29-1 to spCas9

[0572] To compare the in vivo editing efficiency of the MG29-1 nuclease to that of spCas9, a dose response was performed in wild type C57B16 mice. Albumin intron 1 was selected as a genomic target locus for both spCas9 and MG29-1. An in silico search for spCas9 guide target sites in mouse intron 1 using the Chop-Chop algorithm (see e.g. Labun et al doi: 10.1093/nar/gkz365, which is incorporated by reference in its entirety herein) identified a total of 39 potential guides, which were ranked according to their efficiency score and off-target prediction. In addition, guide target sites located within 50 bp of exon 1 or exon 2 were excluded. The top 3 guides from this ranking were designated mA1bR1 (SEQ ID NO: 5734), mA1bR2 (SEQ ID NO: 5735), and mA1bR3 (SEQ ID NO: 5736), and were chemically synthesized with chemical modifications at both the 5′ and 3′ ends comprising methylated bases (represented by the nomenclature mA, mC, mG, and mU) and phosphorothioate backbone linkages (represented by the nomenclature A*, C*, G*, and U*). The editing efficiencies of these 3 guides were evaluated in the mouse liver cell line Hepa1-6 by nucleofection of ribonucleoprotein complexes formed by mixing the guide RNA and commercially sourced spCas9 protein (purchased from Integrated DNA technologies) at a molar ratio of 1:2.5 (protein to guide RNA). 20 moles of spCas9 protein was mixed with 50 moles of guide RNA and subsequently nucleofected into 2×10⁵ Hepa1-6 cells using an Amaxa electroporation device with program setting EH100. The nucleofected cells were each transferred to a well of a 48 well plate in fresh growth media and cultured for 48 h in a 5% CO₂/37° C. humidified incubator. Genomic DNA was purified from the cells using the Purelink kit (Invitrogen, ThermoFisher) and analyzed for editing at the target site in albumin intron 1 by PCR amplification of the target locus using primers mA1b90F and mA1b1073R (SEQ ID NOs: 5737 and 5738) and a high fidelity PCR enzyme mix. The PCR product was subjected to Sanger sequencing using primers mA1b282F or mA1b460F. The Sanger sequencing chromatograms were analyzed for insertions and deletions (“indels”) at the predicted target site for each guide by Tracking of Indels by DEcomposition (TIDE) as described by Brinkman et al (Nucleic Acids Res. 2014 Dec. 16; 42 (22), doi: 10.1093/nar/gku936, which is incorporated by reference in its entirety herein). The presence of indels at the target site is the consequence of the generation of double strand breaks in the DNA, which are then repaired by the error prone cellular repair machinery which introduces insertions and deletions. The results of the TIDE analysis are shown in Table 33. All three guides generated indel frequencies of greater than 90%, demonstrating that all three guides are highly active.

TABLE 33
INDEL frequencies in Hepa1-6 cells nucleofected with guide RNA for
spCas9 targeting mouse albumin intron 1 and spCas9 protein as a RNP

| Sample | | | |
|---|---|---|---|
| ID | Guide | INDEL % | R2 |
| 1 | mAlbR1 | 92 | 0.95 |
| 2 | mAlbR2 | 91 | 0.91 |
| 3 | mAlbR3 | 96 | 0.96 |

[0573] Guide mALbR2 was synthesized with extensive chemical modifications as described previously (Yin et al. doi:10.1038/nbt.4005, and WO 2019/079527 A1, each of which are incorporated by reference in their entirety herein). The chemical modifications include modifications of the 3 bases at the 5′ end and 3 bases at the 3′ end with 2′-O-methyl bases and phosphorothioate linkages between the 3 bases at the 5′ end and the 3 bases at the 3′ end. In addition, 33 of the internal bases are modified with 2′-O-methyl (SEQ ID NO: 5741). These chemical modifications of the guide RNA for spCas9 were reported to enable efficient editing in vivo in mouse liver after delivery of the mRNA for spCas9 and the guide RNA in a lipid nanoparticle (see e.g. WO 2019/079527 A1, which is incorporated by reference in its entirety herein).

[0574] A guide screen for guides that target the MG29-1 nuclease to mouse albumin intron 1 and promote cleavage and indel formation was performed. The two guides with the highest editing activity in Hepa1-6 cells when the nuclease was delivered as a mRNA were mALb29-8 and mA1b29-12. Guide mALb29-8 was selected for comparison to spCas9 guide mA1bR2 in vivo in mice. Chemical and structural modifications to the guide RNA for MG29-1 were optimized by evaluating the impact of different chemical modifications including 2′O-methyl and 2′-fluoro modified bases, phosphorothioate linkages, as well as an additional stem loop upon the stability and editing activity of the guide.

[0575] Experiments on guide chemistry optimization indicated that guide chemistry #50 was the most active guide chemistry among those tested. When delivered in vivo to mice using a LNP encapsulating MG29-1 mRNA and the same guide RNA sequence targeting mouse albumin intron 1, but with two different guide chemistries (#37 and #50), chemistry #50 was about 4-fold more potent than chemistry #37 at a dose of 0.5 mg/kg. Therefore, MG29-1 guide chemistry #50 was selected to test in vivo in comparison to spCas9 with its cognate guide mALbR2 (SEQ ID NO: 5741).

[0576] Messenger RNA encoding the MG29-1 nuclease or the spCas9 nuclease was generated by in vitro transcription of a linearized plasmid template using T7 RNA polymerase and a mixture of ribonucleotides rATP, rCTP, and rGTP, N1-methyl pseudouridine, and the CleanCAP capping reagent (Trilink Biotechnologies). The SV40-derived nuclear localization sequence (PKKKRKVGGGGS) followed by a short linker was included at the N terminus of the coding sequence of both spCas9 and MG29-1. The nuclear localization signal from nucleoplasmin preceded by a short linker (SGGKRPAATKKAGQAKKKK) was added to the C-terminus of the coding sequence for both spCas9 and MG29-1. Thus, the same nuclear localization signals were used for both MG29-1 and spCas9. The plasmids also encoded an approximately 100 nt polyA tail at the 3′ end of both spCas9 and MG29-1 coding sequences, which generates a polyA tail in the mRNA. The coding sequences for both spCas9 and MG29-1 were codon optimized using the same algorithm (see e.g. Raab et al, DOI 10.1007/s11693-010-9062-3, which is incorporated by reference in its entirety herein). The DNA sequence encoding the spCas9 mRNA is in SEQ ID NO: 5742 and the amino acid sequence encoded by the spCas9 mRNA is in SEQ ID NO: 5743. The mRNA was purified on commercial spin columns, the concentration was determined by absorbance at 260 nM, and the purity was determined by Tape Station (Agilent); the purity was found to be equivalent for both spCas9 mRNA and MG29-1 mRNA. For in vivo delivery to mice, the spCas9 mRNA/mA1bR2 guide or the MG29-1 mRNA/mA1b29-8-50 guide were packaged inside lipid nanoparticles (LNP) using a process essentially as described by Kaufmann et al. (PMID: 26469188, DOI:10.1021/acs.nanolett.5b02497, which is incorporated by reference herein). The guide RNA and the mRNA were separately packaged for both spCas9 and for MG29-1. Lipids (purchased from Avanti Polar Lipids or from Corden Pharma) were dissolved in ethanol. The mRNA or guide RNA was prepared in water, then diluted in 100 mM sodium acetate (pH 4.0) to make the RNA working stock. The four lipid components were combined in ethanol at the specified ratios to make the lipid working stock. An example lipid mixture comprised cholesterol, a neutral lipid such as 1,2-dioleoyl-sn-glycero-3-phosphoethanolamine (DOPE), a cationic lipid such as 1,1′-((2-(4-(2-((2-(bis(2-hydroxydodecyl)amino)ethyl)(2-hydroxydodecyl)amino)ethyl)piperazin-1-yl)ethyl)azanediyl)bis(dodecan-2-ol) (C12-200), and a PEG-linked lipid such as 1,2-dimyristoyl-rac-glycero-3-methoxypolyethylene glycol-2000 (DMG-PEG-2000) at molar ratios of 47.5:16:35:1.5. The lipid working stock and the RNA working stock were combined in a microfluidics mixing device (Precision Nanosystems) at a flow rate of 12 mL/min and a ratio of 1 volume of lipid working stock to 3 volumes of RNA working stock. The mass ratio of C12-200 to RNA in the formulation was 10 to 1. The formulated LNP were diluted 1:1 with 1× PBS then dialyzed twice in 1× PBS for 1 hour each, followed by concentration in Amicon spin concentrators. The resultant LNP were formulated into 1× PBS buffer, filter sterilized through a 0.2 μM filter and stored at 4° C. The concentration of the RNA inside and outside of the LNP was measured using the Ribogreen reagent (Thermo Fisher). The average diameter and polydispersity of the LNP were measured in the resultant concentrated LNP by dynamic light scattering using a NanoBrook 90Plus (Brookhaven Instruments). Representative LNP ranged in size from 80 to 100 nanometers with a PDI<0.15 and an RNA encapsulation ratio of greater than 90%. The average diameter, polydispersity, and RNA encapsulation efficiency is shown below in Table 34.

TABLE 34
Summary of LNP characteristics

| | | Average | | Percent |
|---|---|---|---|---|
| | | Diameter | | encapsulation of |
| LNP | RNA | (nm) | Polydispersity | RNA |
| LNP-A | MG29-1 mRNA | 57 | 0.082 | 94.9 |
| LNP-B | mAlb29-8-50 guide | 47 | 0.082 | 93.7 |
| | (SEQ ID NO: | | | |
| | 5744) | | | |
| LNP-C | Cas9 mRNA | 60 | 0.114 | 94.5 |
| LNP-D | mAlbR2 guide | 50 | 0.059 | 94.5 |
| | (SEQ ID NO: | | | |
| | 5741) | | | |

[0577] LNP encapsulating the guide RNA mA1b29-8-50 and the MG29-1 mRNA were mixed at an RNA mass ratio of 1:1. LNP encapsulating the guide RNA mA1bR1 and the spCas9 mRNA were mixed at an RNA mass ratio of 1:1. Both LNP mixtures were injected intravenously into wild type C57BV/6 mice via the tail vein with total RNA doses of 1 mg/kg, 0.5 mg/kg, or 0.25 mg/kg of RNA in a total volume of 0.1 mL per mouse (N=5 mice per LNP dose). Mice were sacrificed at 5 days post-dosing and the whole liver was flash frozen and stored at −80° C. The entire left lateral lobe of the liver was homogenized in Genomic Digestion Buffer (Purelink Genomic DNA Purification Kit, Thermo Fisher) using 0.4 mL of buffer per 100 mg of tissue weight in a Bead Mill. Genomic DNA was purified from an aliquot of the homogenate using the Purelink Genomic DNA Purification Kit (Thermo Fisher). The albumin intron 1 region was PCR amplified from 50 ng of the genomic DNA in a reaction containing 0.5 micromolar each of the primers mA1b90F (SEQ ID NO: 5737, CTCCTCTTCGTCTCCGGC) and mA1b1073R (SEQ ID NO: 5738, CTGCCACATTGCTCAGCAC) and 1× Pfusion Flash high fidelity PCR Master Mix. The resulting 984 bp PCR product, which spans the entire intron 1 of mouse albumin, was purified using a column-based purification kit (DNA Clean and Concentrator, Zymo Research). The PCR product was sequenced by next generation sequencing (NGS), analyzing for creation of indels in the target sequence, which were used as indicators of creation of double-strand breaks by the Cas enzymes and engagement of the NHEJ pathway. This detection method is based in the concept that when a nuclease creates a double strand break (DSB) in DNA inside a living cell, the DSB is believed to be repaired by the cellular DNA repair machinery which, in the absence of a repair template, occurs by the NHEJ pathway. As the NHEJ pathway is known to be an error prone process that introduces insertions or deletions of bases at the site of the double strand break (Lieber, M. R, Annu Rev Biochem 2010: 79: 181-211), these insertions and deletions (indels) are therefore used as a hallmark of a double strand break that occurred and was subsequently repaired, and thus as a readout of the editing or cutting efficiency of the nuclease.

[0578] The sequencing reads were analyzed with a custom Python script (IndelCalculator v1.3.1) that aligns each sequence read to the wild-type target sequence (in this case Albumin intron 1) and calculates the number of reads that contain at least one indel irrespective of the indel size within a window that spans 10 base pairs either side of the predicted on-target cut site for the nuclease. The editing efficiency (indel frequency) in each of the 5 mice in each group, as well as the mean and standard deviation for the group, are summarized in FIG. 94. No editing was detected in the control mice injected with PBS buffer. Both spCas9 mRNA/mA1bR2 LNP and the MG29-1 mRNA/mA1b29-8-50 LNP resulted in dose-dependent editing. At all 3 doses, the editing efficiency was higher for the MG29-1 mRNA/mA1b29-8-50 LNP than for the spCas9 mRNA/mA1bR2 LNP. The mean editing efficiencies at the 3 doses are summarized in Table 35. At a dose of 1 mg/kg (0.5 mg/kg mRNA and 0.5 mg/kg guide RNA), MG29-1 was slightly more potent than spCas9, resulting in about 15% more indels. At a dose of 0.5 mg/kg (0.25 mg/kg mRNA and 0.25 mg/kg guide RNA), MG29-1 resulted in about 50% more indels. At a dose of 0.25 mg/kg (0.125 mg/kg mRNA and 0.125 mg/kg guide RNA), MG29-1 resulted in 100% more indels. These data demonstrate that using the same LNP for delivery and mRNA produced using an identical process, the MG29-1 nuclease combined with an appropriately optimized guide RNA is more potent than the spCas9 nuclease and an appropriately modified guide RNA. The superior in vivo editing efficiency of MG29-1 was especially evident at the lowest dose tested, where MG29-1 was 2-fold more potent than spCas9 at the same dose. These results suggest that the MG29-1 nuclease and an appropriately modified guide RNA exemplified by chemistry #50 may have an advantage for in vivo gene editing using LNP delivery.

TABLE 35
Mean editing efficiency in the whole liver of mice at 5 days after intravenous
injection of LNP encapsulating either MG29-1 mRNA and guide mAlb29-8-50 (mA29-8-50)
or spCas9 mRNA and guide mAlbR2 at three doses, or PBS buffer (Control).

| | | | Mean editing | Standard |
|---|---|---|---|---|
| mRNA | Guide RNA | Dose (mg/kg) | (%) | deviation |
| MG29-1 | mAlb29-8-50 | 1 | 72.3 | 2.3 |
| MG29-1 | mAlb29-8-50 | 0.5 | 62.7 | 1.4 |
| MG29-1 | mAlb29-8-50 | 0.25 | 33.2 | 5.4 |
| spCas9 | mAlbR2 | 1 | 60.0 | 2.3 |
| spCas9 | mAlbR2 | 0.5 | 40.3 | 6.3 |
| spCas9 | mAlbR2 | 0.25 | 15.6 | 2.3 |
| PBS control | | — | 0.18 | 0.1 |

### Example 72—Identification of Active Single Guide RNA for MG29-1 that Target the Exonic Regions of Human HAO-1 by mRNA-Based Transfection in Hep3B Cells

[0579] Sequence-specific nucleases can be used to disrupt the coding sequence of a gene of interest, thereby creating a functional knockout of the protein encoded by that gene. This can be of therapeutic use when the knockdown of the protein has a beneficial effect in a particular human disease. One way to disrupt the coding sequence of a gene is to make a double strand break within the exonic regions of the gene using a sequence-specific nuclease. The double strand break is repaired via error-prone repair pathways, primarily non-homologous end joining (NHEJ) to generate insertions or deletions which can result in either frameshift mutations or changes to the amino acid sequence which disrupt the function of the protein.

[0580] To identify guide RNAs for MG29-1 that efficiently create double strand breaks at exonic regions of the gene encoding human glycolate oxidase (GO), single guide RNAs (sgRNAs) with a spacer length of 22 nt targeted to exons 1 to 4 of the human hydroxyacid oxidase (HAO-1) gene (GenBank RefSeq accession number NG 046733) were identified using the guide finding algorithm in the Geneious Prime nucleic acid analysis software (https://www.geneious.com/prime/).

[0581] The first four exons of the human HAO-1 gene encode amino acids comprising approximately the N-terminal 50% of the HAO-1 coding sequence. The first 4 exons were chosen because indels created towards the N-terminus of the coding sequence of a gene are more likely to create a frameshift or missense mutation that disrupts the activity of the protein. Using the more restrictive PAM for MG29-1 of TTTN, a total of 42 potential sgRNAs were identified within human HAO-1 exons 1 through 4. Guides that spanned the intron/exon boundaries were included because such guides may create INDELS that interfere with splicing. To create the full sgRNAs, the backbone sequence (UAAUUUCUACUGUUGUAGAU) was added to the 3′ end of the spacer sequence. The sgRNAs were chemically synthesized incorporating chemically modified bases documented to improve the performance of sgRNAs for the type V nuclease cpf1 (“A1tR1/A1tR2” chemistry, commercially available at Integrated DNA Technologies). The spacer sequences of these guides are shown in Table 36.

TABLE 36
Sequences of 42 single guide RNA targeting human HAO-1 for
testing in human Hep3B cells

| Guide | SEQ | | | Spacer | |
|---|---|---|---|---|---|
| Name | ID | Exon | PAM | Sequence (as DNA) | sgRNA Sequence |
| hH29-1 | 4184 | 1 | TTTA | GCATGTTGTTCATAATC | UAAUUUCUACUGUUGUA |
| | | | | ATTGA | GAUGCAUGUUGUUCAUA |
| | | | | | AUCAUUGA |
| hH29-2 | 4185 | 1 | TTTG | GAAGTACTGATTTAGCA | UAAUUUCUACUGUUGUA |
| | | | | TGTTG | GAUGAAGUACUGAUUUA |
| | | | | | GCAUGUUG |
| hH29-3 | 4186 | 1 | TTTG | TATCAATGATTATGAAC | UAAUUUCUACUGUUGUA |
| | | | | AACAT | GAUUAUCAAUGAUUAUG |
| | | | | | AACAACAU |
| hH29-4 | 4187 | 1 | TTTG | CCCCAGACCTGTAATAG | UAAUUUCUACUGUUGUA |
| | | | | TCATA | GAUCCCCAGACCUGUAAU |
| | | | | | AGUCAUA |
| hH29-5 | 4188 | 1 | TTTC | TTCATCATTTGCCCCAGA | UAAUUUCUACUGUUGUA |
| | | | | CCTG | GAUUUCAUCAUUUGCCCC |
| | | | | | AGACCUG |
| hH29-6 | 4189 | 1 | TTTC | TTACCTGGAAAATGCTG | UAAUUUCUACUGUUGUA |
| | | | | CAATA | GAUUUACCUGGAAAAUG |
| | | | | | CUGCAAUA |
| hH29-7 | 4190 | 1 | TTTT | CTTACCTGGAAAATGCT | UAAUUUCUACUGUUGUA |
| | | | | GCAAT | GAUCUUACCUGGAAAAU |
| | | | | | GCUGCAAU |
| hH29-8 | 4191 | 1 | TTTG | GCTGATAATATTGCAGC | UAAUUUCUACUGUUGUA |
| | | | | ATTTT | GAUGCUGAUAAUAUUGC |
| | | | | | AGCAUUUU |
| hH29-9 | 4192 | 1 | TTTA | AAAAATAAATTTTCTTA | UAAUUUCUACUGUUGUA |
| | | | | CCTGG | GAUAAAAAUAAAUUUUC |
| | | | | | UUACCUGG |
| hH29-10 | 4193 | 1 | TTTT | AAAAAATAAATTTTCTT | UAAUUUCUACUGUUGUA |
| | | | | ACCTG | GAUAAAAAAUAAAUUUU |
| | | | | | CUUACCUG |
| hH29-11 | 4194 | 2 | TTTT | ATTTTATTTTTTAATTCT | UAAUUUCUACUGUUGUA |
| | | | | AGAT | GAUAUUUUAUUUUUUAA |
| | | | | | UUCUAGAU |
| hH29-12\| | 4195 | 2 | TTTA | TTTTATTTTTTAATTCTA | UAAUUUCUACUGUUGUA |
| | | | | GATG | GAUUUUUAUUUUUUAAU |
| | | | | | UCUAGAUG |
| hH29-13\| | 4196 | 2 | TTTT | ATTTTTTAATTCTAGATG | UAAUUUCUACUGUUGUA |
| | | | | GAAG | GAUAUUUUUUAAUUCUA |
| | | | | | GAUGGAAG |
| hH29-14 | 4197 | 2 | TTTA | TTTTTTAATTCTAGATGG | UAAUUUCUACUGUUGUA |
| | | | | AAGC | GAUUUUUUUAAUUCUAG |
| | | | | | AUGGAAGC |
| hH29-15 | 4198 | 2 | TTTT | TTAATTCTAGATGGAAG | UAAUUUCUACUGUUGUA |
| | | | | CTGTA | GAUUUAAUUCUAGAUGG |
| | | | | | AAGCUGUA |
| hH29-16\| | 4199 | 2 | TTTT | TAATTCTAGATGGAAGC | UAAUUUCUACUGUUGUA |
| | | | | TGTAT | GAUUAAUUCUAGAUGGA |
| | | | | | AGCUGUAU |
| hH29-17 | 4200 | 2 | TTTT | AATTCTAGATGGAAGCT | UAAUUUCUACUGUUGUA |
| | | | | GTATC | GAUAAUUCUAGAUGGAA |
| | | | | | GCUGUAUC |
| hH29-18 | 4201 | 2 | TTTA | ATTCTAGATGGAAGCTG | UAAUUUCUACUGUUGUA |
| | | | | TATCC | GAUAUUCUAGAUGGAAG |
| | | | | | CUGUAUCC |
| hH29-19 | 4202 | 2 | TTTC | AGCAACATTCCGGAGCA | UAAUUUCUACUGUUGUA |
| | | | | TCCTT | GAUAGCAACAUUCCGGAG |
| | | | | | CAUCCUU |
| hH29-20 | 4203 | 2 | TTTT | AGGACAGAGGGTCAGCA | UAAUUUCUACUGUUGUA |
| | | | | TGCCA | GAUAGGACAGAGGGUCA |
| | | | | | GCAUGCCA |
| hH29-21 | 4204 | 2 | TTTA | GGACAGAGGGTCAGCAT | UAAUUUCUACUGUUGUA |
| | | | | GCCAA | GAUGGACAGAGGGUCAG |
| | | | | | CAUGCCAA |
| hH29-22 | 4205 | 3 | TTTC | TTTCTCAGCCTGTCAGTC | UAAUUUCUACUGUUGUA |
| | | | | CCTG | GAUUUUCUCAGCCUGUCA |
| | | | | | GUCCCUG |
| hH29-23 | 4206 | 3 | TTTC | TCAGCCTGTCAGTCCCT | UAAUUUCUACUGUUGUA |
| | | | | GGGAA | GAUUCAGCCUGUCAGUCC |
| | | | | | CUGGGAA |
| hH29-24 | 4207 | 3 | TTTG | TGACAGTGGACACACCT | UAAUUUCUACUGUUGUA |
| | | | | TACCT | GAUUGACAGUGGACACAC |
| | | | | | CUUACCU |
| hH29-25 | 4208 | 3 | TTTG | AATCTGTTACGCACATC | UAAUUUCUACUGUUGUA |
| | | | | ATCCA | GAUAAUCUGUUACGCACA |
| | | | | | UCAUCCA |
| hH29-26 | 4209 | 4 | TTTT | ATGCATTTCTTATTTTAG | UAAUUUCUACUGUUGUA |
| | | | | GATG | GAUAUGCAUUUCUUAUU |
| | | | | | UUAGGAUG |
| hH29-27 | 4210 | 4 | TTTA | TGCATTTCTTATTTTAGG | UAAUUUCUACUGUUGUA |
| | | | | ATGA | GAUUGCAUUUCUUAUUU |
| | | | | | UAGGAUGA |
| hH29-28 | 4211 | 4 | TTTC | TTATTTTAGGATGAAAA | UAAUUUCUACUGUUGUA |
| | | | | ATTTT | GAUUUAUUUUAGGAUGA |
| | | | | | AAAAUUUU |
| hH29-29 | 4212 | 4 | TTTT | AGGATGAAAAATTTTGA | UAAUUUCUACUGUUGUA |
| | | | | AACCA | GAUAGGAUGAAAAAUUU |
| | | | | | UGAAACCA |
| hH29-30 | 4213 | 4 | TTTA | GGATGAAAAATTTTGAA | UAAUUUCUACUGUUGUA |
| | | | | ACCAG | GAUGGAUGAAAAAUUUU |
| | | | | | GAAACCAG |
| hH29-31 | 4214 | 4 | TTTC | CTCAGGAGAAAATGATA | UAAUUUCUACUGUUGUA |
| | | | | AAGTA | GAUCUCAGGAGAAAAUG |
| | | | | | AUAAAGUA |
| hH29-32 | 4215 | 4 | TTTT | CCTCAGGAGAAAATGAT | UAAUUUCUACUGUUGUA |
| | | | | AAAGT | GAUCCUCAGGAGAAAAU |
| | | | | | GAUAAAGU |
| hH29-33 | 4216 | 4 | TTTT | GAAACCAGTACTTTATC | UAAUUUCUACUGUUGUA |
| | | | | ATTTT | GAUGAAACCAGUACUUU |
| | | | | | AUCAUUUU |
| hH29-34 | 4217 | 4 | TTTG | AAACCAGTACTTTATCA | UAAUUUCUACUGUUGUA |
| | | | | TTTTC | GAUAAACCAGUACUUUA |
| | | | | | UCAUUUUC |
| hH29-35 | 4218 | 4 | TTTA | TCATTTTCTCCTGAGGAA | UAAUUUCUACUGUUGUA |
| | | | | AATT | GAUUCAUUUUCUCCUGAG |
| | | | | | GAAAAUU |
| hH29-36 | 4219 | 4 | TTTT | CTCCTGAGGAAAATTTT | UAAUUUCUACUGUUGUA |
| | | | | GGAGA | GAUCUCCUGAGGAAAAU |
| | | | | | UUUGGAGA |
| hH29-37 | 4220 | 4 | TTTC | TCCTGAGGAAAATTTTG | UAAUUUCUACUGUUGUA |
| | | | | GAGAC | GAUUCCUGAGGAAAAUU |
| | | | | | UUGGAGAC |
| hH29-38 | 4221 | 4 | TTTA | GCCACATATGCAGCAAG | UAAUUUCUACUGUUGUA |
| | | | | TCCAC | GAUGCCACAUAUGCAGCA |
| | | | | | AGUCCAC |
| hH29-39 | 4222 | 4 | TTTT | GGAGACGACAGTGGACT | UAAUUUCUACUGUUGUA |
| | | | | TGCTG | GAUGGAGACGACAGUGG |
| | | | | | ACUUGCUG |
| hH29-40 | 4223 | 4 | TTTG | GAGACGACAGTGGACTT | UAAUUUCUACUGUUGUA |
| | | | | GCTGC | GAUGAGACGACAGUGGA |
| | | | | | CUUGCUGC |
| hH29-41 | 4224 | 4 | TTTG | ATATCTTCCCAGCTGAT | UAAUUUCUACUGUUGUA |
| | | | | AGATG | GAUAUAUCUUCCCAGCUG |
| | | | | | AUAGAUG |
| hH29-42 | 4225 | 4 | TTTG | CAACAATTGGCAATGAT | UAAUUUCUACUGUUGUA |
| | | | | GTCAG | GAUCAACAAUUGGCAAU |
| | | | | | GAUGUCAG |

[0582] Hep3B cells (ATCC catalog number HB-8064), a transformed human liver cell line (derived from a hepatocellular carcinoma), were cultured under standard conditions in growth media (EMEM media with 10% FBS) in a 5% CO₂ incubator and transfected with a mixture of mRNA encoding MG29-1 and each of the single guide RNAs. The mRNA encoding MG29-1 was generated by T7 polymerase in vitro transcription of a plasmid in which the coding sequence of MG29-1 had been cloned. The MG29-1 coding sequence was codon optimized using human codon usage tables and flanked by nuclear localization signals derived from SV40 (at the N-terminus) and from Nucleoplasmin (at the C-terminus). In addition, a 5′ untranslated region (5′ UTR) was included at the 5′ end of the coding sequence to improve translation. A 3′ UTR followed by an approximately 90 to 110 nucleotide polyA tract was included in the mRNA (encoded in the plasmid) at the 3′ end of the coding sequence to improve mRNA stability in vivo. The DNA sequence that encodes the MG29-1 mRNA without the polyA tail is shown in SEQ ID 5830. The in vitro transcription reaction included the Clean Cap® capping reagent (Trilink BioTechnologies), the resulting RNA was purified using the MEGAClear™ Transcription Clean-Up kit (Invitrogen), and purity was evaluated using the TapeStation (Agilent) and found to be composed of >90% full length RNA.

[0583] When co-transfection of mRNA and guide with a lipid transfection reagent such as MessengerMAX is used, the mixture of the two RNA molecules forms a complex with the positively charged lipid, the complex enters the cells via endocytosis, and eventually some of the RNA reaches the cytoplasm. In the cytoplasm, the mRNA is translated into protein. In the case of an RNA-guided nuclease such as MG29-1, the resulting MG29-1 protein will presumably form a complex with the sgRNA in the cytoplasm before entering the nucleus in a process mediated by the nuclear localization signals that were engineered into the MG29-1 protein. This process is similar to that of delivering an mRNA and a guide RNA in a lipid nanoparticle in vivo, a method of use that is envisaged for therapeutic applications in which the HAO-1 gene would be functionally inactivated by introduction of INDELS within the coding sequence. Thus, the 42 single guide RNAs for editing activity were screened using co-transfection of mRNA and sgRNA because this method is likely a better representation of the planned therapeutic use and is thus likely to more accurately predict which of the 42 sgRNAs will be most active in a therapeutic application.

[0584] A total of 2×10⁵ Hep3B cells were plated per well of 24 well plates in growth media (EMEM plus 10% FBS) and incubated overnight in a 5% CO₂/37° C. humidified incubator. The following day, Lipofectamine MessengerMAX (Thermo Fisher) was diluted in OPTIMEM media (1.25 μL MessengerMAX plus 25 μL OPTIMEM per transfection). 300 ng of MG29-1 mRNA (0.22 pmol) and 120 ng (8.4 pmol) of sgRNA were combined in 25 μL OPTIMEM media, then mixed with 26 μL of the diluted MessengerMAX by gently flicking the tube. After incubating for 5 to 10 mins at room temperature, the RNA/MessengerMAX mixture was added to each well of Hep3B cells and mixed by swirling gently. The cells were incubated overnight (16 h), after which the media was exchanged for fresh growth media. At 48 h after addition of the RNA/MessengerMAX mixture, the cells were collected by trypsinization or by on-plate lysis, and genomic DNA was purified using either the Purelink Genomic DNA Extraction kit (Thermo Fisher) or the MagMax DNA Extraction Kit (Thermo Fisher) and the KingFisher robotic system (Thermo Fisher). The purified genomic DNA was quantified by absorbance at 260 nm. HAO-1 gene sequences targeted by the single guides were amplified by PCR from the purified genomic DNA using exon-specific primers (Table 37) and Phusion Flash High-Fidelity PCR Master Mix (Thbermo Fisher). PCR products were purified and concentrated using the DNA Clean & Concentrator 5 kit (Zymo Research), and 40 ng of PCR product was subjected to Sanger sequencing (at ELIM Biosciences) using primers located within 100 bp to 350 bp of the predicted target site for each sgRNA (Table 37). PCR products derived from untreated Hep3B cells were included as controls. The sequences of the PCR products matched the expected sequences of the HAO-1 exons.

TABLE 37
Primers designed for the human HAO1 gene,
used for PCR amplification of the
first four exons, and for Sanger sequencing.

| Target Exon | Use | Primer Name | Primer Sequence |
|---|---|---|---|
| Human HAO1 | Fwd PCR | PCR_hHe1_ | TTTCATGGATGCCCCGTTCA |
| Exon 1 | | F_+490 | |
| | Rev PCR | PCR_hHe1_ | ACGAAAAGCCAGCAGGAAG |
| | | R_−412 | A |
| | Sequencing | Seq_hHe1_ | AGCCCCAAGAACTTTTCCCT |
| | | R_−121 | |
| Human HAO1 | Fwd PCR | PCR_hHe2_ | TGCATCAGTGGTTGTCAGGG |
| Exon 2 | | F_+391 | |
| | Rev PCR | PCR_hHe2_ | CCTAGCTGTGACTTTGGGCA |
| | | R_−387 | |
| | Sequencing | Seq_hHe2_ | TGGAAAGAAGAGGAGCAGG |
| | | R_−152 | AC |
| Human HAO1 | Fwd PCR | PCR_hHe3_ | AGGCTGGATGTTCAGGTTCT |
| Exon 3 | | F_+238 | |
| | | | T |
| | Rev PCR | PCR_hHe3_ | TCCCAAAGCCAAAGCCCTTA |
| | | R_−212 | |
| | Sequencing | Seq_hHe3_ | AGCAGAAATAACTCCAGTA |
| | | F_+186 | GCCA |
| Human HAO1 | Fwd PCR | PCR_hHe4_ | GCTGGCTGAAAATCGTGTCA |
| Exon 4 | | F_+324 | A |
| | Rev PCR | PCR_hHe4_ | TCCTTGGGGCTTCTCTTTGG |
| | | R_−348 | |
| | Sequencing | Seq_hHe4_ | ACTGATTAAGACCACTAGA |
| | | F_+174 | GTATCACA |

[0585] The Sanger sequencing chromatograms were analyzed for insertions and deletions (indels) at the predicted target site for each sgRNA by an algorithm called Tracking of Indels by DEcomposition (TIDE) as described by Brinkman et al. (See. e.g., Nucleic Acids Res. 2014 Dec. 16; 42 (22): e168.Published online 2014 Oct. 9. doi: 10.10.1093/nar/gka936, which is incorporated by reference herein). As presented in Table 38, 14 guides demonstrated detectable editing at their predicted target sites. Ten guides exhibited editing activity of 10% or greater. These data demonstrate that the MG29-1 nuclease can generate RNA-guided, sequence-specific, double strand breaks in exonic regions of the human HAO-1 gene in a cultured liver cell line.

TABLE 38
Editing activity of 42 sgRNA targeting
exons 1 to 4 of the human HAO-1
gene in Hep3B cells.

| | | Average | |
|---|---|---|---|
| | | INDEL | |
| Guide Name | PAM | (Percentage)* | SD* |
| hH29-1 | TTTA | 8.5 | 4.95 |
| hH29-2 | TTTG | 15.25 | 5.56 |
| hH29-3 | TTTG | 6 | 5.66 |
| hH29-4 | TTTG | 39.5 | 10.47 |
| hH29-5 | TTTC | 0 | 0 |
| hH29-6 | TTTC | 8 | 8.49 |
| hH29-7 | TTTT | 0 | 0 |
| hH29-8 | TTTG | 2.5 | 3.54 |
| hH29-9 | TTTA | 0 | 0 |
| hH29-10 | TTTT | 0 | 0 |
| hH29-11 | TTTT | 0 | 0 |
| hH29-12 | TTTA | 0 | 0 |
| hH29-13 | TTTT | 0 | 0 |
| hH29-14 | TTTA | 0 | 0 |
| hH29-15 | TTTT | 0 | 0 |
| hH29-16 | TTTT | 0 | 0 |
| hH29-17 | TTTT | 0 | 0 |
| hH29-18 | TTTA | 3.5 | 4.95 |
| hH29-19 | TTTC | 18.75 | 12.74 |
| hH29-20 | TTTT | 6.5 | 4.95 |
| hH29-21 | TTTA | 68 | 8.04 |
| hH29-22 | TTTC | 6 | 1.41 |
| hH29-23 | TTTC | 17.5 | 2.89 |
| hH29-24 | TTTG | 10 | 4.24 |
| hH29-25 | TTTG | 0 | 0 |
| hH29-26 | TTTT | 0 | 0 |
| hH29-27 | TTTA | 0 | 0 |
| hH29-28 | TTTC | 0 | 0 |
| hH29-29 | TTTT | 0 | 0 |
| hH29-30 | TTTA | 0 | 0 |
| hH29-31 | TTTC | 0 | 0 |
| hH29-32 | TTTT | 0 | 0 |
| hH29-33 | TTTT | 0 | 0 |
| hH29-34 | TTTG | 0 | 0 |
| hH29-35 | TTTA | 0 | 0 |
| hH29-36 | TTTT | 0 | 0 |
| hH29-37 | TTTC | 0 | 0 |
| hH29-38 | TTTA | 0 | 0 |
| hH29-39 | TTTT | 0 | 0 |
| hH29-40 | TTTG | 0 | 0 |
| hH29-41 | TTTG | 34 | 13.04 |
| hH29-42 | TTTG | 0 | 0 |

*Data are the mean of 2 independent transfections

[0586] Six of the sgRNAs (hH29-2, hH29-4, hH29-19, hH29-21, hH29-23, and hH29-41) with the highest editing activity from this initial screen were re-tested using the same MG29-1 mRNA/sgRNA MessengerMax transfection method in Hep3B cells. Two independent transfections were performed, and indel frequency was determined using the same Sanger sequencing method described above, followed by analysis using TIDE. The mean indel frequencies (FIG. 95) ranged from 20% to 75%. The rank order of editing efficiency was hH29-21>hH29-41>hH29-4>hH29-19>hH29-23=hH29-2. An evaluation of the frequency of indels that generate a frame shift (Out of Frame Editing) was also made based on the Sanger Chromatograms, and these results are plotted in FIG. 95. The ratio of out of frame edits to total indels was different for different sgRNAs, but the rank order of out of frame editing frequency was the same as total indels.

[0587] Four of the sgRNAs (hH29-21, hH29-4, hH29-41, and hH29-23) with the highest editing activity in Hep3B cells were also evaluated for their editing activity by nucleofection of ribonucleoprotein particles (RNP) into both Hep3B cells and another human liver-derived cell line, HuH7. The ribonuclear protein complex was formed by mixing 160 pmol of sgRNA and 126 pmol purified MG29-1 protein in PBS buffer. A total of 2×10⁵ Hep3B or HuH7 cells in suspension in complete SF nucleofection reagent (Lonza) were nucleofected with the pre-formed nuclease/sgRNA complex using a 4D nucleofection device (Lonza). After nucleofection, the cells were plated in 24 well plates in growth media plus 10% FBS and incubated in a 5% CO₂ incubator for 48 h to 72 h. Genomic DNA was then extracted from the cells using a column based purification kit (Purelink genomic DNA mini kit, ThermoFisher Scientific) and quantified by absorbance at 260 nm. HAO-1 gene sequences targeted by the single guides were amplified by PCR from the purified genomic DNA using the relevant exon-specific primers (Table 37) and Phusion Flash High-Fidelity PCR Master Mix (Thermo Fisher). PCR products were purified and concentrated using DNA Clean & Concentrator 5 (Zymo Research), and 40 ng of PCR product subjected to Sanger sequencing (at ELIM Biosciences) using relevant primers (Table 37) located within 100 to 350 bp of the predicted target site for each sgRNA. PCR products derived from untransfected cells were included as controls. The sequence of the PCR products matched the expected sequences of the HAO-1 exons. The Sanger sequencing chromatograms were analyzed for insertions and deletions (indels) at the predicted target site for each guide by Tracking of Indels by DEcomposition (TIDE) as described by Brinkman et al. (Nucleic Acids Res. 2014 Dec. 16; 42 (22): e168.Published online 2014 Oct. 9. doi: 10.1093/nar/gka936). The presence of indels at the target site is the consequence of the generation of double strand breaks in the DNA, which are then repaired by the error-prone cellular repair machinery which introduces insertions and deletions. The results (FIG. %) demonstrate that using the more efficient transfection method of RNP nucleofection, the editing frequency for these top 4 guides ranged from 25% to 95%. The rank order of editing activity for these 4 guides was hH29-21>hH29-4>hH29-41>hH29-23, which was similar but not identical to the rank order of editing activity measured by transfection of mRNA and sgRNA by MessengerMAX in Hep3B cells (FIG. 95).

### Example 73—Editing Activity of the Most Active MG29-1 Guides Targeting Exons 1 to 4 of Human HAO-1 in Primary Human Hepatocytes

[0588] Primary human hepatocytes (PHH) are hepatocytes that are isolated from the livers of deceased humans using documented methods such as Kegel et al. (doi: 10.3791/53069). PHH are the closest cell-based model for human hepatocytes in their native state in vivo and thus represent an in vitro cell system that can be used to predict the performance of gene editing systems in humans in vivo. PHH have undergone minimal manipulation, do not undergo cell division, and have a limited lifespan in culture of about 7 days. PHH were obtained from commercial suppliers (Lonza, Gibco) and cultured according to the protocols provided by the supplier. To evaluate the editing activity of the four most active MG29-1 guides targeting human HAO-1, the sgRNAs with spacers 4, 21, 23, and 41 were chemically synthesized with the incorporation of chemical modification #37 to the backbone and the nucleobases that improve the stability and activity of the sgRNA. The 4 sgRNAs with chemical modifications #37 are designated as hH29-4-37 (SEQ ID 5831), hH29-21-37 (SEQ ID 5832), hH29-23-37 (SEQ ID 5833), and hH29-41-37 (SEQ ID 5834). 1028 ng of MG29-1 mRNA and 222 ng of each single guide RNA (1:20 molar ratio of mRNA:guide RNA) were transfected into primary human hepatocyte (PHH) cells as follows. One day prior to transfection, PHH cells were thawed and seeded in 1.0 ml HBM™-5% FBS-HCM™ SingleQuot Supplements media into collagen-treated 12 well plates at 1,000,000 viable cells per well. On the day of transfection, 60.4 μL of OptiMEM media and 2.1 μL of Lipofectamine MessengerMax Solution (Thermo Fisher) were mixed in a master mix solution, vortexed, and allowed to sit for at least 10 minutes at room temperature. In separate tubes, 1028 ng of MG29-1 mRNA and 222 ng of the sgRNA were mixed, brought to a volume of 62.5 μL with OptiMEM media, and pipetted briefly. The appropriate volume of MessengerMax solution was added to each RNA solution, mixed by flicking the tube, and briefly spun down at a low speed. The complete editing reagent solutions were allowed to incubate for at least 10 minutes at room temperature, then added directly to the PHH cells. Following the transfection, media was replaced every day until harvest. Three days post-transfection, the culturing media was aspirated from each well of PHH cells and replaced with MagMAX™ Cell and Tissue DNA Extraction Buffer (Thermo Fisher). Cells were scraped and transferred to a 96-well plate, and genomic DNA was purified by automated magnetic bead purification via the KingFisher Flex with the MagMAX™ DNA Multi-Sample Ultra 2.0 Kit (Thermo Fisher).

[0589] The region of the HAO-1 gene targeted by each specific sgRNA was PCR amplified with Q5 high fidelity DNA polymerase and exon specific primers (Table 37) but with the addition of adapters complementary to the barcoded primers used for next generation sequencing (NGS) for a total of 29 cycles. The product of this first PCR reaction was PCR amplified using the barcoded primers for NGS using a total of 10 cycles. The resulting product was subjected to NGS on an Illumina MiSeq instrument, and the results were processed using a custom script to generate the percentage of sequencing reads that contain insertions or deletions (indels) at the targeted site in the HAO-1 gene. Two independent transfections of PHH were performed, and in each experiment, each of the sgRNA were tested in duplicate wells that were separately assayed for indels by NGS. The average of the indel frequency in the 2 wells was then calculated. The mean of indel frequency from the 2 independent experiments was then determined (Table 39) and also shown in graph format (FIG. 97), in which the error bars represent the standard deviation.

TABLE 39
Editing activity in PHH of 4 MG29-1 sgRNA targeting human HAO-1

| sgRNA | Exon | Mean total INDEL %* | Stdev |
|---|---|---|---|
| hH29-4-37 | 1 | 58.3 | 5.6 |
| hH29-21-37 | 2 | 59.1 | 10.5 |
| hH29-23-37 | 3 | 31.5 | 10.5 |
| hH29-41-37 | 4 | 49.2 | 9.9 |

*data are the mean of 2 independent transfection experiments each performed in duplicate wells

[0590] The results indicate that all four guides edited the HAO-1 gene in PHH with mean INDEL frequencies ranging from 20% to 58% (FIG. 97). Guides hH29-4-37 and mH29-21-37 exhibited the highest editing activity in PHH. Guide hH29-41-37 was slightly less active than guides hH29-4-37 and mH29-21-37, but the difference was not significant. Guide hH29-23-37 was the least active of the 4 guides in PHH. Guide hH29-23-37 was also the least active of these 4 guides in Hep3B and HuH7 cells (Table 37, FIG. 95, FIG. 96). PHH are a surrogate for editing hepatocytes in vivo. These data demonstrate that the MG29-1 nuclease and an appropriate sgRNA have utility in generating insertions and deletions in the coding sequence of the human HAO-1 gene, which are expected to generate a mixture of non-sense, missense, and deletion mutations leading to disruption of GO protein expression and/or activity.

[0591] The indel profile obtained from the same NGS sequence data of the HAO-1 gene in PHH transfected with MG29-1 mRNA and the 4 sgRNAs was used to determine the percentage of INDELS that result in a frame shift. Sequence reads in which the number of bases inserted or deleted at the target site are not 3 bases or a multiple of 3 bases will shift the reading frame of the HAO-1 protein coding sequence. A frame shift will alter the amino acid sequence encoded in the mRNA downstream of the indel and in many cases will introduce an in frame stop codon at some point (this can be predicted for each allele). The NGS data (comprising several thousand reads for each sample) was analyzed using a Python script that calculates the percentage of total sequencing reads in which there is an indel that created a frame shift, and this was designated as the out of frame (OOF) indel percentage. The OOF indel percentage is plotted in FIG. 97 alongside the total indel percentage. The OOF indel percentage ranged from 20% to 40%, which represents between 70% and 80% of the total INDEL percentage, demonstrating that the majority of indels are predicted to create a frameshift. The in-frame indels will delete 1 or more codons from the mRNA, and thus will remove 1 or more amino acids from the glycolate oxidase protein that is encoded by HAO-1. FIGS. 98A and 98B show representative indel profiles for each of the 4 MGf29-1 sgRNAs from edited PHH. In-frame deletions of 3, 6, 9, 12, 15, 18, and 21 bases are evident at different relative frequencies. An analysis of the frequencies of the in-frame deletions and their impact on the GO protein sequence can be used to inform selection of sgRNA that will result in the greatest reduction in GO protein function.

### Example 74—In Vivo Editing Activity of Single Guide RNAs for MG29-1 with 22 and 20 Nucleotide Spacers that Target the Exonic Regions of Mouse HAO-1

[0592] To evaluate the ability of the MG29-1 Type V nuclease to edit the genome in vivo in a living animal, a lipid nanoparticle was used to deliver an mRNA encoding the MG29-1 nuclease and one of four guide RNAs. The ability of MG29-1 with sgRNA comprising 22 nucleotide (nt) spacers to edit the mouse HAO-1 locus in the liver of mice when delivered in an LNP was demonstrated in Example 55. Experiments in cultured mammalian cells demonstrated that reducing the length of the spacer region in MG29-1 sgRNA from 22 nt to 20 nt did not change editing activity. Reducing the spacer from 22 nt to 20 nt may be advantageous in terms of minimizing off-target activity and in terms of sgRNA manufacture. In order to validate that MG29-1 sgRNA with a reduced spacer length of 20 nt retained potency in vivo, four guide RNAs (mH29-29-37, mH29-29-44, mH29-29 s-37, and mH29-29s-44) were designed and tested in mice. The sequences of these guides are shown below in Table 40.

TABLE 40
Sequences and chemical modifications of
guide RNAs tested in vivo in mouse study

| Guide RNA | Sequence |
|---|---|
| mH29-29-37 | mC*mU*mU*U*UAAUUmUmCmUmACU*G*U |
| | *U*GUAGAU CCUUAGGfAfGfAfAfAfAf |
| | UfGfCfC*fA*fAfA*fU*mC |
| mH29-29-44 | mC*mU*mU*U*U*AAUUmUmCmUmACU*G* |
| | U*U*GUAGAU CCUUAGGfAfGfAfAfAfA |
| | fUfG*fCfC*fA*fA*fA*fU*mC |
| mH29-29s-37 | mC*mU*mU*U*UAAUUmUmCmUmACU*G*U |
| | *U*GUAGAU CCUUAGGfAfGfAfAfAfAf |
| | UfG*fCfC*fA*fA*MA |
| mH29-29s-44 | mC*mU*mU*U*UAAUUmUmCmUmACU*G*U |
| | *U*GUAGAU CCUUAGGfAfGfAfAfAfAf |
| | UfG*fC*fC*fA*fA*MA |

Notations for chemical modifications: m= 2′O-Methyl ribonucleotide (e.g mC= cytosine ribonucleotide with 2′-O Methyl in place of 2′ hydroxy1); f= 2′Fluorine ribonucleotide (e.g fC = cytosine ribonucleotide with 2′ fluorine in place of 2′ hydroxyl); *= phosphorothioate bond. All other bases are native ribonucleotides.
Backbone sequence in normal type.
Spacer sequence in bold type.

[0593] Guides mH29-29-37 and mH29-29-44 have the same nt sequence (spacer 29) but different chemical modifications (chemistries 37 and 44), while guides mH29-29s-37 and mH29-29s-44 have spacer sequences shortened by two nts at the 3′ end but are otherwise identical in nt sequence to mH29-29-37 and mH29-29-44, respectively. The locations of the 2′-fluoro, 2′-O-methyl, and phosphorothioate modifications in the spacer region of the guides with a 20 nt spacer are shifted relative to those in the corresponding guides with a 22 nt spacer. Because the chemical modifications in the sgRNA impact sgRNA stability, which is critical for in vivo potency, it was important to evaluate the impact of these changes on in vivo editing.

Preparation of MG29-1 mRNA

[0594] The mRNA encoding MG29-1 (SEQ ID NO: 5846) was generated by in vitro transcription of a linearized plasmid template using T7 RNA polymerase and standard conditions using nucleotides and enzymes purchased from New England Biolabs or Trilink Biotechnologies. The protein coding sequence of the MG29-1 cassette comprises the following elements from 5′ to 3′: the nuclear localization signal from SV40, a five amino acid linker (GGGS), the protein coding sequence of the MG29-1 nuclease from which the initiating methionine codon was removed, a 3 amino acid linker (SGG), and the nuclear localization signal from nucleoplasmin. The DNA sequence of this cassette was codon optimized for human using a commercially available algorithm. An approximately 100 nucleotide polyA tail was encoded in the plasmid used for in vitro transcription and the mRNA was co-transcriptionally capped using the CleanCAP™ reagent purchased from Trilink Biotechnologies. Uridine in the mRNA was replaced with N1-methyl pseudouridine.

### Preparation of Lipid Nanoparticles

[0595] The lipid nanoparticle (LNP) formulation used to deliver the MG29-1 mRNA and the guide RNA is based on LNP formulations described in the literature including Kauffman et al. (Nano Lett. 2015, 15, 11, 7300-7306 https://doi.org/10.1021/acs_nanolett_5b024970) The four lipid components were dissolved in ethanol and mixed in an appropriate molar ratio to make the lipid working mix. The RNAs were diluted in 100 mM Sodium Acetate (pH 4.0) to make the RNA working stocks. The lipid working stock and the RNA working stocks were mixed in a microfluidics device (Ignite NanoAssembler, Precision Nanosystems) at a flow rate ratio of 1:3, respectively, and a flow rate of 12 mL/min. The LNP were dialyzed against phosphate buffered saline (PBS) for 2 to 16 hours and then concentrated using Amicon spin concentrators (Milipore) until the desired volume was achieved. The concentration of RNA in the LNP formulation was measured using the Ribogreen reagent (Thermo Fisher). The diameter and polydispersity (PDI) of the LNP were determined by dynamic light scattering. Typical LNP had diameters ranging from 70 nm to 84 nm and PDI of 0.098 to 0.150.

### Mouse Dosing and Harvesting

[0596] LNP for mRNA and sgRNA were mixed at 1:1 mass ratio and injected intravenously into 7 week-old C57B16 wild type mice via the tail vein (0.1 mL per mouse) at a total RNA dose of 0.84 mg RNA per kg body weight. Fourteen days after dosing, the mice were sacrificed, and the left lateral, medial, and right lateral lobes of the liver were collected for preparation of DNA, RNA, and protein, respectively. Blood was collected by exsanguination via cardiac puncture and collected onto BD microtainer (heparin coated). Samples were kept on wet ice for no longer than 30 minutes prior to centrifugation. Samples were centrifuged at 2,000 G for 10 minutes and the plasma transferred to 1.5 mL Cryotubes and stored at −80° C.

### Genomic DNA Preparation and Editing Analysis by Next-Generation Sequencing (NGS

[0597] The left lateral lobe of the liver (100 mg) was homogenized using a Bead Ruptor (Omni International) in the digestion buffer supplied in the PureLink Genomic DNA Isolation Kit (Thermo Fisher Scientific). Genomic DNA was purified from the resulting homogenate using the MagMAX™ DNA Multi-Sample Ultra 2.0 Kit (Applied Biosystems) and quantified by measuring the absorbance at 260 nm. Genomic DNA purified from mice injected with PBS buffer alone was used as a control. The region of the HAO-1 gene targeted by each specific sgRNA was PCR amplified with Q5 high fidelity DNA polymerase and gene specific primers (Table 41) with adapters complementary to the barcoded primers used for next generation sequencing (NGS) for a total of 29 cycles.

TABLE 41
Primers used to amplify HAO1 guide
target site and for NGS

| | | Fwd with | Rev with |
|---|---|---|---|
| | Primer | Miseq | Miseq |
| Guide | Set Name | adapter | adapter |
| mH29-29 | mHAO1- | GCTCTTCCGA | GCTCTTCCGATC |
| (spacer | NGS-P3 | TCTNNNNNGT | TNNNNNTGTAG |
| 29) | | GATGTCAATC | GTGGCTGAGTA |
| | | GTCTGAGC | CGTT |

[0598] The product of this first PCR reaction was PCR amplified using the barcoded primers for NGS for a total of 10 cycles. The resulting product was subjected to NGS on an Illumina MiSeq instrument, and the results were processed using a custom Python script to generate the percentage of sequencing reads that contain insertions or deletions (INDELS) at the targeted site in the HAO-1 gene.

[0599] NGS analysis showed that editing of the groups dosed with LNP encapsulating MG29-1 mRNA and each of the four sgRNA ranged from 42% to 48% of total liver genomic DNA (FIG. 99). There were only slight differences between the groups, indicating that the sgRNA with the 20-nt spacer edited the target locus as efficiently as the 22-nt spacer, and that guide RNAs with chemistries 37 and 44 edited equally well.

### RNA Preparation and Analysis by RT-ddPCR

[0600] The medial lobe of the liver was stored in RNAlater or RNAprotect (Qiagen) to preserve the integrity of the RNA prior to homogenization. A maximum of 10 mg of tissue was transferred to a 2 mL tube containing 1.4 mm ceramic beads and homogenized using the Bead Ruptor Elite (OMNI International) following the soft tissue homogenization protocol, 5.00 m/s for 10-15 sec. Homogenized tissue was then processed using RNeasy Protect Kit (Qiagen) with an additional 45 minute on-column DNase I digestion treatment (Qiagen). The RNA products were quantified by measuring the absorbance at 260 nm. Isolated RNA samples then underwent an additional DNase treatment using the ezDNase™ Enzyme (Invitrogen) and reverse transcription using the SuperScript™ IV Vilo Master Mix (Invitrogen). The cDNA product was then quantified by measuring the absorbance at 260 nm.

[0601] HAO-1 mRNA levels were quantified using a custom ddPCR probe-based assay that was multiplexed with the housekeeping gene GAPDH. HAO-1 was labeled with a HEX probe while GAPDH was labeled with a FAM probe. Both probes were flanked by primers specific to the respective genes creating amplicons of about 115 bp. The template material for the assay was 100 ng of cDNA product from the process above mixed with 900 nM of each primer and 250 nM of probe per gene assay along with 10 μL of ddPCR Supermix for Probes (No dUTP) (Bio-Rad Laboratories) raised to a final volume of 20 μL with nuclease-free water. The PCR mix was parsed into thousands of oil droplets via the AutoDG ddPCR System (Bio-Rad Laboratories), ran in the C1000 Touch™ deep well thermal cycler (Bio-Rad Laboratories), and analyzed using the QX200 Droplet Reader (Bio-Rad Laboratories). Results were divided into four sections: negative droplets (no fluorescence), single positive droplets (HEX or FAM positive fluorescence), and double positive droplets (both HEX and FAM fluorescence). Using the QuantaSoft Software (Bio-Rad Laboratories), copies per μL of HAO1 and GAPDH were calculated for each sample. The ratio of HAO1 to GAPDH was compared for mice treated with mH29-29 against mice treated with buffer only. The GAPDH-normalized levels of HAO1 mRNA of the mH29-29 treated groups ranged from 52% to 70% of the control group (FIG. 99) and correlated with the editing efficiency as defined by INDEL %, indicating little or no effect of spacer length or chemistry upon guide RNA activity.

TABLE 42
Primers and probes used in the amplification
HAO1 and GAPDH ddPCR assays

| | | | Fwd | Rev |
|---|---|---|---|---|
| Target | Probe | Probe | Primer | primer |
| Gene | Fluorescence | Sequence | Sequence | sequence |
| HAO1 | HEX | AGTG+GGTG+ | GGGGAGA | CTCACCA |
| | | C+CA+G | AAGGTGT | ATGTCTTG |
| | | AAT+GTGAA | TCAAGATGT | TCGATGA |
| GAPDH | FAM | CATGACCA+ | GCACCACC | CCATCCAC |
| | | CAGT+C+ | AACTGCT | AGTCTTCT |
| | | CATGCCATC | TAG | GGG |

Notations for chemical modifications: += Locked Nucleic Acid (LNA) base modification

### Example 75—Investigation of Different mRNA:sgRNA Ratios and LNP Formulation Procedures on Editing Efficiency In Vivo in Mice

[0602] In this in vivo mouse study, MG29-1 mRNA and sgRNA mH29-29-50b were formulated separately into LNP and then mixed at different mass ratios of mRNA and sgRNA prior to dosing. The same mRNA and sgRNA were also co-formulated in the same LNP at a 1:1 mass ratio then either kept at 4° C. and dosed within 48 h (fresh LNP), or frozen and stored at −80° C., then thawed and dosed within 2 h (frozen LNP). The sequence of the mH29-29-50b sgRNA is shown in Table 43. This guide has a 20-nt spacer sequence and the chemical modifications designated chemistry 50.

TABLE 43
Sequences and chemical modifications of
guide RNAs tested in vivo in
mouse studies

| Guide RNA | Sequence |
|---|---|
| mH29-29-50 | mG*mU*mU*GAGAAUC*mG* |
| | mA*mA*mAGAUUCUCAAC*m |
| | C*mU*mU*U*UAAUUmUmCm |
| | UmACU*G*U*U*GUAGAUCC |
| | UUAGGfAfGfAfAfAfAfUf |
| | GfCfC*fA*fAfA*fU*mC |
| mH29-29-50b | mG*mU*mU*GAGAAUC*mG* |
| | mA*mA*mAGAUUCUCAAC*m |
| | C*mU*mU*U*UAAUUmUmCm |
| | UmACU*G*U*U*GUAGAUCC |
| | UUAGGfAfGfAfAfAfAfUf |
| | GfCfC*fA*fA*MA |
| mH29-29-51b | mG*mU*mU*GAGAAUC*mG* |
| | mA*mA*mAGAUUCUCAAC*m |
| | C*mU*mU*U*UAAUUmUmCm |
| | UmACU*G*U*U*GUAGAUCC |
| | UUAGGAGAAAAUGCC*A*mA |
| | *mA |
| mH29-29-52b | mG*mU*mU*GAGAAUC*mG* |
| | mA*mA*mAGAUUCUCAAC*m |
| | C*mU*mU*U*UAAUUmUmCm |
| | UmACU*G*U*U*GUAGAUCC |
| | UUAGGAfGAfAAfAUfG*C* |
| | fCA*fA*mA |
| mH29-29-53b | mG*mU*mU*mG*mA*mG*mA |
| | *mA*mU*mC*mG*mA*mA*m |
| | A*mG*mA*mU*mU*mC*mU* |
| | mC*mA*mA*mC*mC*mU*mU |
| | *U*UAAUUmUmCmUmACU*G |
| | *U*U*GUAGAUCCUUAGGfA |
| | fGfAfAfAfAfUfGfCfC*f |
| | A*fA*mA |
| mH29-29-54b | mG*mU*mU*mG*mA*mG*mA |
| | *mA*mU*mC*mG*mA*mA*m |
| | A*mG*mA*mU*mU*mC*mU* |
| | mC*mA*mA*mC*mC*mU*mU |
| | *U*UAAUUmUmCmUmACU*G |
| | *U*U*GUAGAUCCUUAGGAG |
| | AAAAUGCC*A*mA*mA |

Notations for chemical modifications: m= 2′O-Methyl ribonucleotide (e.g mC= cytosine ribonucleotide with 2′-O Methyl in place of 2′ hydroxy1); f= 2′Fluorine ribonucleotide (e.g fC= cytosine ribonucleotide with 2′ fluorine in place of 2′ hydroxyl); *= phosphorothioate bond.
All other bases are native ribonucleotides.
Backbone sequence in normal type.
Spacer sequence in bold type.

### Preparation of Lipid Nanoparticles

[0603] The LNP formulations used to deliver the MG29-1 mRNA and the guide RNA were prepared by the same procedure as in Example 74 with the following differences:
[0604] 1. For different ratios of separately-formulated LNP, the mRNA and guide RNA LNP were mixed at 1:2,1:1.5,1:1, 1:0.75, and 1:0.5 mRNA:guide RNA mass ratios.
[0605] 2. For the co-formulated LNP, the mRNA and the guide RNA were mixed prior to formulation at a 1:1 mass ratio and stored overnight at either 4° C. (“Fresh”) or −80° C. (“Frozen”).

### Mouse Dosing and Harvesting

[0606] mRNA and sgRNA formulated in separate LNP were mixed at different mass ratios as above and injected intravenously into 7 week-old C57B16 wild type mice via the tail vein (0.1 mL per mouse) at a total RNA dose of 0.35 mg RNA per kg body weight. Co-formulated LNPs were injected similarly at the same dose. Seven days after dosing, the mice were sacrificed, and the left lateral, medial, and right lateral lobes of the liver were collected for preparation of DNA, RNA, and protein, respectively, by the same procedure as in Example 74. Terminal blood was collected by exsanguination via cardiac puncture as per the procedure of Example 74.

### Genomic DNA Preparation and Editing Analysis by NGS

[0607] Genomic DNA was prepared and analyzed by NGS as in Example 74.

### RNA Preparation and Analysis by RT-ddPCR

[0608] RNA was prepared and analyzed by RT-ddPCR as in Example 74.

[0609] The results demonstrated that the ratio between the mRNA and guide in the separately-formulated LNPs does not greatly affect the editing efficiency (FIG. 100). Although there was somewhat higher editing efficiency at the middle three ratios (1:1.5, 1:1, and 1:0.75) than at the extremes (1:2 and 1:0.5), the differences were within the variation of the experiment. The co-formulated LNPs resulted in higher editing than the separate formulations, with the fresh and frozen LNPs performing equally well. Similar to the editing efficiency, there was little difference in the amount of HAO-1 mRNA present in the livers of mice treated with separately-formulated LNPs at different MG29-1 mRNA:guide ratios (FIG. 100). HAO-1 mRNA levels in the mice treated with the co-formulated LNPs were reduced more than 50%, similar to the groups that received the separately-formulated LNPs. In conclusion, these results demonstrate that the MG29-1 mRNA and sgRNA with chemistry 50 can be co-formulated into LNP with no reduction in editing potency and that a range of mRNA to sgRNA ratios between 1:2 to 1:0.5 can be used.

### Example 76—Investigation of the Impact of Different Guide Chemistries Upon Editing Efficiency In Vivo

### Preparation of Lipid Nanoparticles

[0610] The LNP formulations used to deliver the MG29-1 mRNA and the guide RNA were prepared by the same procedure as in Example 74. Guide RNA sequences and chemistries are listed in Table 40.

### Mouse Dosing and Harvesting

[0611] mRNA and sgRNA were formulated separately into LNP then mixed at 1:1 mass ratios as in Example 74 and injected intravenously into 7 week-old C57B16 wild type mice via the tail vein (0.1 mL per mouse) at a total RNA dose of 0.25 mg RNA per kg body weight. Seven days after dosing, the mice were sacrificed, and the left lateral, medial, and right lateral lobes of the liver were collected for preparation of DNA, RNA, and protein, respectively, by the same procedure as in Example 74. Terminal blood was collected by exsanguination via cardiac puncture as per the procedure of Example 74.

### Genomic DNA Preparation and Editing Analysis by NGS

[0612] Genomic DNA was prepared and analyzed by NGS as in Example 74.

### RNA Preparation and Analysis by RT-ddPCR

[0613] RNA was prepared and analyzed by RT-ddPCR as in Example 74.

[0614] All guides designated with a “b” in the guide name (e.g. mH29-29-50b) contain 20-nt spacers. Guides mH29-29-37 and mH29-29-50 contain 22-nt spacers. Guides with chemistries 51, 52, 53, and 54 contain the same nucleotide sequence as the guide with chemistry 50 but have differences in the chemical modifications at specific regions of the guide. Chemistry 51 is identical to chemistry 50 with the exception of the removal of the 2′-fluoro modifications in the spacer. Chemistry 52 is identical to chemistry 50 with the exception of the removal of half of the 2′-flouro modifications in the spacer. Chemistry 53 is identical to chemistry 50 with the exception of an additional 21 phosphorothioate linkages and 21 2′-O methyl modifications. Chemistry 53 is identical to chemistry 50 with the exception of an additional 21 phosphorothioate linkages and 21 2′-O methyl modifications in the 5′ stem loop. Chemistry 54 is identical to chemistry 50 with the exception of an additional 21 phosphorothioate linkages and 21 2′-O methyl modifications in the 5′ stem loop and the removal of the 2′-fluoro modifications in the spacer.

[0615] The results indicate that guide RNAs with chemistry 50 (50b) and chemistry 52 (52b) had the highest editing efficiency (FIG. 101). The introduction of INDELS in the HAO-1 gene is expected to reduce the level of HAO-1 mRNA through nonsense-mediated mRNA decay, due to reading frame shifts and the resulting premature stop codons. Treatment with the 22-nt guide with chemistry 50 (mH29-29-50b) resulted in the lowest level (largest reduction) of HAO-1 mRNA, consistent with this mechanism (FIG. 101). Chemistry 51 (51b) was 2-fold less potent than chemistry 50 (50b), indicating that the 2′-fluoro modifications in the spacer contributed significantly to potency. Chemistry 52 (52b) had similar or slightly improved editing potency compared to chemistry 50 (50b), indicating that in the context of this guide spacer sequence, it was possible to remove half of the 2-fluoro modifications in the spacer without significantly reducing potency. Chemistry 53 (53b) had about 2-fold lower editing potency compared to chemistry 50 (50b), indicating that the addition of 2′-O-methyl and PS linkages in the 5′ stem-loop had a negative impact on potency, which is surprising given that these additional modifications were expected to improve guide stability. Chemistry 54 (54b) had about 4-fold lower potency compared to chemistry 50 (50b) and about 2-fold lower editing potency compared to chemistry 53 (53b), confirming that the additional 2′O-methyl and PS bases in the 5′ stem loop and the removal of the 2′-fluoro bases in the spacer both had an additive negative effect on guide potency.

### Example 77—Gene Editing Outcomes at the DNA Level for APO-A1 in Hepa1-6 Cells

[0616] Nucleofection of MG29-1 RNPs (126 pmol protein/160 pmol guide) was performed into Hepa1-6 cells (200,000) using the Lonza 4D electroporator. Cells were harvested and genomic DNA prepared five days post-transfection. PCR primers appropriate for use in NGS-based DNA sequencing were generated, optimized, and used to amplify the individual target sequences for each guide RNA. The anmplicons were sequenced on an Illumina MiSeq machine and analyzed with a proprietary Python script to measure gene editing (FIG. 102).

TABLE 43A
Sequences of Guide RNAs and Sequences Targeted for Example 77

| | SEQ | | |
|---|---|---|---|
| | ID | | |
| Type | NO | Guide Name | SEQUENCE |
| MG29-1 sgRNA | 5847 | MG29-1-mouse | /AltR1/rUrArArUrUrUrCrUrArCrUrGrUrUrGrUrArGrArUrGr |
| targeting mouse | | APO-A1- | CrUrArArUrGrUrGrUrArUrGrUrGrGrArUrGrCrGrG/AltR2/ |
| APO-A1 | | sgRNA-A1 | |
| MG29-1 sgRNA | 5848 | MG29-1-mouse | /AltR1/rUrArArUrUrUrCrUrArCrUrGrUrUrGrUrArGrArUrAr |
| targeting mouse | | APO-A1- | ArUrCrCrUrCrCrUrCrCrUrUrGrGrGrCrCrArArCrA/AltR2/ |
| APO-A1 | | sgRNA-B1 | |
| MG29-1 sgRNA | 5849 | MG29-1-mouse | /AltR1/rUrArArUrUrUrCrUrArCrUrGrUrUrGrUrArGrArUrCr |
| targeting mouse | | APO-A1- | UrUrArCrUrUrCrArGrCrUrGrUrUrGrGrCrCrCrArA/AltR2/ |
| APO-A1 | | sgRNA-C1 | |
| MG29-1 sgRNA | 5850 | MG29-1-mouse | /AltR1/rUrArArUrUrUrCrUrArCrUrGrUrUrGrUrArGrArUrAr |
| targeting mouse | | APO-A1- | CrCrGrCrArUrCrCrArCrArUrArCrArCrArUrUrArG/AltR2/ |
| APO-A1 | | sgRNA-D1 | |
| MG29-1 sgRNA | 5851 | MG29-1-mouse | /AltR1/rUrArArUrUrUrCrUrArCrUrGrUrUrGrUrArGrArUrUr |
| targeting mouse | | APO-A1- | CrCrCrArUrUrGrGrGrArCrUrGrGrGrGrUrUrCrArU/AltR2/ |
| APO-A1 | | sgRNA-E1 | |
| MG29-1 sgRNA | 5852 | MG29-1-mouse | /AltR1/rUrArArUrUrUrCrUrArCrUrGrUrUrGrUrArGrArUrGr |
| targeting mouse | | APO-A1- | CrGrArCrCrGrCrArUrGrCrGrCrArCrArCrArCrGrU/AltR2/ |
| APO-A1 | | sgRNA-F1 | |
| MG29-1 sgRNA | 5853 | MG29-1-mouse | /AltR1/rUrArArUrUrUrCrUrArCrUrGrUrUrGrUrArGrArUrUr |
| targeting mouse | | APO-A1- | CrGrCrCrArArGrUrGrUrCrUrUrCrArGrGrUrGrGrG/AltR2/ |
| APO-A1 | | sgRNA-G1 | |
| MG29-1 sgRNA | 5854 | MG29-1-mouse | /AltR1/rUrArArUrUrUrCrUrArCrUrGrUrUrGrUrArGrArUrGr |
| targeting mouse | | APO-A1- | GrCrCrCrUrGrGrUrGrUrGrGrUrArCrUrCrGrUrUrC/AltR2/ |
| APO-A1 | | sgRNA-H1 | |
| MG29-1 sgRNA | 5855 | MG29-1-mouse | /AltR1/rUrArArUrUrUrCrUrArCrUrGrUrUrGrUrArGrArUrGr |
| targeting mouse | | APO-A1- | CrCrCrUrGrGrUrGrUrGrGrUrArCrUrCrGrUrUrCrA/AltR2/ |
| APO-A1 | | sgRNA-A2 | |
| MG29-1 sgRNA | 5856 | MG29-1-mouse | /AltR1/rUrArArUrUrUrCrUrArCrUrGrUrUrGrUrArGrArUrCr |
| targeting mouse | | APO-A1- | ArUrUrUrCrUrUrCrUrGrGrArArUrUrCrGrUrCrCrA/AltR2/ |
| APO-A1 | | sgRNA-B2 | |
| MG29-1 sgRNA | 5857 | MG29-1-mouse | /AltR1/rUrArArUrUrUrCrUrArCrUrGrUrUrGrUrArGrArUrUr |
| targeting mouse | | APO-A1- | UrCrUrGrGrArArUrUrCrGrUrCrCrArGrGrUrArGrG/AltR2/ |
| APO-A1 | | sgRNA-C2 | |
| MG29-1 sgRNA | 5858 | MG29-1-mouse | /AltR1/rUrArArUrUrUrCrUrArCrUrGrUrUrGrUrArGrArUrAr |
| targeting mouse | | APO-A1- | CrUrUrCrCrUrCrUrArGrGrUrCrCrUrUrGrUrUrCrA/AltR2/ |
| APO-A1 | | sgRNA-D2 | |
| MG29-1 sgRNA | 5859 | MG29-1-mouse | /AltR1/rUrArArUrUrUrCrUrArCrUrGrUrUrGrUrArGrArUrUr |
| targeting mouse | | APO-A1- | UrUrCrUrCrCrArGrGrUrUrArUrCrCrCrArGrArArG/AltR2/ |
| APO-A1 | | sgRNA-E2 | |
| MG29-1 sgRNA | 5860 | MG29-1-mouse | /AltR1/rUrArArUrUrUrCrUrArCrUrGrUrUrGrUrArGrArUrUr |
| targeting mouse | | APO-A1- | CrCrArGrGrUrUrArUrCrCrCrArGrArArGrUrCrCrC/AltR2/ |
| APO-A1 | | sgRNA-F2 | |
| DNA Sequence of | 5861 | MG29-1-mouse | GCTAATGTGTATGTGGATGCGG |
| APO-A1 Target Site | | APO-A1-target | |
| | | site-A1 | |
| DNA Sequence of | 5862 | MG29-1-mouse | AATCCTCCTCCTTGGGCCAACA |
| APO-A1 Target Site | | APO-A1-target | |
| | | site-B1 | |
| DNA Sequence of | 5863 | MG29-1-mouse | CTTACTTCAGCTGTTGGCCCAA |
| APO-A1 Target Site | | APO-A1-target | |
| | | site-C1 | |
| DNA Sequence of | 5864 | MG29-1-mouse | ACCGCATCCACATACACATTAG |
| APO-A1 Target Site | | APO-A1-target | |
| | | site-D1 | |
| DNA Sequence of | 5865 | MG29-1-mouse | TCCCATTGGGACTGGGGTTCAT |
| APO-A1 Target Site | | APO-A1-target | |
| | | site-E1 | |
| DNA Sequence of | 5866 | MG29-1-mouse | GCGACCGCATGCGCACACACGT |
| APO-A1 Target Site | | APO-A1-target | |
| | | site-F1 | |
| DNA Sequence of | 5867 | MG29-1-mouse | TCGCCAAGTGTCTTCAGGTGGG |
| APO-A1 Target Site | | APO-A1-target | |
| | | site-G1 | |
| DNA Sequence of | 5868 | MG29-1-mouse | GGCCCTGGTGTGGTACTCGTTC |
| APO-A1 Target Site | | APO-A1-target | |
| | | site-H1 | |
| DNA Sequence of | 5869 | MG29-1-mouse | GCCCTGGTGTGGTACTCGTTCA |
| APO-A1 Target Site | | APO-A1-target | |
| | | site-A2 | |
| DNA Sequence of | 5870 | MG29-1-mouse | CATTTCTTCTGGAATTCGTCCA |
| APO-A1 Target Site | | APO-A1-target | |
| | | site-B2 | |
| DNA Sequence of | 5871 | MG29-1-mouse | TTCTGGAATTCGTCCAGGTAGG |
| APO-A1 Target Site | | APO-A1-target | |
| | | site-C2 | |
| DNA Sequence of | 5872 | MG29-1-mouse | ACTTCCTCTAGGTCCTTGTTCA |
| APO-A1 Target Site | | APO-A1-target | |
| | | site-D2 | |
| DNA Sequence of | 5873 | MG29-1-mouse | TTTCTCCAGGTTATCCCAGAAG |
| APO-A1 Target Site | | APO-A1-target | |
| | | site-E2 | |
| DNA Sequence of | 5874 | MG29-1-mouse | TCCAGGTTATCCCAGAAGTCCC |
| APO-A1 Target Site | | APO-A1-target | |
| | | site-F2 | |

r; native RNA linkage comprising the sugar ribose (for example the ribose or RNA form of the A base is written rA), d; deoxyribose sugar (DNA) linkage (for example a deoxyribose form of the A base is written dA), *; between bases in which one of the oxygen molecules in the phosphodiester bond is replaced with sulfur; AltR1 and AltR2 refer to IDT technologies' proprietary 5′ and 3′ AltR modifications

### Example 78—Gene editing outcomes at the DNA level for ANGPTL3 in Hepa1-6 Cells

[0617] Nucleofection of MG29-1 RNPs (126 pmol protein/160 pmol guide) was performed into Hepa1-6 cells (200,000) using the Lonza 4D electroporator. Cells were harvested and genomic DNA prepared five days post-transfection. PCR primers appropriate for use in NGS-based DNA sequencing were generated, optimized, and used to amplify the individual target sequences for each guide RNA. The amplicons were sequenced on an Illumina MiSeq machine and analyzed with a proprietary Python script to measure gene editing (FIG. 103).

TABLE 43B
Sequences of Guide RNAs and Sequences Targeted for Example 78

| | SEQ | | |
|---|---|---|---|
| | ID | | |
| Type | NO | Guide Name | SEQUENCE |
| MG29-1 | 5875 | MG29-1-mouse | /AltR1/rUrArArUrUrUrCrUrArCrUrGrUrUrGrUrArGrArUrUrGrUrUr |
| sgRNA | | ANGPTL3- | GrUrUrCrCrUrUrUrArGrUrArArUrUrGrCrA/AltR2/ |
| targeting | | sgRNA-A1 | |
| mouse | | | |
| ANGPTL3 | | | |
| MG29-1 | 5876 | MG29-1-mouse | /AltR1/rUrArArUrUrUrCrUrArCrUrGrUrUrGrUrArGrArUrGrUrUrGr |
| sgRNA | | ANGPTL3- | UrUrCrCrUrUrUrArGrUrArArUrUrGrCrArU/AltR2/ |
| targeting | | sgRNA-B1 | |
| mouse | | | |
| ANGPTL3 | | | |
| MG29-1 | 5877 | MG29-1-mouse | /AltR1/rUrArArUrUrUrCrUrArCrUrGrUrUrGrUrArGrArUrUrUrGrUr |
| sgRNA | | ANGPTL3- | UrCrCrUrUrUrArGrUrArArUrUrGrCrArUrC/AltR2/ |
| targeting | | sgRNA-C1 | |
| mouse | | | |
| ANGPTL3 | | | |
| MG29-1 | 5878 | MG29-1-mouse | /AltR1/rUrArArUrUrUrCrUrArCrUrGrUrUrGrUrArGrArUrGrUrArAr |
| sgRNA | | ANGPTL3- | UrUrGrCrArUrCrCrArGrArGrUrGrGrArUrC/AltR2/ |
| targeting | | sgRNA-D1 | |
| mouse | | | |
| ANGPTL3 | | | |
| MG29-1 | 5879 | MG29-1-mouse | /AltR1/rUrArArUrUrUrCrUrArCrUrGrUrUrGrUrArGrArUrArUrCrAr |
| sgRNA | | ANGPTL3- | UrUrUrGrArUrUrCrUrGrCrArCrCrUrUrCrA/AltR2/ |
| targeting | | sgRNA-E1 | |
| mouse | | | |
| ANGPTL3 | | | |
| MG29-1 | 5880 | MG29-1-mouse | /AltR1/rUrArArUrUrUrCrUrArCrUrGrUrUrGrUrArGrArUrArUrUrCr |
| sgRNA | | ANGPTL3- | UrGrCrArCrCrUrUrCrArGrArGrCrCrArArA/AltR2/ |
| targeting | | sgRNA-F1 | |
| mouse | | | |
| ANGPTL3 | | | |
| MG29-1 | 5881 | MG29-1-mouse | /AltR1/rUrArArUrUrUrCrUrArCrUrGrUrUrGrUrArGrArUrCrUrArUr |
| sgRNA | | ANGPTL3- | GrUrUrGrGrArUrGrArUrGrUrCrArArArArU/AltR2/ |
| targeting | | sgRNA-G1 | |
| mouse | | | |
| ANGPTL3 | | | |
| MG29-1 | 5882 | MG29-1-mouse | /AltR1/rUrArArUrUrUrCrUrArCrUrGrUrUrGrUrArGrArUrArGrCrGr |
| sgRNA | | ANGPTL3- | ArArUrGrGrCrCrUrCrCrUrGrCrArGrCrUrG/AltR2/ |
| targeting | | sgRNA-H1 | |
| mouse | | | |
| ANGPTL3 | | | |
| MG29-1 | 5883 | MG29-1-mouse | /AltR1/rUrArArUrUrUrCrUrArCrUrGrUrUrGrUrArGrArUrGrCrGrAr |
| sgRNA | | ANGPTL3- | ArUrGrGrCrCrUrCrCrUrGrCrArGrCrUrGrG/AltR2/ |
| targeting | | sgRNA-A2 | |
| mouse | | | |
| ANGPTL3 | | | |
| MG29-1 | 5884 | MG29-1-mouse | /AltR1/rUrArArUrUrUrCrUrArCrUrGrUrUrGrUrArGrArUrGrUrCrCr |
| sgRNA | | ANGPTL3- | ArUrArArGrArCrUrArArGrGrGrArCrArArA/AltR2/ |
| targeting | | sgRNA-B2 | |
| mouse | | | |
| ANGPTL3 | | | |
| MG29-1 | 5885 | MG29-1-mouse | /AltR1/rUrArArUrUrUrCrUrArCrUrGrUrUrGrUrArGrArUrUrCrCrAr |
| sgRNA | | ANGPTL3- | UrArArGrArCrUrArArGrGrGrArCrArArArU/AltR2/ |
| targeting | | sgRNA-C2 | |
| mouse | | | |
| ANGPTL3 | | | |
| MG29-1 | 5886 | MG29-1-mouse | /AltR1/rUrArArUrUrUrCrUrArCrUrGrUrUrGrUrArGrArUrArGrArAr |
| sgRNA | | ANGPTL3- | GrCrUrCrArArCrArUrArUrUrUrGrArUrCrA/AltR2/ |
| targeting | | sgRNA-D2 | |
| mouse | | | |
| ANGPTL3 | | | |
| MG29-1 | 5887 | MG29-1-mouse | /AltR1/rUrArArUrUrUrCrUrArCrUrGrUrUrGrUrArGrArUrArUrCrAr |
| sgRNA | | ANGPTL3- | GrUrCrUrUrUrUrUrArUrGrArCrCrUrArUrC/AltR2/ |
| targeting | | sgRNA-E2 | |
| mouse | | | |
| ANGPTL3 | | | |
| MG29-1 | 5888 | MG29-1-mouse | /AltR1/rUrArArUrUrUrCrUrArCrUrGrUrUrGrUrArGrArUrUrArUrGr |
| sgRNA | | ANGPTL3- | ArCrCrUrArUrCrArCrUrUrCrGrArArCrCrA/AltR2/ |
| targeting | | sgRNA-F2 | |
| mouse | | | |
| ANGPTL3 | | | |
| MG29-1 | 5889 | MG29-1-mouse | /AltR1/rUrArArUrUrUrCrUrArCrUrGrUrUrGrUrArGrArUrArUrGrAr |
| sgRNA | | ANGPTL3- | CrCrUrArUrCrArCrUrUrCrGrArArCrCrArA/AltR2/ |
| targeting | | sgRNA-G2 | |
| mouse | | | |
| ANGPTL3 | | | |
| MG29-1 | 5890 | MG29-1-mouse | /AltR1/rUrArArUrUrUrCrUrArCrUrGrUrUrGrUrArGrArUrUrGrArCr |
| sgRNA | | ANGPTL3- | CrUrArUrCrArCrUrUrCrGrArArCrCrArArU/AltR2/ |
| targeting | | sgRNA-H2 | |
| mouse | | | |
| ANGPTL3 | | | |
| MG29-1 | 5891 | MG29-1-mouse | /AltR1/rUrArArUrUrUrCrUrArCrUrGrUrUrGrUrArGrArUrGrArGrGr |
| sgRNA | | ANGPTL3- | ArGrCrArGrCrUrArArCrCrArArCrUrUrArA/AltR2/ |
| targeting | | sgRNA-A3 | |
| mouse | | | |
| ANGPTL3 | | | |
| MG29-1 | 5892 | MG29-1-mouse | /AltR1/rUrArArUrUrUrCrUrArCrUrGrUrUrGrUrArGrArUrUrArCrUr |
| sgRNA | | ANGPTL3- | UrArCrUrUrUrGrArGrUrGrArUrGrUrUrArC/AltR2/ |
| targeting | | sgRNA-B3 | |
| mouse | | | |
| ANGPTL3 | | | |
| MG29-1 | 5893 | MG29-1-mouse | /AltR1/rUrArArUrUrUrCrUrArCrUrGrUrUrGrUrArGrArUrArGrUrGr |
| sgRNA | | ANGPTL3- | ArUrGrUrUrArCrUrUrCrUrGrGrGrUrGrCrU/AltR2/ |
| targeting | | sgRNA-C3 | |
| mouse | | | |
| ANGPTL3 | | | |
| MG29-1 | 5894 | MG29-1-mouse | /AltR1/rUrArArUrUrUrCrUrArCrUrGrUrUrGrUrArGrArUrArGrUrUr |
| sgRNA | | ANGPTL3- | CrArGrUrUrCrUrArCrUrGrArCrArUrGrUrU/AltR2/ |
| targeting | | sgRNA-D3 | |
| mouse | | | |
| ANGPTL3 | | | |
| MG29-1 | 5895 | MG29-1-mouse | /AltR1/rUrArArUrUrUrCrUrArCrUrGrUrUrGrUrArGrArUrUrArArCr |
| sgRNA | | ANGPTL3- | UrUrGrUrArGrUrGrUrArGrArUrGrUrArGrU/AltR2/ |
| targeting | | sgRNA-E3 | |
| mouse | | | |
| ANGPTL3 | | | |
| MG29-1 | 5896 | MG29-1-mouse | /AltR1/rUrArArUrUrUrCrUrArCrUrGrUrUrGrUrArGrArUrArArCrUr |
| sgRNA | | ANGPTL3- | UrGrUrArGrUrGrUrArGrArUrGrUrArGrUrU/AltR2/ |
| targeting | | sgRNA-F3 | |
| mouse | | | |
| ANGPTL3 | | | |
| MG29-1 | 5897 | MG29-1-mouse | /AltR1/rUrArArUrUrUrCrUrArCrUrGrUrUrGrUrArGrArUrArCrUrUr |
| sgRNA | | ANGPTL3- | GrUrArGrUrGrUrArGrArUrGrUrArGrUrUrC/AltR2/ |
| targeting | | sgRNA-G3 | |
| mouse | | | |
| ANGPTL3 | | | |
| MG29-1 | 5898 | MG29-1-mouse | /AltR1/rUrArArUrUrUrCrUrArCrUrGrUrUrGrUrArGrArUrCrCrUrCr |
| sgRNA | | ANGPTL3- | UrUrCrUrUrUrGrArUrUrUrCrArUrUrGrGrU/AltR2/ |
| targeting | | sgRNA-H3 | |
| mouse | | | |
| ANGPTL3 | | | |
| MG29-1 | 5899 | MG29-1-mouse | /AltR1/rUrArArUrUrUrCrUrArCrUrGrUrUrGrUrArGrArUrCrUrCrUr |
| sgRNA | | ANGPTL3- | UrCrUrUrUrGrArUrUrUrCrArUrUrGrGrUrU/AltR2/ |
| targeting | | sgRNA-A4 | |
| mouse | | | |
| ANGPTL3 | | | |
| MG29-1 | 5900 | MG29-1-mouse | /AltR1/rUrArArUrUrUrCrUrArCrUrGrUrUrGrUrArGrArUrArUrUrUr |
| sgRNA | | ANGPTL3- | CrArUrUrGrGrUrUrCrGrArArGrUrGrArUrA/AltR2/ |
| targeting | | sgRNA-B4 | |
| mouse | | | |
| ANGPTL3 | | | |
| MG29-1 | 5901 | MG29-1-mouse | /AltR1/rUrArArUrUrUrCrUrArCrUrGrUrUrGrUrArGrArUrArUrUrGr |
| sgRNA | | ANGPTL3- | GrUrUrCrGrArArGrUrGrArUrArGrGrUrCrA/AltR2/ |
| targeting | | sgRNA-C4 | |
| mouse | | | |
| ANGPTL3 | | | |
| MG29-1 | 5902 | MG29-1-mouse | /AltR1/rUrArArUrUrUrCrUrArCrUrGrUrUrGrUrArGrArUrUrCrCrCr |
| sgRNA | | ANGPTL3- | UrUrArGrUrCrUrUrArUrGrGrArCrArArArA/AltR2/ |
| targeting | | sgRNA-D4 | |
| mouse | | | |
| ANGPTL3 | | | |
| MG29-1 | 5903 | MG29-1-mouse | /AltR1/rUrArArUrUrUrCrUrArCrUrGrUrUrGrUrArGrArUrArGrUrCr |
| sgRNA | | ANGPTL3- | CrArUrGrArCrCrCrArGrCrUrGrCrArGrGrA/AltR2/ |
| targeting | | sgRNA-E4 | |
| mouse | | | |
| ANGPTL3 | | | |
| MG29-1 | 5904 | MG29-1-mouse | /AltR1/rUrArArUrUrUrCrUrArCrUrGrUrUrGrUrArGrArUrGrArCrAr |
| sgRNA | | ANGPTL3- | UrCrArUrCrCrArArCrArUrArGrCrArArArU/AltR2/ |
| targeting | | sgRNA-F4 | |
| mouse | | | |
| ANGPTL3 | | | |
| MG29-1 | 5905 | MG29-1-mouse | /AltR1/rUrArArUrUrUrCrUrArCrUrGrUrUrGrUrArGrArUrArCrArUr |
| sgRNA | | ANGPTL3- | CrArUrCrCrArArCrArUrArGrCrArArArUrC/AltR2/ |
| targeting | | sgRNA-G4 | |
| mouse | | | |
| ANGPTL3 | | | |
| MG29-1 | 5906 | MG29-1-mouse | /AltR1/rUrArArUrUrUrCrUrArCrUrGrUrUrGrUrArGrArUrGrGrCrUr |
| sgRNA | | ANGPTL3- | CrUrGrArArGrGrUrGrCrArGrArArUrCrArA/AltR2/ |
| targeting | | sgRNA-H4 | |
| mouse | | | |
| ANGPTL3 | | | |
| MG29-1 | 5907 | MG29-1-mouse | /AltR1/rUrArArUrUrUrCrUrArCrUrGrUrUrGrUrArGrArUrGrCrUrCr |
| sgRNA | | ANGPTL3- | UrGrArArGrGrUrGrCrArGrArArUrCrArArA/AltR2/ |
| targeting | | sgRNA-A5 | |
| mouse | | | |
| ANGPTL3 | | | |
| MG29-1 | 5908 | MG29-1-mouse | /AltR1/rUrArArUrUrUrCrUrArCrUrGrUrUrGrUrArGrArUrGrUrArGr |
| sgRNA | | ANGPTL3- | ArArCrArGrCrArArGrArCrArArCrArGrCrA/AltR2/ |
| targeting | | sgRNA-B5 | |
| mouse | | | |
| ANGPTL3 | | | |
| MG29-1 | 5909 | MG29-1-mouse | /AltR1/rUrArArUrUrUrCrUrArCrUrGrUrUrGrUrArGrArUrUrArGrAr |
| sgRNA | | ANGPTL3- | ArCrArGrCrArArGrArCrArArCrArGrCrArU/AltR2/ |
| targeting | | sgRNA-C5 | |
| mouse | | | |
| ANGPTL3 | | | |
| MG29-1 | 5910 | MG29-1-mouse | /AltR1/rUrArArUrUrUrCrUrArCrUrGrUrUrGrUrArGrArUrCrUrArUr |
| sgRNA | | ANGPTL3- | UrUrCrUrUrUrUrArUrCrUrGrCrArUrGrUrG/AltR2/ |
| targeting | | sgRNA-D5 | |
| mouse | | | |
| ANGPTL3 | | | |
| MG29-1 | 5911 | MG29-1-mouse | /AltR1/rUrArArUrUrUrCrUrArCrUrGrUrUrGrUrArGrArUrUrArUrUr |
| sgRNA | | ANGPTL3- | UrCrUrUrUrUrArUrCrUrGrCrArUrGrUrGrC/AltR2/ |
| targeting | | sgRNA-E5 | |
| mouse | | | |
| ANGPTL3 | | | |
| MG29-1 | 5912 | MG29-1-mouse | /AltR1/rUrArArUrUrUrCrUrArCrUrGrUrUrGrUrArGrArUrUrUrUrUr |
| sgRNA | | ANGPTL3- | ArUrCrUrGrCrArUrGrUrGrCrUrGrUrUrGrA/AltR2/ |
| targeting | | sgRNA-F5 | |
| mouse | | | |
| ANGPTL3 | | | |
| MG29-1 | 5913 | MG29-1-mouse | /AltR1/rUrArArUrUrUrCrUrArCrUrGrUrUrGrUrArGrArUrArUrCrUr |
| sgRNA | | ANGPTL3- | GrCrArUrGrUrGrCrUrGrUrUrGrArCrUrUrA/AltR2/ |
| targeting | | sgRNA-G5 | |
| mouse | | | |
| ANGPTL3 | | | |
| MG29-1 | 5914 | MG29-1-mouse | /AltR1/rUrArArUrUrUrCrUrArCrUrGrUrUrGrUrArGrArUrUrCrUrGr |
| sgRNA | | ANGPTL3- | CrArUrGrUrGrCrUrGrUrUrGrArCrUrUrArA/AltR2/ |
| targeting | | sgRNA-H5 | |
| mouse | | | |
| ANGPTL3 | | | |
| MG29-1 | 5915 | MG29-1-mouse | /AltR1/rUrArArUrUrUrCrUrArCrUrGrUrUrGrUrArGrArUrUrArCrUr |
| sgRNA | | ANGPTL3- | GrUrUrCrUrUrCrCrArCrArCrUrCrUrGrGrA/AltR2/ |
| targeting | | sgRNA-A6 | |
| mouse | | | |
| ANGPTL3 | | | |
| MG29-1 | 5916 | MG29-1-mouse | /AltR1/rUrArArUrUrUrCrUrArCrUrGrUrUrGrUrArGrArUrUrArUrUr |
| sgRNA | | ANGPTL3- | CrUrUrUrUrArUrCrArGrCrUrCrArGrArArA/AltR2/ |
| targeting | | sgRNA-B6 | |
| mouse | | | |
| ANGPTL3 | | | |
| MG29-1 | 5917 | MG29-1-mouse | /AltR1/rUrArArUrUrUrCrUrArCrUrGrUrUrGrUrArGrArUrArUrCrAr |
| sgRNA | | ANGPTL3- | GrCrUrCrArGrArArArGrArCrUrGrGrUrArU/AltR2/ |
| targeting | | sgRNA-C6 | |
| mouse | | | |
| ANGPTL3 | | | |
| MG29-1 | 5918 | MG29-1-mouse | /AltR1/rUrArArUrUrUrCrUrArCrUrGrUrUrGrUrArGrArUrUrCrArGr |
| sgRNA | | ANGPTL3- | CrUrCrArGrArArArGrArCrUrGrGrUrArUrU/AltR2/ |
| targeting | | sgRNA-D6 | |
| mouse | | | |
| ANGPTL3 | | | |
| MG29-1 | 5919 | MG29-1-mouse | /AltR1/rUrArArUrUrUrCrUrArCrUrGrUrUrGrUrArGrArUrUrUrCrUr |
| sgRNA | | ANGPTL3- | ArArArUrCrArArGrArGrCrArCrCrArArGrA/AltR2/ |
| targeting | | sgRNA-E6 | |
| mouse | | | |
| ANGPTL3 | | | |
| MG29-1 | 5920 | MG29-1-mouse | /AltR1/rUrArArUrUrUrCrUrArCrUrGrUrUrGrUrArGrArUrCrUrGrUr |
| sgRNA | | ANGPTL3- | UrUrCrGrUrUrCrArGrUrUrGrArArGrArGrG/AltR2/ |
| targeting | | sgRNA-F6 | |
| mouse | | | |
| ANGPTL3 | | | |
| MG29-1 | 5921 | MG29-1-mouse | /AltR1/rUrArArUrUrUrCrUrArCrUrGrUrUrGrUrArGrArUrUrGrUrUr |
| sgRNA | | ANGPTL3- | UrCrGrUrUrCrArGrUrUrGrArArGrArGrGrG/AltR2/ |
| targeting | | sgRNA-G6 | |
| mouse | | | |
| ANGPTL3 | | | |
| MG29-1 | 5922 | MG29-1-mouse | /AltR1/rUrArArUrUrUrCrUrArCrUrGrUrUrGrUrArGrArUrGrUrUrCr |
| sgRNA | | ANGPTL3- | ArGrUrUrGrArArGrArGrGrGrGrGrArGrUrA/AltR2/ |
| targeting | | sgRNA-H6 | |
| mouse | | | |
| ANGPTL3 | | | |
| MG29-1 | 5923 | MG29-1-mouse | /AltR1/rUrArArUrUrUrCrUrArCrUrGrUrUrGrUrArGrArUrGrArArGr |
| sgRNA | | ANGPTL3- | ArArArGrArGrArArUrUrUrUrCrUrGrArGrG/AltR2/ |
| targeting | | sgRNA-A7 | |
| mouse | | | |
| ANGPTL3 | | | |
| MG29-1 | 5924 | MG29-1-mouse | /AltR1/rUrArArUrUrUrCrUrArCrUrGrUrUrGrUrArGrArUrCrUrGrAr |
| sgRNA | | ANGPTL3- | GrGrGrUrUrCrUrUrGrArArUrArCrCrArGrU/AltR2/ |
| targeting | | sgRNA-B7 | |
| mouse | | | |
| ANGPTL3 | | | |
| MG29-1 | 5925 | MG29-1-mouse | /AltR1/rUrArArUrUrUrCrUrArCrUrGrUrUrGrUrArGrArUrUrGrArGr |
| sgRNA | | ANGPTL3- | GrGrUrUrCrUrUrGrArArUrArCrCrArGrUrC/AltR2/ |
| targeting | | sgRNA-C7 | |
| mouse | | | |
| ANGPTL3 | | | |
| MG29-1 | 5926 | MG29-1-mouse | /AltR1/rUrArArUrUrUrCrUrArCrUrGrUrUrGrUrArGrArUrUrArArCr |
| sgRNA | | ANGPTL3- | ArGrArGrGrCrGrArArCrArUrArCrArArGrU/AltR2/ |
| targeting | | sgRNA-D7 | |
| mouse | | | |
| ANGPTL3 | | | |
| MG29-1 | 5927 | MG29-1-mouse | /AltR1/rUrArArUrUrUrCrUrArCrUrGrUrUrGrUrArGrArUrArUrGrUr |
| sgRNA | | ANGPTL3- | CrUrArCrUrGrUrGrArUrArCrCrCrArArUrC/AltR2/ |
| targeting | | sgRNA-E7 | |
| mouse | | | |
| ANGPTL3 | | | |
| MG29-1 | 5928 | MG29-1-mouse | /AltR1/rUrArArUrUrUrCrUrArCrUrGrUrUrGrUrArGrArUrCrArUrGr |
| sgRNA | | ANGPTL3- | GrGrUrUrUrArCrCrUrGrArUrUrGrGrGrUrA/AltR2/ |
| targeting | | sgRNA-F7 | |
| mouse | | | |
| ANGPTL3 | | | |
| MG29-1 | 5929 | MG29-1-mouse | /AltR1/rUrArArUrUrUrCrUrArCrUrGrUrUrGrUrArGrArUrCrCrUrGr |
| sgRNA | | ANGPTL3- | ArUrUrGrGrGrUrArUrCrArCrArGrUrArGrA/AltR2/ |
| targeting | | sgRNA-G7 | |
| mouse | | | |
| ANGPTL3 | | | |
| MG29-1 | 5930 | MG29-1-mouse | /AltR1/rUrArArUrUrUrCrUrArCrUrGrUrUrGrUrArGrArUrUrUrGrGr |
| sgRNA | | ANGPTL3- | UrUrUrArArUrArGrUrGrUrArCrArCrGrCrC/AltR2/ |
| targeting | | sgRNA-H7 | |
| mouse | | | |
| ANGPTL3 | | | |
| MG29-1 | 5931 | MG29-1-mouse | /AltR1/rUrArArUrUrUrCrUrArCrUrGrUrUrGrUrArGrArUrArUrArGr |
| sgRNA | | ANGPTL3- | UrGrUrArCrArCrGrCrCrArCrUrUrGrUrArU/AltR2/ |
| targeting | | sgRNA-A8 | |
| mouse | | | |
| ANGPTL3 | | | |
| MG29-1 | 5932 | MG29-1-mouse | /AltR1/rUrArArUrUrUrCrUrArCrUrGrUrUrGrUrArGrArUrCrCrArUr |
| sgRNA | | ANGPTL3- | CrGrArGrCrCrUrCrCrCrArArArGrCrCrCrU/AltR2/ |
| targeting | | sgRNA-B8 | |
| mouse | | | |
| ANGPTL3 | | | |
| MG29-1 | 5933 | MG29-1-mouse | /AltR1/rUrArArUrUrUrCrUrArCrUrGrUrUrGrUrArGrArUrCrGrUrAr |
| sgRNA | | ANGPTL3- | GrUrUrUrUrCrCrCrArUrGrUrUrUrCrGrUrU/AltR2/ |
| targeting | | sgRNA-C8 | |
| mouse | | | |
| ANGPTL3 | | | |
| MG29-1 | 5934 | MG29-1-mouse | /AltR1/rUrArArUrUrUrCrUrArCrUrGrUrUrGrUrArGrArUrGrUrArGr |
| sgRNA | | ANGPTL3- | UrUrUrUrCrCrCrArUrGrUrUrUrCrGrUrUrG/AltR2/ |
| targeting | | sgRNA-D8 | |
| mouse | | | |
| ANGPTL3 | | | |
| MG29-1 | 5935 | MG29-1-mouse | /AltR1/rUrArArUrUrUrCrUrArCrUrGrUrUrGrUrArGrArUrCrCrCrAr |
| sgRNA | | ANGPTL3- | UrGrUrUrUrCrGrUrUrGrArArGrUrCrCrUrG/AltR2/ |
| targeting | | sgRNA-E8 | |
| mouse | | | |
| ANGPTL3 | | | |
| MG29-1 | 5936 | MG29-1-mouse | /AltR1/rUrArArUrUrUrCrUrArCrUrGrUrUrGrUrArGrArUrCrCrArUr |
| sgRNA | | ANGPTL3- | GrUrUrUrCrGrUrUrGrArArGrUrCrCrUrGrU/AltR2/ |
| targeting | | sgRNA-F8 | |
| mouse | | | |
| ANGPTL3 | | | |
| MG29-1 | 5937 | MG29-1-mouse | /AltR1/rUrArArUrUrUrCrUrArCrUrGrUrUrGrUrArGrArUrGrUrUrGr |
| sgRNA | | ANGPTL3- | ArArGrUrCrCrUrGrUrGrArGrCrCrArUrCrU/AltR2/ |
| targeting | | sgRNA-G8 | |
| mouse | | | |
| ANGPTL3 | | | |
| MG29-1 | 5938 | MG29-1-mouse | /AltR1/rUrArArUrUrUrCrUrArCrUrGrUrUrGrUrArGrArUrCrGrGrUr |
| sgRNA | | ANGPTL3- | GrUrUrGrArArUrUrArArUrGrUrCrCrArUrG/AltR2/ |
| targeting | | sgRNA-H8 | |
| mouse | | | |
| ANGPTL3 | | | |
| MG29-1 | 5939 | MG29-1-mouse | /AltR1/rUrArArUrUrUrCrUrArCrUrGrUrUrGrUrArGrArUrCrCrCrUr |
| sgRNA | | ANGPTL3- | CrUrArArCrUrUrUrUrUrUrCrUrUrUrArGrG/AltR2/ |
| targeting | | sgRNA-A9 | |
| mouse | | | |
| ANGPTL3 | | | |
| MG29-1 | 5940 | MG29-1-mouse | /AltR1/rUrArArUrUrUrCrUrArCrUrGrUrUrGrUrArGrArUrCrCrUrCr |
| sgRNA | | ANGPTL3- | UrArArCrUrUrUrUrUrUrCrUrUrUrArGrGrA/AltR2/ |
| targeting | | sgRNA-B9 | |
| mouse | | | |
| ANGPTL3 | | | |
| MG29-1 | 5941 | MG29-1-mouse | /AltR1/rUrArArUrUrUrCrUrArCrUrGrUrUrGrUrArGrArUrUrUrCrUr |
| sgRNA | | ANGPTL3- | UrUrArGrGrArGrArArUrUrUrUrGrGrUrUrG/AltR2/ |
| targeting | | sgRNA-C9 | |
| mouse | | | |
| ANGPTL3 | | | |
| MG29-1 | 5942 | MG29-1-mouse | /AltR1/rUrArArUrUrUrCrUrArCrUrGrUrUrGrUrArGrArUrUrCrUrUr |
| sgRNA | | ANGPTL3- | UrArGrGrArGrArArUrUrUrUrGrGrUrUrGrG/AltR2/ |
| targeting | | sgRNA-D9 | |
| mouse | | | |
| ANGPTL3 | | | |
| MG29-1 | 5943 | MG29-1-mouse | /AltR1/rUrArArUrUrUrCrUrArCrUrGrUrUrGrUrArGrArUrCrUrUrUr |
| sgRNA | | ANGPTL3- | ArGrGrArGrArArUrUrUrUrGrGrUrUrGrGrG/AltR2/ |
| targeting | | sgRNA-E9 | |
| mouse | | | |
| ANGPTL3 | | | |
| MG29-1 | 5944 | MG29-1-mouse | /AltR1/rUrArArUrUrUrCrUrArCrUrGrUrUrGrUrArGrArUrUrUrUrAr |
| sgRNA | | ANGPTL3- | GrGrArGrArArUrUrUrUrGrGrUrUrGrGrGrC/AltR2/ |
| targeting | | sgRNA-F9 | |
| mouse | | | |
| ANGPTL3 | | | |
| MG29-1 | 5945 | MG29-1-mouse | /AltR1/rUrArArUrUrUrCrUrArCrUrGrUrUrGrUrArGrArUrGrGrArGr |
| sgRNA | | ANGPTL3- | ArArUrUrUrUrGrGrUrUrGrGrGrCrCrUrArG/AltR2/ |
| targeting | | sgRNA-G9 | |
| mouse | | | |
| ANGPTL3 | | | |
| MG29-1 | 5946 | MG29-1-mouse | /AltR1/rUrArArUrUrUrCrUrArCrUrGrUrUrGrUrArGrArUrGrGrUrUr |
| sgRNA | | ANGPTL3- | GrGrGrCrCrUrArGrArGrArArGrArUrCrUrA/AltR2/ |
| targeting | | sgRNA-H9 | |
| mouse | | | |
| ANGPTL3 | | | |
| MG29-1 | 5947 | MG29-1-mouse | /AltR1/rUrArArUrUrUrCrUrArCrUrGrUrUrGrUrArGrArUrGrUrUrGr |
| sgRNA | | ANGPTL3- | GrGrCrCrUrArGrArGrArArGrArUrCrUrArU/AltR2/ |
| targeting | | sgRNA-A10 | |
| mouse | | | |
| ANGPTL3 | | | |
| MG29-1 | 5948 | MG29-1-mouse | /AltR1/rUrArArUrUrUrCrUrArCrUrGrUrUrGrUrArGrArUrArCrGrAr |
| sgRNA | | ANGPTL3- | CrUrCrGrArGrCrUrArCrArArGrArCrUrGrG/AltR2/ |
| targeting | | sgRNA-B10 | |
| mouse | | | |
| ANGPTL3 | | | |
| MG29-1 | 5949 | MG29-1-mouse | /AltR1/rUrArArUrUrUrCrUrArCrUrGrUrUrGrUrArGrArUrCrGrArCr |
| sgRNA | | ANGPTL3- | UrCrGrArGrCrUrArCrArArGrArCrUrGrGrA/AltR2/ |
| targeting | | sgRNA-C10 | |
| mouse | | | |
| ANGPTL3 | | | |
| MG29-1 | 5950 | MG29-1-mouse | /AltR1/rUrArArUrUrUrCrUrArCrUrGrUrUrGrUrArGrArUrArCrCrUr |
| sgRNA | | ANGPTL3- | GrGrGrCrArGrUrCrArCrGrArArArCrCrArA/AltR2/ |
| targeting | | sgRNA-D10 | |
| mouse | | | |
| ANGPTL3 | | | |
| MG29-1 | 5951 | MG29-1-mouse | /AltR1/rUrArArUrUrUrCrUrArCrUrGrUrUrGrUrArGrArUrGrUrGrAr |
| sgRNA | | ANGPTL3- | CrUrGrCrCrCrArGrGrUrGrArArArGrGrArG/AltR2/ |
| targeting | | sgRNA-E10 | |
| mouse | | | |
| ANGPTL3 | | | |
| MG29-1 | 5952 | MG29-1-mouse | /AltR1/rUrArArUrUrUrCrUrArCrUrGrUrUrGrUrArGrArUrCrArGrUr |
| sgRNA | | ANGPTL3- | CrUrUrGrUrArGrCrUrCrGrArGrUrCrGrUrA/AltR2/ |
| targeting | | sgRNA-F10 | |
| mouse | | | |
| ANGPTL3 | | | |
| DNA | 5953 | MG29-1-mouse | TGTTGTTCCTTTAGTAATTGCA |
| Sequence | | ANGPTL3- | |
| of | | target site-A1 | |
| ANGPTL3 | | | |
| Target Site | | | |
| DNA | 5954 | MG29-1-mouse | GTTGTTCCTTTAGTAATTGCAT |
| Sequence | | ANGPTL3- | |
| of | | target site-B1 | |
| ANGPTL3 | | | |
| Target Site | | | |
| DNA | 5955 | MG29-1-mouse | TTGTTCCTTTAGTAATTGCATC |
| Sequence | | ANGPTL3- | |
| of | | target site-C1 | |
| ANGPTL3 | | | |
| Target Site | | | |
| DNA | 5956 | MG29-1-mouse | GTAATTGCATCCAGAGTGGATC |
| Sequence | | ANGPTL3- | |
| of | | target site-D1 | |
| ANGPTL3 | | | |
| Target Site | | | |
| DNA | 5957 | MG29-1-mouse | ATCATTTGATTCTGCACCTTCA |
| Sequence | | ANGPTL3- | |
| of | | target site-E1 | |
| ANGPTL3 | | | |
| Target Site | | | |
| DNA | 5958 | MG29-1-mouse | ATTCTGCACCTTCAGAGCCAAA |
| Sequence | | ANGPTL3- | |
| of | | target site-F1 | |
| ANGPTL3 | | | |
| Target Site | | | |
| DNA | 5959 | MG29-1-mouse | CTATGTTGGATGATGTCAAAAT |
| Sequence | | ANGPTL3- | |
| of | | target site-G1 | |
| ANGPTL3 | | | |
| Target Site | | | |
| DNA | 5960 | MG29-1-mouse | AGCGAATGGCCTCCTGCAGCTG |
| Sequence | | ANGPTL3- | |
| of | | target site-H1 | |
| ANGPTL3 | | | |
| Target Site | | | |
| DNA | 5961 | MG29-1-mouse | GCGAATGGCCTCCTGCAGCTGG |
| Sequence | | ANGPTL3- | |
| of | | target site-A2 | |
| ANGPTL3 | | | |
| Target Site | | | |
| DNA | 5962 | MG29-1-mouse | GTCCATAAGACTAAGGGACAAA |
| Sequence | | ANGPTL3- | |
| of | | target site-B2 | |
| ANGPTL3 | | | |
| Target Site | | | |
| DNA | 5963 | MG29-1-mouse | TCCATAAGACTAAGGGACAAAT |
| Sequence | | ANGPTL3- | |
| of | | target site-C2 | |
| ANGPTL3 | | | |
| Target Site | | | |
| DNA | 5964 | MG29-1-mouse | AGAAGCTCAACATATTTGATCA |
| Sequence | | ANGPTL3- | |
| of | | target site-D2 | |
| ANGPTL3 | | | |
| Target Site | | | |
| DNA | 5965 | MG29-1-mouse | ATCAGTCTTTTTATGACCTATC |
| Sequence | | ANGPTL3- | |
| of | | target site-E2 | |
| ANGPTL3 | | | |
| Target Site | | | |
| DNA | 5966 | MG29-1-mouse | TATGACCTATCACTTCGAACCA |
| Sequence | | ANGPTL3- | |
| of | | target site-F2 | |
| ANGPTL3 | | | |
| Target Site | | | |
| DNA | 5967 | MG29-1-mouse | ATGACCTATCACTTCGAACCAA |
| Sequence | | ANGPTL3- | |
| of | | target site-G2 | |
| ANGPTL3 | | | |
| Target Site | | | |
| DNA | 5968 | MG29-1-mouse | TGACCTATCACTTCGAACCAAT |
| Sequence | | ANGPTL3- | |
| of | | target site-H2 | |
| ANGPTL3 | | | |
| Target Site | | | |
| DNA | 5969 | MG29-1-mouse | GAGGAGCAGCTAACCAACTTAA |
| Sequence | | ANGPTL3- | |
| of | | target site-A3 | |
| ANGPTL3 | | | |
| Target Site | | | |
| DNA | 5970 | MG29-1-mouse | TACTTACTTTGAGTGATGTTAC |
| Sequence | | ANGPTL3- | |
| of | | target site-B3 | |
| ANGPTL3 | | | |
| Target Site | | | |
| DNA | 5971 | MG29-1-mouse | AGTGATGTTACTTCTGGGTGCT |
| Sequence | | ANGPTL3- | |
| of | | target site-C3 | |
| ANGPTL3 | | | |
| Target Site | | | |
| DNA | 5972 | MG29-1-mouse | AGTTCAGTTCTACTGACATGTT |
| Sequence | | ANGPTL3- | |
| of | | target site-D3 | |
| ANGPTL3 | | | |
| Target Site | | | |
| DNA | 5973 | MG29-1-mouse | TAACTTGTAGTGTAGATGTAGT |
| Sequence | | ANGPTL3- | |
| of | | target site-E3 | |
| ANGPTL3 | | | |
| Target Site | | | |
| DNA | 5974 | MG29-1-mouse | AACTTGTAGTGTAGATGTAGTT |
| Sequence | | ANGPTL3- | |
| of | | target site-F3 | |
| ANGPTL3 | | | |
| Target Site | | | |
| DNA | 5975 | MG29-1-mouse | ACTTGTAGTGTAGATGTAGTTC |
| Sequence | | ANGPTL3- | |
| of | | target site-G3 | |
| ANGPTL3 | | | |
| Target Site | | | |
| DNA | 5976 | MG29-1-mouse | CCTCTTCTTTGATTTCATTGGT |
| Sequence | | ANGPTL3- | |
| of | | target site-H3 | |
| ANGPTL3 | | | |
| Target Site | | | |
| DNA | 5977 | MG29-1-mouse | CTCTTCTTTGATTTCATTGGTT |
| Sequence | | ANGPTL3- | |
| of | | target site-A4 | |
| ANGPTL3 | | | |
| Target Site | | | |
| DNA | 5978 | MG29-1-mouse | ATTTCATTGGTTCGAAGTGATA |
| Sequence | | ANGPTL3- | |
| of | | target site-B4 | |
| ANGPTL3 | | | |
| Target Site | | | |
| DNA | 5979 | MG29-1-mouse | ATTGGTTCGAAGTGATAGGTCA |
| Sequence | | ANGPTL3- | |
| of | | target site-C4 | |
| ANGPTL3 | | | |
| Target Site | | | |
| DNA | 5980 | MG29-1-mouse | TCCCTTAGTCTTATGGACAAAA |
| Sequence | | ANGPTL3- | |
| of | | target site-D4 | |
| ANGPTL3 | | | |
| Target Site | | | |
| DNA | 5981 | MG29-1-mouse | AGTCCATGACCCAGCTGCAGGA |
| Sequence | | ANGPTL3- | |
| of | | target site-E4 | |
| ANGPTL3 | | | |
| Target Site | | | |
| DNA | 5982 | MG29-1-mouse | GACATCATCCAACATAGCAAAT |
| Sequence | | ANGPTL3- | |
| of | | target site-F4 | |
| ANGPTL3 | | | |
| Target Site | | | |
| DNA | 5983 | MG29-1-mouse | ACATCATCCAACATAGCAAATC |
| Sequence | | ANGPTL3- | |
| of | | target site-G4 | |
| ANGPTL3 | | | |
| Target Site | | | |
| DNA | 5984 | MG29-1-mouse | GGCTCTGAAGGTGCAGAATCAA |
| Sequence | | ANGPTL3- | |
| of | | target site-H4 | |
| ANGPTL3 | | | |
| Target Site | | | |
| DNA | 5985 | MG29-1-mouse | GCTCTGAAGGTGCAGAATCAAA |
| Sequence | | ANGPTL3- | |
| of | | target site-A5 | |
| ANGPTL3 | | | |
| Target Site | | | |
| DNA | 5986 | MG29-1-mouse | GTAGAACAGCAAGACAACAGCA |
| Sequence | | ANGPTL3- | |
| of | | target site-B5 | |
| ANGPTL3 | | | |
| Target Site | | | |
| DNA | 5987 | MG29-1-mouse | TAGAACAGCAAGACAACAGCAT |
| Sequence | | ANGPTL3- | |
| of | | target site-C5 | |
| ANGPTL3 | | | |
| Target Site | | | |
| DNA | 5988 | MG29-1-mouse | CTATTTCTTTTATCTGCATGTG |
| Sequence | | ANGPTL3- | |
| of | | target site-D5 | |
| ANGPTL3 | | | |
| Target Site | | | |
| DNA | 5989 | MG29-1-mouse | TATTTCTTTTATCTGCATGTGC |
| Sequence | | ANGPTL3- | |
| of | | target site-E5 | |
| ANGPTL3 | | | |
| Target Site | | | |
| DNA | 5990 | MG29-1-mouse | TTTTATCTGCATGTGCTGTTGA |
| Sequence | | ANGPTL3- | |
| of | | target site-F5 | |
| ANGPTL3 | | | |
| Target Site | | | |
| DNA | 5991 | MG29-1-mouse | ATCTGCATGTGCTGTTGACTTA |
| Sequence | | ANGPTL3- | |
| of | | target site-G5 | |
| ANGPTL3 | | | |
| Target Site | | | |
| DNA | 5992 | MG29-1-mouse | TCTGCATGTGCTGTTGACTTAA |
| Sequence | | ANGPTL3- | |
| of | | target site-H5 | |
| ANGPTL3 | | | |
| Target Site | | | |
| DNA | 5993 | MG29-1-mouse | TACTGTTCTTCCACACTCTGGA |
| Sequence | | ANGPTL3- | |
| of | | target site-A6 | |
| ANGPTL3 | | | |
| Target Site | | | |
| DNA | 5994 | MG29-1-mouse | TATTCTTTTATCAGCTCAGAAA |
| Sequence | | ANGPTL3- | |
| of | | target site-B6 | |
| ANGPTL3 | | | |
| Target Site | | | |
| DNA | 5995 | MG29-1-mouse | ATCAGCTCAGAAAGACTGGTAT |
| Sequence | | ANGPTL3- | |
| of | | target site-C6 | |
| ANGPTL3 | | | |
| Target Site | | | |
| DNA | 5996 | MG29-1-mouse | TCAGCTCAGAAAGACTGGTATT |
| Sequence | | ANGPTL3- | |
| of | | target site-D6 | |
| ANGPTL3 | | | |
| Target Site | | | |
| DNA | 5997 | MG29-1-mouse | TTCTAAATCAAGAGCACCAAGA |
| Sequence | | ANGPTL3- | |
| of | | target site-E6 | |
| ANGPTL3 | | | |
| Target Site | | | |
| DNA | 5998 | MG29-1-mouse | CTGTTTCGTTCAGTTGAAGAGG |
| Sequence | | ANGPTL3- | |
| of | | target site-F6 | |
| ANGPTL3 | | | |
| Target Site | | | |
| DNA | 5999 | MG29-1-mouse | TGTTTCGTTCAGTTGAAGAGGG |
| Sequence | | ANGPTL3- | |
| of | | target site-G6 | |
| ANGPTL3 | | | |
| Target Site | | | |
| DNA | 6000 | MG29-1-mouse | GTTCAGTTGAAGAGGGGGAGTA |
| Sequence | | ANGPTL3- | |
| of | | target site-H6 | |
| ANGPTL3 | | | |
| Target Site | | | |
| DNA | 6001 | MG29-1-mouse | GAAGAAAGAGAATTTTCTGAGG |
| Sequence | | ANGPTL3- | |
| of | | target site-A7 | |
| ANGPTL3 | | | |
| Target Site | | | |
| DNA | 6002 | MG29-1-mouse | CTGAGGGTTCTTGAATACCAGT |
| Sequence | | ANGPTL3- | |
| of | | target site-B7 | |
| ANGPTL3 | | | |
| Target Site | | | |
| DNA | 6003 | MG29-1-mouse | TGAGGGTTCTTGAATACCAGTC |
| Sequence | | ANGPTL3- | |
| of | | target site-C7 | |
| ANGPTL3 | | | |
| Target Site | | | |
| DNA | 6004 | MG29-1-mouse | TAACAGAGGCGAACATACAAGT |
| Sequence | | ANGPTL3- | |
| of | | target site-D7 | |
| ANGPTL3 | | | |
| Target Site | | | |
| DNA | 6005 | MG29-1-mouse | ATGTCTACTGTGATACCCAATC |
| Sequence | | ANGPTL3- | |
| of | | target site-E7 | |
| ANGPTL3 | | | |
| Target Site | | | |
| DNA | 6006 | MG29-1-mouse | CATGGGTTTACCTGATTGGGTA |
| Sequence | | ANGPTL3- | |
| of | | target site-F7 | |
| ANGPTL3 | | | |
| Target Site | | | |
| DNA | 6007 | MG29-1-mouse | CCTGATTGGGTATCACAGTAGA |
| Sequence | | ANGPTL3- | |
| of | | target site-G7 | |
| ANGPTL3 | | | |
| Target Site | | | |
| DNA | 6008 | MG29-1-mouse | TTGGTTTAATAGTGTACACGCC |
| Sequence | | ANGPTL3- | |
| of | | target site-H7 | |
| ANGPTL3 | | | |
| Target Site | | | |
| DNA | 6009 | MG29-1-mouse | ATAGTGTACACGCCACTTGTAT |
| Sequence | | ANGPTL3- | |
| of | | target site-A8 | |
| ANGPTL3 | | | |
| Target Site | | | |
| DNA | 6010 | MG29-1-mouse | CCATCGAGCCTCCCAAAGCCCT |
| Sequence | | ANGPTL3- | |
| of | | target site-B8 | |
| ANGPTL3 | | | |
| Target Site | | | |
| DNA | 6011 | MG29-1-mouse | CGTAGTTTTCCCATGTTTCGTT |
| Sequence | | ANGPTL3- | |
| of | | target site-C8 | |
| ANGPTL3 | | | |
| Target Site | | | |
| DNA | 6012 | MG29-1-mouse | GTAGTTTTCCCATGTTTCGTTG |
| Sequence | | ANGPTL3- | |
| of | | target site-D8 | |
| ANGPTL3 | | | |
| Target Site | | | |
| DNA | 6013 | MG29-1-mouse | CCCATGTTTCGTTGAAGTCCTG |
| Sequence | | ANGPTL3- | |
| of | | target site-E8 | |
| ANGPTL3 | | | |
| Target Site | | | |
| DNA | 6014 | MG29-1-mouse | CCATGTTTCGTTGAAGTCCTGT |
| Sequence | | ANGPTL3- | |
| of | | target site-F8 | |
| ANGPTL3 | | | |
| Target Site | | | |
| DNA | 6015 | MG29-1-mouse | GTTGAAGTCCTGTGAGCCATCT |
| Sequence | | ANGPTL3- | |
| of | | target site-G8 | |
| ANGPTL3 | | | |
| Target Site | | | |
| DNA | 6016 | MG29-1-mouse | CGGTGTTGAATTAATGTCCATG |
| Sequence | | ANGPTL3- | |
| of | | target site-H8 | |
| ANGPTL3 | | | |
| Target Site | | | |
| DNA | 6017 | MG29-1-mouse | CCCTCTAACTTTTTTCTTTAGG |
| Sequence | | ANGPTL3- | |
| of | | target site-A9 | |
| ANGPTL3 | | | |
| Target Site | | | |
| DNA | 6018 | MG29-1-mouse | CCTCTAACTTTTTTCTTTAGGA |
| Sequence | | ANGPTL3- | |
| of | | target site-B9 | |
| ANGPTL3 | | | |
| Target Site | | | |
| DNA | 6019 | MG29-1-mouse | TTCTTTAGGAGAATTTTGGTTG |
| Sequence | | ANGPTL3- | |
| of | | target site-C9 | |
| ANGPTL3 | | | |
| Target Site | | | |
| DNA | 6020 | MG29-1-mouse | TCTTTAGGAGAATTTTGGTTGG |
| Sequence | | ANGPTL3- | |
| of | | target site-D9 | |
| ANGPTL3 | | | |
| Target Site | | | |
| DNA | 6021 | MG29-1-mouse | CTTTAGGAGAATTTTGGTTGGG |
| Sequence | | ANGPTL3- | |
| of | | target site-E9 | |
| ANGPTL3 | | | |
| Target Site | | | |
| DNA | 6022 | MG29-1-mouse | TTTAGGAGAATTTTGGTTGGGC |
| Sequence | | ANGPTL3- | |
| of | | target site-F9 | |
| ANGPTL3 | | | |
| Target Site | | | |
| DNA | 6023 | MG29-1-mouse | GGAGAATTTTGGTTGGGCCTAG |
| Sequence | | ANGPTL3- | |
| of | | target site-G9 | |
| ANGPTL3 | | | |
| Target Site | | | |
| DNA | 6024 | MG29-1-mouse | GGTTGGGCCTAGAGAAGATCTA |
| Sequence | | ANGPTL3- | |
| of | | target site-H9 | |
| ANGPTL3 | | | |
| Target Site | | | |
| DNA | 6025 | MG29-1-mouse | GTTGGGCCTAGAGAAGATCTAT |
| Sequence | | ANGPTL3- | |
| of | | target site-A10 | |
| ANGPTL3 | | | |
| Target Site | | | |
| DNA | 6026 | MG29-1-mouse | ACGACTCGAGCTACAAGACTGG |
| Sequence | | ANGPTL3- | |
| of | | target site-B10 | |
| ANGPTL3 | | | |
| Target Site | | | |
| DNA | 6027 | MG29-1-mouse | CGACTCGAGCTACAAGACTGGA |
| Sequence | | ANGPTL3- | |
| of | | target site-C10 | |
| ANGPTL3 | | | |
| Target Site | | | |
| DNA | 6028 | MG29-1-mouse | ACCTGGGCAGTCACGAAACCAA |
| Sequence | | ANGPTL3- | |
| of | | target site-D10 | |
| ANGPTL3 | | | |
| Target Site | | | |
| DNA | 6029 | MG29-1-mouse | GTGACTGCCCAGGTGAAAGGAG |
| Sequence | | ANGPTL3- | T |
| of | | target site-E10 | |
| ANGPTL3 | | | |
| Target Site | | | |
| DNA | 6030 | MG29-1-mouse | CAGTCTTGTAGCTCGAGTCGTA |
| Sequence | | ANGPTL3- | |
| of | | target site-F10 | |
| ANGPTL3 | | | |
| Target Site | | | |

r; native RNA linkage comprising the sugar ribose (for example the ribose or RNA form of the A base is written rA), d; deoxyribose sugar (DNA) linkage (for example a deoxyribose form of the A base is written dA), *; between bases in which one of the oxygen molecules in the phosphodiester bond is replaced with sulfur; AltR1 and AltR2 refer to IDT technologies' proprietary 5′ and 3′ AltR modifications

### Example 79—Compact MG55-43 Nuclease System

[0618] In Vitro Characterization to Identify Putative tracrRNAs

[0619] To identify tracrRNA sequences, the nuclease (MG55-43, protein SEQ ID NO: 470), intergenic sequences, and minimal arrays were expressed in transcription-translation reaction mixtures using myTXTL® Sigma 70 Master Mix Kit (Arbor Biosciences). The final reaction mixtures contained 5 nM nuclease DNA template, 12 nM intergenic DNA template, 15 nM minimal array DNA template, 0.1 nM pTXTL-P70a-T7map, and 1× of myTXTL® Sigma 70 Master Mix. The reactions were incubated at 29° C. for 16 hours then stored at 4° C.

[0620] Ribonucleoprotein complexes were tested via in vitro cleavage reactions. Plasmid DNA library cleavage reactions were carried out by mixing 5 nM of the target plasmid DNA library representing all possible 8N PAMs, a 5-fold dilution of the TXTL expressions, 10 nM Tris-HCl, 10 nM MgCl₂, and 100 mM NaCl at 37° C. for 2 hours. Reactions were stopped and cleaned with HighPrep™ PCR clean up beads (MAGBIO Genomics, Inc.) and eluted in Tris EDTA pH 8.0 buffer. 3 nM of the cleavage product ends were blunted with 3.33 μM dNTPs, 1× T4 DNA ligase buffer, and 0.167 U/μL of Klenow Fragment (New England Biolabs Inc.) at 25° C. for 15 minutes. 1.5 nM of the cleavage products were ligated with 150 nM adapters, 1× T4 DNA ligase buffer (New England Biolabs Inc.), and 20 U/μL T4 DNA ligase (New England Biolabs Inc.) at room temperature for 20 minutes. The ligated products were amplified by PCR with NGS primers and sequenced by NGS to obtain the PAM.

[0621] To obtain the sequence of the tracrRNA and crRNA, RNA is extracted from TXTL lysate following the Quick-RNA™ Miniprep Kit (Zymo Research) and eluted in 30-50 μL of water. The total concentration of the transcripts was measured on a Nanodrop, Tapestation, and Qubit. RNA libraries were subjected to RNA sequencing.

In Silico Search for Novel tracrRNA Sequences

[0622] To identify additional non-coding regions containing potential tracrRNAs, the sequence of the active tracrRNA was mapped to other contigs containing nucleases in the same nuclease family. The newly identified sequences were used to generate covariance models to predict additional tracrRNAs. Covariance models were built from a multiple sequence alignment (MSA) of the active and predicted tracrRNA sequences. The secondary structure of the MSA was obtained with RNAalifold (Vienna Package), and the covariance models were built with Infernal packages (http://eddylab.org/infernal/). Contigs containing candidate nucleases were searched using the covariance models with the Infernal command ‘cmsearch’.

sgRNA Design

[0623] The predicted tracrRNA obtained from the covariance models and associated CRISPR repeat sequence were modified to generate an sgRNA (FIG. 104A, SEQ ID NO: 6031) as follows: the 3′ end of the predicted tracrRNA sequence as well as the 5′ end of the repeat sequence were trimmed, and then connected with a GAAA tetraloop (FIG. 104B).

### In Vitro Cleavage Reactions Confirmed MG55-43 Activity and Enabled PAM Determination

[0624] Target plasmid DNA library cleavage reactions described above (In vitro characterization to Identify putative tracrRNAs) were carried out using the guides. The product of the reactions were amplified by PCR with NGS primers and sequenced by NGS to obtain the PAM. Active proteins that successfully cleaved the PAM library yielded a band around 188 or 205 bp in agarose gel electrophoresis (FIG. 104C).

TABLE 44
Spacer sequences for tested guides

| Code | Sequence |
|---|---|
| U67 spacer | GTCGAGGCTTGCGACGTGGT |
| U40 spacer | TGGAGATATCTTGAACCTTG |

[0625] Sequence logos for PAMs were made using Seqlogo maker, and histograms showing cut-site preferences were made from the counts of reads mapping at each nucleotide position. The PAM recognized by MG55-43 is a 5′-yTn sequence (FIG. 104D, Sequence Number: A6032), and the preferred cut position is nucleotide 23 (FIG. 104E).

### Example 80—MG91 Family of Compact Type V Nucleases

[0626] De Novo Prediction of tracrRNA Sequences Encoded in Intergenic Regions

[0627] Compact type V nuclease proteins from distinct clades were targeted for in silico characterization of genomic regions encoding CRISPR Cas systems. To identify intergenic regions potentially encoding tracrRNAs, individual protein clades (with confirmed catalytic residues) were chosen for visual inspection of contigs encoding the compact type nuclease genes and a CRISPR array. Genomic regions devoid of coding sequence predictions between two genes, or between genes and CRISPR arrays, were manually annotated as intergenic regions (FIG. 105). Intergenic regions upstream and downstream from a nuclease gene as well as a CRISPR array, i.e., at the same location relative to a nuclease and the corresponding CRISPR array, were consistently assigned labels across contigs encoding homologous nucleases. Nucleotide sequences of matching intergenic regions were aligned and inspected for conserved motifs across sequences (FIG. 106). Similarly, nucleotide sequences from non-matching intergenic regions within clades were aligned and inspected. By comparison, intergenic regions with the highest degree of conservation among them were identified as potentially encoding tracrRNAs.

[0628] Intergenic regions potentially encoding tracrRNAs corresponding to candidate nucleases (SEQ ID NOs: 6040-6049) were identified by the methods described herein, and are the subject of in vitro characterization. Results for active nucleases MG91-15 (SEQ ID NO: 2824), MG91-32 (SEQ ID NO: 2841), and MG91-87 (SEQ ID NO: 28%) are presented herein.

Intergenic Region Secondary Structure Predictions Inform tracrRNA Prediction

[0629] Intergenic regions potentially encoding tracrRNAs were folded with the corresponding repeat sequences using different energy models (Turner 2004 or Andronescu 2007) and parameters (for example, 20° C., 37° C., dangling ends). The stability of potential secondary RNA structures was visually inspected based on base pairs probabilities. Optimal intergenic region/repeat folds for MG91-15, MG91-32, and MG91-87 were obtained and used to inform the design of single guide RNAs.

### MG91-15, MG91-32 and MG91-87sgRNA Design

[0630] Promising folds between intergenic regions potentially containing tracrRNAs with the corresponding repeat sequences were modified as follows: tracrRNA sequences were trimmed on the 3′ end and sometimes on the 5′ end, and repeat sequences were trimmed on the 5′ end. Both RNA sequences were connected via a GAAA tetraloop and folded for secondary structure prediction as described above. The secondary structure for active sgRNAs corresponding to nucleases MG91-15 sgRNA1 (SEQ ID NO: 6033), MG91-32 sgRNA1 (SEQ ID NO: 6034), and MG91-87 sgRNA1 (SEQ ID NO: 6035) are shown in FIG. 107.

### In Vitro Activity and PAM Sequence Determination for MG91-15, MG91-32 and MG91-87 Nucleases

[0631] 5 nM of nuclease amplified DNA templates and 25 nM sgRNA amplified DNA templates were expressed at 37° C. for 3 hours with PURExpress® In Vitro Protein Synthesis Kit (New England Biolabs Inc.). Plasmid library DNA cleavage reactions were carried out by mixing 5 nM of the target library representing all possible 8N PAMs, a 5-fold dilution of PURExpress expressions, 10 nM Tris-HCl, 10 nM MgCl2, and 100 mM NaCl at 37° C. for 2 hours. Reactions were stopped and cleaned with HighPrep™ PCR clean up beads (MAGBIO Genomics, Inc.) and eluted in Tris EDTA pH 8.0 buffer. 3 nM of the cleavage product ends were blunted with 3.33 μM dNTPs, 1× T4 DNA ligase buffer, and 0.167 U/μL of Klenow Fragment (New England Biolabs Inc.) at 25° C. for 15 minutes. 1.5 nM of the cleavage products were ligated with 150 nM adapters, 1× T4 DNA ligase buffer (New England Biolabs Inc.), and 20 U/μL T4 DNA ligase (New England Biolabs Inc.) at room temperature for 20 minutes. The ligated products were amplified by PCR with NGS primers and sequenced by NGS to obtain the PAM.

[0632] Active proteins that successfully cleaved the PAM library yielded a band around 188 or 205 bp in an agarose gel (FIG. 107D).

[0633] Sequence logos were made using Seqlogo maker, and histograms were made from the counts of reads at each nucleotide position. The PAM recognized by MG91-15 is a 5′-TtTYn sequence (FIG. 108A, Sequence Number: A6037), by MG91-32 is a 5′-GnYYn sequence (FIG. 108B,Sequence Number: A6038), and by MG-87 is a 5′-wCCC sequence (FIG. 108C, Sequence Number: A6039). The preferred cut position(s) were nucleotides 21 and 22 for MG91-15 (FIG. 108D), nucleotide 17 for MG91-32 (FIG. 108E) and nucleotide 20 for MG91-87 (FIG. 108F).

[0634] Covariance models were built as described above (In silico search for novel tracrRNA sequences, Compact type MG55-43 Cas nuclease system) from active tracrRNA sequences, and used to refine the prediction of tracrRNAs from other intergenic regions associated with nucleases in the MG91 family.

### In Vitro Activity of Compact Type V MG91 Nucleases and Selected Intergenic Regions (Prophetic)

[0635] Nuclease, intergenic sequences, and minimal arrays are expressed in transcription-translation reaction mixtures using myTXTL® Sigma 70 Master Mix Kit (Arbor Biosciences) as described before. Ribonucleoprotein complexes are tested in in vitro cleavage reactions of plasmid target DNA library using the TXTL expressions. The products are amplified by PCR with NGS primers and sequenced by NGS to obtain the PAM sequence.

[0636] Active proteins that successfully cleave the PAM library are expected to yield a band around 188 or 205 bp in agarose gel electrophoresis. Sequence logos are made using Seqlogo maker, and histograms are generated from the counts of reads at each nucleotide position.

[0637] To obtain the sequence of active tracrRNA and crRNA, RNA is extracted from TXTL lysate following the Quick-RNA™ Miniprep Kit (Zymo Research). The total concentration of the transcripts is measured on a Nanodrop, Tapestation, and Qubit; and is subjected to next generation sequencing.

[0638] The sequence of active tracrRNAs and crRNAs is used to design sgRNAs, and is subsequently tested in PURExpress with the corresponding MG91 nuclease to confirm the PAM sequence and cut site.

E. coli Expressions (Compact Type V Nucleases) (Prophetic)

[0639] Plasmids encoding the effector, intergenic sequence from the genomic contig, native repeat, and universal spacer sequences with a T7 promoter are transformed into BL21 DE3 or T7 Express 1ysY/Iq and cultured at 37° C. in 60 mL terrific broth media supplemented with 100 μg/mL of ampicillin. Expression is induced with 0.4 mM IPTG after cultures reach OD600 nm of 0.5 and cells are incubated at 16° C. overnight. 25 mL of cells are pelleted by centrifugation and resuspended in 1.5 mL of lysis buffer (20 mM Tris-HCl, 500 mM NaCl, 1 mM TCEP, 5% glycerol, 10 mM MgCl₂ pH 7.5 with Pierce Protease Inhibitor, (Thermo Scientific™)). Cells are then lysed by sonication. Supernatant and cell debris are separated by centrifugation.

In Vitro Cleavage Efficiency with Purified Protein (Compact Type V Nucleases) (Prophetic)

[0640] Proteins are expressed in E. coli protease deficient B strain under T7 inducible promoter, the cells are lysed using sonication, and the His-tagged protein of interest is purified using HisTrap FF (GE Lifescience) Ni-NTA affinity chromatography on the AKTA Avant FPLC (GE Lifescience). Purity is determined using densitometry in ImageLab software (Bio-Rad) of the protein bands resolved on SDS-PAGE and InstantBlue Ultrafast (Sigma-Aldrich) coomassie stained acrylamide gels (Bio-Rad). The protein is desalted in storage buffer composed of 50 mM Tris-HCl, 300 mM NaCl, 1 mM TCEP, 5% glycerol; pH 7.5 and stored at −80° C.

[0641] A target DNA is constructed that contains a spacer sequence and the PAM determined via NGS. In the case of degenerate bases in the PAM, a single representative PAM is chosen for testing. The target DNA is 2200 bp of linear DNA derived from a plasmid via PCR amplification. The PAM and spacer are located 700 bp from one end. Successful cleavage results in fragments of 700 and 1500 bp.

[0642] The target DNA, in vitro transcribed single RNA, and purified recombinant protein are combined in cleavage buffer (10 mM Tris, 100 mM NaCl, 10 mM MgCl₂) with an excess of protein and RNA and incubated for 5′ to 3 hours, usually 1 hr. The reaction is stopped via addition of RNAse A and incubation at 60° C. The reaction is resolved on a 1.2% TAE agarose gel and the fraction of cleaved target DNA is quantified in ImageLab software.

Activity in E. coli (Compact Type V Nucleases) (Prophetic)

[0643] For testing of nuclease activity in bacterial cells, strains are constructed with genome sequences containing a spacer target with corresponding PAM sequence specific to the enzyme of interest. Engineered strains are then transformed with the nuclease of interest and transformants are then subsequently made chemocompetent and transformed with 50 ng of single guides either specific to the target sequence (on target) or non specific to the target (off target). After heat shock, transformations are recovered in SOC for 2 hrs at 37° C., and nuclease efficiency is determined by a 5-fold dilution series grown on induction media. Colonies are quantified from the dilution series in triplicate. Nuclease, and therefore genome editing capability, is assessed by quantifying the reduction of viable cells in the presence of guides and nucleases targeting the host cell chromosome.

### Activity in Mammalian Cells (Compact Type V Nucleases) (Prophetic)

[0644] To show targeting and cleavage activity in mammalian cells, and therefore genome editing potential, the protein sequences are cloned into two mammalian expression vectors, one with a C-terminal SV40 NLS and a 2A-GFP tag and one with no GFP tag and two NLS sequences (one on the N-terminus and one on the C-terminus). Alternative NLS sequences that could also be used are listed in Table 45.

TABLE 45
Alternative nuclear localization sequences (NLS)

| Source | NLS amino acid sequence |
|---|---|
| SV40 | PKKKRKV |
| nucleoplasmin | KRPAATKKAGQAKKKK |
| bipartite NLS | |
| c-myc NLS | PAAKRVKLD |
| c-myc NLS | RQRRNELKRSP |
| hRNPA1 M9 NLS | NQSSNFGPMKGGNFGGRSSGPY |
| | GGGGQYFAKPRNQGGY |
| Importin-alpha | RMRIZFKNKGKDTAELRRRRVE |
| IBB domain | VSVELRKAKKDEQILKRRNV |
| Myoma T protein | VSRKRPRP |
| Myoma T protein | PPKKARED |
| p53 | PQPKKKPL |
| mouse c-abl IV | SALIKKKKKMAP |
| influenza virus NS1 | DRLRR |
| influenza virus NS1 | PKQKKRK |
| Hepatitis virus | RKLKKKIKKL |
| delta antigen | |
| mouse Mx1 protein | REKKKFLKRR |
| human poly(ADP-ribose) | KRKGDEVDGVDEVAKKKSKK |
| polymerase | |
| steroid hormone | RKCLQAGMNLEARKTKK |
| receptors | |
| (human) | |
| glucocorticoid | |

[0645] The DNA sequence for the protein can be the native sequence, the E. coli codon optimized sequence, or the mammalian codon optimized sequence. The single guide RNA sequence with a gene target of interest is also cloned into a mammalian expression vector. The two plasmids are cotransfected into HEK293T cells. 72 hr after co-transfection of the expression plasmid and a sgRNA targeting plasmid into HEK293T cells, the DNA is extracted and used for the preparation of an NGS library. Percent NHEJ is measured via InDels in the sequencing of the target site to demonstrate the targeting efficiency of the enzyme in mammalian cells. At least 10 different target sites are chosen for testing protein activity.

TABLE 46
Listing of additional protein and nucleic
acid sequences referred to herein not
included in the sequence listing

| | Se- | | | | | |
|---|---|---|---|---|---|---|
| | quence | SEQ | Descrip- | | Organ- | |
| Cat. | Number | ID: | tion | Type | ism | Sequence |
| | — | 4426 | MG29-1 | | | TAATACGACTCACTAT |
| | | | WT | | | AAGGAAAAGCCAGCTC |
| | | | mRNA | | | CAGCAGGCGCTGCTCA |
| | | | | | | CTCCTCCCCATCCTCT |
| | | | | | | CCCTCTGTCCCTCTGT |
| | | | | | | CCCTCTGACCCTGCAC |
| | | | | | | TGTCCCAGCACCATGG |
| | | | | | | CCCCCAAGAAGAAGCG |
| | | | | | | GAAAGTTGGCGGCGG |
| | | | | | | AGGCAGCTTCAACAAC |
| | | | | | | TTCATCAAGAAATACA |
| | | | | | | GCCTGCAGAAGACCCT |
| | | | | | | GCGGTTCGAACTGAAG |
| | | | | | | CCCGTGGGCGAGACA |
| | | | | | | GCGGACTACATCGAAG |
| | | | | | | ACTTCAAGAGCGAATA |
| | | | | | | CCTGAAGGACACGGTG |
| | | | | | | CTGAAGGACGAACAGC |
| | | | | | | GGGCAAAAGACTACCA |
| | | | | | | GGAGATCAAAACACTG |
| | | | | | | ATCGACGACTACCACC |
| | | | | | | GGGAGTACATCGAAGA |
| | | | | | | ATGCCTGAGGGAACCC |
| | | | | | | GTGGACAAAAAGACCG |
| | | | | | | GCGAGATCCTGGACTT |
| | | | | | | CACACAGGACCTGGAA |
| | | | | | | GACGCATTCAGCTACT |
| | | | | | | ACCAGAAACTGAAAGA |
| | | | | | | AAACCCCACCGAGAAC |
| | | | | | | CGAGTGGGGTGGGAG |
| | | | | | | AAAGAGCAGGAGAGC |
| | | | | | | CTGAGAAAGAAGCTGG |
| | | | | | | TGACCAGCTTCGTGGG |
| | | | | | | GAACGACGGCCTGTTC |
| | | | | | | AAGAAAGAGTTCATCA |
| | | | | | | CCCGCGACCTGCCCGA |
| | | | | | | ATGGCTGCAGAAAAAG |
| | | | | | | GGGCTGTGGGGCGAA |
| | | | | | | TACAAGGACACCGTGG |
| | | | | | | AGAACTTCAAAAAATT |
| | | | | | | CACCACCTACTTCAGC |
| | | | | | | GGCTTCCACGAGAACA |
| | | | | | | GGAAGAATATGTACAC |
| | | | | | | AGCCGAAGCCCAGAG |
| | | | | | | CACAGCCATCGCCAAC |
| | | | | | | AGGCTGATGAACGACA |
| | | | | | | ACCTGCCCAAGTTCTT |
| | | | | | | CAACAACTACCTGGCA |
| | | | | | | TACCAGACCATCAAGG |
| | | | | | | AGAAACACCCCGACCT |
| | | | | | | GGTGTTCCGACTGGAC |
| | | | | | | GACGCCCTGCTGCAGG |
| | | | | | | CCGCCGGCGTGGAGC |
| | | | | | | ACCTGGACGAGGCATT |
| | | | | | | CCAGCCCAGATACTTC |
| | | | | | | AGCAGACTGTTCGCAC |
| | | | | | | AGAGCGGAATCACGG |
| | | | | | | CCTTCAACGAGCTGAT |
| | | | | | | CGGAGGAAGGACCAC |
| | | | | | | GGAAAACGGCGAAAA |
| | | | | | | GATCCAGGGCCTGAAC |
| | | | | | | GAGCAGATCAACCTGT |
| | | | | | | ACAGACAGCAGAACCC |
| | | | | | | CGAGAAGGCCAAGGG |
| | | | | | | CTTCCCAAGATTCATG |
| | | | | | | CCCCTGTTCAAGCAAA |
| | | | | | | TCCTGAGCGACAGGGA |
| | | | | | | GACCCACAGCTTCCTG |
| | | | | | | CCCGACGCATTCGAAA |
| | | | | | | ACGACAAAGAGCTGCT |
| | | | | | | GCAGGCCCTGAGGGA |
| | | | | | | CTACGTGGACGCCGCC |
| | | | | | | ACCAGCGAAGAAGGA |
| | | | | | | ATGATCAGCCAACTGA |
| | | | | | | ACAAGGCCATGAACCA |
| | | | | | | GTTCGTGACCGCCGAC |
| | | | | | | CTGAAAAGGGTGTACA |
| | | | | | | TCAAAAGCGCCGCCCT |
| | | | | | | GACCAGCCTGAGCCAG |
| | | | | | | GAACTGTTCCACTTCT |
| | | | | | | TCGGCGTGATCAGCGA |
| | | | | | | CGCCATCGCGTGGTAC |
| | | | | | | GCCGAGAAGAGACTG |
| | | | | | | AGCCCCAAGAAAGCCC |
| | | | | | | AGGAGAGCTTCCTGAA |
| | | | | | | ACAGGAAGTGTACGCC |
| | | | | | | ATCGAAGAACTGAACC |
| | | | | | | AGGCCGTGGTGGGCT |
| | | | | | | ACATCGACCAGCTGGA |
| | | | | | | AGACCAGAGCGAGCT |
| | | | | | | GCAGCAGCTGCTGGTG |
| | | | | | | GACCTGCCAGACCCCC |
| | | | | | | AGAAACCAGTGAGCAG |
| | | | | | | CTTCATCCTGACCCAC |
| | | | | | | TGGCAAAAAAGCCAGG |
| | | | | | | AGCCGCTGCAGGCCGT |
| | | | | | | GATCGCGAAGGTGGA |
| | | | | | | ACCCCTGTTCGAACTG |
| | | | | | | GAGGAGCTGAGCAAA |
| | | | | | | AACAAACGGGCCCCGA |
| | | | | | | AACACGACAAGGACCA |
| | | | | | | GGGAGGGGAAGGCTT |
| | | | | | | CCAGCAGGTGGACGC |
| | | | | | | AATCAAGAACATGCTG |
| | | | | | | GACGCATTCATGGAGG |
| | | | | | | TGAGCCACGCCATCAA |
| | | | | | | GCCCCTGTACCTGGTG |
| | | | | | | AAGGGCCGGAAAGCA |
| | | | | | | ATCGACATGCCGGACG |
| | | | | | | TGGACACAGGATTCTA |
| | | | | | | CGCCGACTTCGCGGAG |
| | | | | | | GCATACAGCGCCTACG |
| | | | | | | AGCAAGTGACGGTGA |
| | | | | | | GCCTGTACAACAAGAC |
| | | | | | | CCGAAACCACCTGAGC |
| | | | | | | AAGAAACCCTTCAGCA |
| | | | | | | AAGACAAAATCAAAAT |
| | | | | | | CAACTTCGACGCCCCA |
| | | | | | | ACACTGCTGAACGGCT |
| | | | | | | GGGACCTGAACAAGG |
| | | | | | | AAAGCGACAACAAAAG |
| | | | | | | CATCATCCTGAGAAAA |
| | | | | | | GACGGAAACTTCTACC |
| | | | | | | TGGCCATCATGCACCC |
| | | | | | | CAAACACACAAAGGTG |
| | | | | | | TTCGACTGCTACAGCG |
| | | | | | | CCAGCGAGGCGGCCG |
| | | | | | | GGAAATGCTACGAGAA |
| | | | | | | AATGAACTACAAACTG |
| | | | | | | CTGAGCGGCGCCAACA |
| | | | | | | AGATGCTGCCCAAAGT |
| | | | | | | GTTCTTCAGCAAGAAG |
| | | | | | | GGAATCGAAACCTTCA |
| | | | | | | GCCCACCCCAGGAAAT |
| | | | | | | CCTGGACCTGTACAAG |
| | | | | | | AACAACGAACACAAGA |
| | | | | | | AGGGAGCCACCTTCAA |
| | | | | | | GCTGGAGAGCTGCCAC |
| | | | | | | AAGCTGATCGACTTCT |
| | | | | | | TCAAGCGGAACATCCC |
| | | | | | | CAAGTACAAGGTGCAC |
| | | | | | | CCAACCGACAACTTCG |
| | | | | | | GATGGGACGTCTTCGG |
| | | | | | | ATTCCACTTCAGCCCA |
| | | | | | | ACCAGCAGCTACGGCG |
| | | | | | | ACCTGAGCGGCTTCTA |
| | | | | | | CCGAGAGGTGGAAGC |
| | | | | | | CCAGGGGTACAAACTG |
| | | | | | | TGGTTCAGCGACGTGA |
| | | | | | | GCGAGGCATACATCAA |
| | | | | | | CAAGTGCGTGGAAGA |
| | | | | | | GGGCAAACTGTTCCTG |
| | | | | | | TTCCAGATCTACAACA |
| | | | | | | AGGACTTCAGCCCCAA |
| | | | | | | CAGCACCGGGAAGCC |
| | | | | | | AAACCTGCACACACTG |
| | | | | | | TACTGGAAAGGACTGT |
| | | | | | | TCGAACCCGAGAACCT |
| | | | | | | GAAGGACGTGGTGCT |
| | | | | | | GAAACTGAACGGCGA |
| | | | | | | GGCCGAGATCTTCTAC |
| | | | | | | AGGAAACACAGCATCA |
| | | | | | | AGCACGAGGACAAGA |
| | | | | | | CGATCCACCGGGCCAA |
| | | | | | | GGACCCAATCGCCAAC |
| | | | | | | AAAAACGCAGACAACC |
| | | | | | | CCAAGAAGCAGAGCGT |
| | | | | | | GTTCGACTACGACATC |
| | | | | | | ATCAAGGACAAGCGCT |
| | | | | | | ACACCCAGGACAAATT |
| | | | | | | CTTCTTCCACGTGCCC |
| | | | | | | ATCAGCCTGAACTTCA |
| | | | | | | AGAGCCAGGGAGTGG |
| | | | | | | TGCGGTTCAACGACAA |
| | | | | | | GATCAACGGCCTGCTG |
| | | | | | | GCCGCACAGGACGAC |
| | | | | | | GTGCACGTGATCGGGA |
| | | | | | | TCGACCGAGGGGAAC |
| | | | | | | GCCACCTGCTGTACTA |
| | | | | | | CACCGTGGTGAACGGC |
| | | | | | | AAGGGCGAGGTGGTG |
| | | | | | | GAACAGGGCAGCCTG |
| | | | | | | AACCAGGTGGCCACAG |
| | | | | | | ACCAGGGGTACGTGGT |
| | | | | | | GGACTACCAACAGAAA |
| | | | | | | CTGCACGCCAAAGAGA |
| | | | | | | AGGAGAGAGACCAGG |
| | | | | | | CCAGGAAGAACTGGA |
| | | | | | | GCACCATCGAAAACAT |
| | | | | | | CAAGGAGCTGAAGGC |
| | | | | | | CGGGTACCTGAGCCAG |
| | | | | | | GTGGTGCACAAACTGG |
| | | | | | | CCCAGCTGATCGTGAA |
| | | | | | | ACACAACGCCATCGTG |
| | | | | | | TGCCTGGAGGACCTGA |
| | | | | | | ACTTCGGATTCAAGAG |
| | | | | | | GGGACGGTTCAAAGTG |
| | | | | | | GAGAAGCAGGTGTACC |
| | | | | | | AGAAGTTCGAGAAAGC |
| | | | | | | CCTGATCGACAAGCTG |
| | | | | | | AACTACCTGGTGTTCA |
| | | | | | | AGGAACGGGGGGCCA |
| | | | | | | CCCAGGCAGGCGGAT |
| | | | | | | ACCTGAACGCCTACCA |
| | | | | | | GCTGGCCGCACCATTC |
| | | | | | | GAGAGCTTCGAAAAAC |
| | | | | | | TGGGCAAGCAGACCG |
| | | | | | | GCATCCTGTACTACGT |
| | | | | | | GCGGAGCGACTACACC |
| | | | | | | AGCAAGATCGACCCCG |
| | | | | | | CCACAGGCTTCGTGGA |
| | | | | | | CTTCCTGAAGCCCAAA |
| | | | | | | TACGAAAGCATGGCAA |
| | | | | | | AGAGCAAAGTGTTCTT |
| | | | | | | CGAGAGCTTCGAAAGA |
| | | | | | | ATCCAGTGGAACCAGG |
| | | | | | | CCAAAGGCTACTTCGA |
| | | | | | | GTTCGAATTCGACTAC |
| | | | | | | AAGAAAATGTGCCCCA |
| | | | | | | GCAGGAAGTTCGGCG |
| | | | | | | ACTACCGCACCCGGTG |
| | | | | | | GGTGGTGTGCACATTC |
| | | | | | | GGCGACACACGGTACC |
| | | | | | | AGAACAGGCGCAACAA |
| | | | | | | AAGCAGCGGCCAATG |
| | | | | | | GGAGACCGAGACAATC |
| | | | | | | GACGTGACCGCCCAGC |
| | | | | | | TGAAGGCCCTGTTCGC |
| | | | | | | GGCCTACGGCATCACC |
| | | | | | | TACAACCAGGAGGACA |
| | | | | | | ACATCAAGGACGCCAT |
| | | | | | | CGCAGCCGTGAAGTAC |
| | | | | | | ACAAAATTCTACAAAC |
| | | | | | | AGCTGTACTGGCTGCT |
| | | | | | | GAGACTGACGCTGAGC |
| | | | | | | CTGCGGCACAGCGTGA |
| | | | | | | CCGGGACCGACGAGG |
| | | | | | | ACTTCATCCTGAGCCC |
| | | | | | | CGTGGCCGACGAGAA |
| | | | | | | CGGCGTGTTCTTCGAC |
| | | | | | | AGCAGGAAGGCCACG |
| | | | | | | GACAAACAGCCCAAGG |
| | | | | | | ACGCAGACGCGAACG |
| | | | | | | GCGCCTACCACATCGC |
| | | | | | | CCTGAAGGGACTGTGG |
| | | | | | | AACCTGCAGCAGATCA |
| | | | | | | GGCAGCACGACTGGA |
| | | | | | | ACGTGGAAAAACCAAA |
| | | | | | | AAAGCTGAACCTGGCC |
| | | | | | | ATGAAAAACGAAGAGT |
| | | | | | | GGTTCGGCTTCGCACA |
| | | | | | | GAAGAAGAAATTCAGG |
| | | | | | | GCCTCTGGCGGAAAAA |
| | | | | | | GACCTGCCGCCACAAA |
| | | | | | | GAAAGCCGGACAGGC |
| | | | | | | CAAGAAAAAGAAGTGA |
| | | | | | | CCACACCCCCATTCCC |
| | | | | | | CCACTCCAGATAGAAC |
| | | | | | | TTCAGTTATATCTCAC |
| | | | | | | GTGTCTGGAGTTGGAT |
| | | | | | | CCAAAAAAAAAAAAAA |
| | | | | | | AAAAAAAAAAAAAAAA |
| | | | | | | AAAAAAAAAAAAAAAA |
| | | | | | | AAAAAAAAAAAAAAAA |
| | | | | | | AAAAAAAAAAAAAAAA |
| | | | | | | AAAAAAAAAAAAAAAA |
| | | | | | | AAAAAAAAAAAAA |
| | — | 4427 | MG29-1 S168R | | | TAATACGACTCACTAT |
| | | | mRNA | | | AAGGAAAAGCCAGCTC |
| | | | | | | CAGCAGGCGCTGCTCA |
| | | | | | | CTCCTCCCCATCCTCT |
| | | | | | | CCCTCTGTCCCTCTGT |
| | | | | | | CCCTCTGACCCTGCAC |
| | | | | | | TGTCCCAGCACCATGG |
| | | | | | | CCCCCAAGAAGAAGCG |
| | | | | | | GAAAGTTGGCGGCGG |
| | | | | | | AGGCAGCTTCAACAAC |
| | | | | | | TTCATCAAGAAATACA |
| | | | | | | GCCTGCAGAAGACCCT |
| | | | | | | GCGGTTCGAACTGAAG |
| | | | | | | CCCGTGGGCGAGACA |
| | | | | | | GCGGACTACATCGAAG |
| | | | | | | ACTTCAAGAGCGAATA |
| | | | | | | CCTGAAGGACACGGTG |
| | | | | | | CTGAAGGACGAACAGC |
| | | | | | | GGGCAAAAGACTACCA |
| | | | | | | GGAGATCAAAACACTG |
| | | | | | | ATCGACGACTACCACC |
| | | | | | | GGGAGTACATCGAAGA |
| | | | | | | ATGCCTGAGGGAACCC |
| | | | | | | GTGGACAAAAAGACCG |
| | | | | | | GCGAGATCCTGGACTT |
| | | | | | | CACACAGGACCTGGAA |
| | | | | | | GACGCATTCAGCTACT |
| | | | | | | ACCAGAAACTGAAAGA |
| | | | | | | AAACCCCACCGAGAAC |
| | | | | | | CGAGTGGGGTGGGAG |
| | | | | | | AAAGAGCAGGAGAGC |
| | | | | | | CTGAGAAAGAAGCTGG |
| | | | | | | TGACCAGCTTCGTGGG |
| | | | | | | GAACGACGGCCTGTTC |
| | | | | | | AAGAAAGAGTTCATCA |
| | | | | | | CCCGCGACCTGCCCGA |
| | | | | | | ATGGCTGCAGAAAAAG |
| | | | | | | GGGCTGTGGGGCGAA |
| | | | | | | TACAAGGACACCGTGG |
| | | | | | | AGAACTTCAAAAAATT |
| | | | | | | CACCACCTACTTCAGG |
| | | | | | | GGCTTCCACGAGAACA |
| | | | | | | GGAAGAATATGTACAC |
| | | | | | | AGCCGAAGCCCAGAG |
| | | | | | | CACAGCCATCGCCAAC |
| | | | | | | AGGCTGATGAACGACA |
| | | | | | | ACCTGCCCAAGTTCTT |
| | | | | | | CAACAACTACCTGGCA |
| | | | | | | TACCAGACCATCAAGG |
| | | | | | | AGAAACACCCCGACCT |
| | | | | | | GGTGTTCCGACTGGAC |
| | | | | | | GACGCCCTGCTGCAGG |
| | | | | | | CCGCCGGCGTGGAGC |
| | | | | | | ACCTGGACGAGGCATT |
| | | | | | | CCAGCCCAGATACTTC |
| | | | | | | AGCAGACTGTTCGCAC |
| | | | | | | AGAGCGGAATCACGG |
| | | | | | | CCTTCAACGAGCTGAT |
| | | | | | | CGGAGGAAGGACCAC |
| | | | | | | GGAAAACGGCGAAAA |
| | | | | | | GATCCAGGGCCTGAAC |
| | | | | | | GAGCAGATCAACCTGT |
| | | | | | | ACAGACAGCAGAACCC |
| | | | | | | CGAGAAGGCCAAGGG |
| | | | | | | CTTCCCAAGATTCATG |
| | | | | | | CCCCTGTTCAAGCAAA |
| | | | | | | TCCTGAGCGACAGGGA |
| | | | | | | GACCCACAGCTTCCTG |
| | | | | | | CCCGACGCATTCGAAA |
| | | | | | | ACGACAAAGAGCTGCT |
| | | | | | | GCAGGCCCTGAGGGA |
| | | | | | | CTACGTGGACGCCGCC |
| | | | | | | ACCAGCGAAGAAGGA |
| | | | | | | ATGATCAGCCAACTGA |
| | | | | | | ACAAGGCCATGAACCA |
| | | | | | | GTTCGTGACCGCCGAC |
| | | | | | | CTGAAAAGGGTGTACA |
| | | | | | | TCAAAAGCGCCGCCCT |
| | | | | | | GACCAGCCTGAGCCAG |
| | | | | | | GAACTGTTCCACTTCT |
| | | | | | | TCGGCGTGATCAGCGA |
| | | | | | | CGCCATCGCGTGGTAC |
| | | | | | | GCCGAGAAGAGACTG |
| | | | | | | AGCCCCAAGAAAGCCC |
| | | | | | | AGGAGAGCTTCCTGAA |
| | | | | | | ACAGGAAGTGTACGCC |
| | | | | | | ATCGAAGAACTGAACC |
| | | | | | | AGGCCGTGGTGGGCT |
| | | | | | | ACATCGACCAGCTGGA |
| | | | | | | AGACCAGAGCGAGCT |
| | | | | | | GCAGCAGCTGCTGGTG |
| | | | | | | GACCTGCCAGACCCCC |
| | | | | | | AGAAACCAGTGAGCAG |
| | | | | | | CTTCATCCTGACCCAC |
| | | | | | | TGGCAAAAAAGCCAGG |
| | | | | | | AGCCGCTGCAGGCCGT |
| | | | | | | GATCGCGAAGGTGGA |
| | | | | | | ACCCCTGTTCGAACTG |
| | | | | | | GAGGAGCTGAGCAAA |
| | | | | | | AACAAACGGGCCCCGA |
| | | | | | | AACACGACAAGGACCA |
| | | | | | | GGGAGGGGAAGGCTT |
| | | | | | | CCAGCAGGTGGACGC |
| | | | | | | AATCAAGAACATGCTG |
| | | | | | | GACGCATTCATGGAGG |
| | | | | | | TGAGCCACGCCATCAA |
| | | | | | | GCCCCTGTACCTGGTG |
| | | | | | | AAGGGCCGGAAAGCA |
| | | | | | | ATCGACATGCCGGACG |
| | | | | | | TGGACACAGGATTCTA |
| | | | | | | CGCCGACTTCGCGGAG |
| | | | | | | GCATACAGCGCCTACG |
| | | | | | | AGCAAGTGACGGTGA |
| | | | | | | GCCTGTACAACAAGAC |
| | | | | | | CCGAAACCACCTGAGC |
| | | | | | | AAGAAACCCTTCAGCA |
| | | | | | | AAGACAAAATCAAAAT |
| | | | | | | CAACTTCGACGCCCCA |
| | | | | | | ACACTGCTGAACGGCT |
| | | | | | | GGGACCTGAACAAGG |
| | | | | | | AAAGCGACAACAAAAG |
| | | | | | | CATCATCCTGAGAAAA |
| | | | | | | GACGGAAACTTCTACC |
| | | | | | | TGGCCATCATGCACCC |
| | | | | | | CAAACACACAAAGGTG |
| | | | | | | TTCGACTGCTACAGCG |
| | | | | | | CCAGCGAGGCGGCCG |
| | | | | | | GGAAATGCTACGAGAA |
| | | | | | | AATGAACTACAAACTG |
| | | | | | | CTGAGCGGCGCCAACA |
| | | | | | | AGATGCTGCCCAAAGT |
| | | | | | | GTTCTTCAGCAAGAAG |
| | | | | | | GGAATCGAAACCTTCA |
| | | | | | | GCCCACCCCAGGAAAT |
| | | | | | | CCTGGACCTGTACAAG |
| | | | | | | AACAACGAACACAAGA |
| | | | | | | AGGGAGCCACCTTCAA |
| | | | | | | GCTGGAGAGCTGCCAC |
| | | | | | | AAGCTGATCGACTTCT |
| | | | | | | TCAAGCGGAACATCCC |
| | | | | | | CAAGTACAAGGTGCAC |
| | | | | | | CCAACCGACAACTTCG |
| | | | | | | GATGGGACGTCTTCGG |
| | | | | | | ATTCCACTTCAGCCCA |
| | | | | | | ACCAGCAGCTACGGCG |
| | | | | | | ACCTGAGCGGCTTCTA |
| | | | | | | CCGAGAGGTGGAAGC |
| | | | | | | CCAGGGGTACAAACTG |
| | | | | | | TGGTTCAGCGACGTGA |
| | | | | | | GCGAGGCATACATCAA |
| | | | | | | CAAGTGCGTGGAAGA |
| | | | | | | GGGCAAACTGTTCCTG |
| | | | | | | TTCCAGATCTACAACA |
| | | | | | | AGGACTTCAGCCCCAA |
| | | | | | | CAGCACCGGGAAGCC |
| | | | | | | AAACCTGCACACACTG |
| | | | | | | TACTGGAAAGGACTGT |
| | | | | | | TCGAACCCGAGAACCT |
| | | | | | | GAAGGACGTGGTGCT |
| | | | | | | GAAACTGAACGGCGA |
| | | | | | | GGCCGAGATCTTCTAC |
| | | | | | | AGGAAACACAGCATCA |
| | | | | | | AGCACGAGGACAAGA |
| | | | | | | CGATCCACCGGGCCAA |
| | | | | | | GGACCCAATCGCCAAC |
| | | | | | | AAAAACGCAGACAACC |
| | | | | | | CCAAGAAGCAGAGCGT |
| | | | | | | GTTCGACTACGACATC |
| | | | | | | ATCAAGGACAAGCGCT |
| | | | | | | ACACCCAGGACAAATT |
| | | | | | | CTTCTTCCACGTGCCC |
| | | | | | | ATCAGCCTGAACTTCA |
| | | | | | | AGAGCCAGGGAGTGG |
| | | | | | | TGCGGTTCAACGACAA |
| | | | | | | GATCAACGGCCTGCTG |
| | | | | | | GCCGCACAGGACGAC |
| | | | | | | GTGCACGTGATCGGGA |
| | | | | | | TCGACCGAGGGGAAC |
| | | | | | | GCCACCTGCTGTACTA |
| | | | | | | CACCGTGGTGAACGGC |
| | | | | | | AAGGGCGAGGTGGTG |
| | | | | | | GAACAGGGCAGCCTG |
| | | | | | | AACCAGGTGGCCACAG |
| | | | | | | ACCAGGGGTACGTGGT |
| | | | | | | GGACTACCAACAGAAA |
| | | | | | | CTGCACGCCAAAGAGA |
| | | | | | | AGGAGAGAGACCAGG |
| | | | | | | CCAGGAAGAACTGGA |
| | | | | | | GCACCATCGAAAACAT |
| | | | | | | CAAGGAGCTGAAGGC |
| | | | | | | CGGGTACCTGAGCCAG |
| | | | | | | GTGGTGCACAAACTGG |
| | | | | | | CCCAGCTGATCGTGAA |
| | | | | | | ACACAACGCCATCGTG |
| | | | | | | TGCCTGGAGGACCTGA |
| | | | | | | ACTTCGGATTCAAGAG |
| | | | | | | GGGACGGTTCAAAGTG |
| | | | | | | GAGAAGCAGGTGTACC |
| | | | | | | AGAAGTTCGAGAAAGC |
| | | | | | | CCTGATCGACAAGCTG |
| | | | | | | AACTACCTGGTGTTCA |
| | | | | | | AGGAACGGGGGGCCA |
| | | | | | | CCCAGGCAGGCGGAT |
| | | | | | | ACCTGAACGCCTACCA |
| | | | | | | GCTGGCCGCACCATTC |
| | | | | | | GAGAGCTTCGAAAAAC |
| | | | | | | TGGGCAAGCAGACCG |
| | | | | | | GCATCCTGTACTACGT |
| | | | | | | GCGGAGCGACTACACC |
| | | | | | | AGCAAGATCGACCCCG |
| | | | | | | CCACAGGCTTCGTGGA |
| | | | | | | CTTCCTGAAGCCCAAA |
| | | | | | | TACGAAAGCATGGCAA |
| | | | | | | AGAGCAAAGTGTTCTT |
| | | | | | | CGAGAGCTTCGAAAGA |
| | | | | | | ATCCAGTGGAACCAGG |
| | | | | | | CCAAAGGCTACTTCGA |
| | | | | | | GTTCGAATTCGACTAC |
| | | | | | | AAGAAAATGTGCCCCA |
| | | | | | | GCAGGAAGTTCGGCG |
| | | | | | | ACTACCGCACCCGGTG |
| | | | | | | GGTGGTGTGCACATTC |
| | | | | | | GGCGACACACGGTACC |
| | | | | | | AGAACAGGCGCAACAA |
| | | | | | | AAGCAGCGGCCAATG |
| | | | | | | GGAGACCGAGACAATC |
| | | | | | | GACGTGACCGCCCAGC |
| | | | | | | TGAAGGCCCTGTTCGC |
| | | | | | | GGCCTACGGCATCACC |
| | | | | | | TACAACCAGGAGGACA |
| | | | | | | ACATCAAGGACGCCAT |
| | | | | | | CGCAGCCGTGAAGTAC |
| | | | | | | ACAAAATTCTACAAAC |
| | | | | | | AGCTGTACTGGCTGCT |
| | | | | | | GAGACTGACGCTGAGC |
| | | | | | | CTGCGGCACAGCGTGA |
| | | | | | | CCGGGACCGACGAGG |
| | | | | | | ACTTCATCCTGAGCCC |
| | | | | | | CGTGGCCGACGAGAA |
| | | | | | | CGGCGTGTTCTTCGAC |
| | | | | | | AGCAGGAAGGCCACG |
| | | | | | | GACAAACAGCCCAAGG |
| | | | | | | ACGCAGACGCGAACG |
| | | | | | | GCGCCTACCACATCGC |
| | | | | | | CCTGAAGGGACTGTGG |
| | | | | | | AACCTGCAGCAGATCA |
| | | | | | | GGCAGCACGACTGGA |
| | | | | | | ACGTGGAAAAACCAAA |
| | | | | | | AAAGCTGAACCTGGCC |
| | | | | | | ATGAAAAACGAAGAGT |
| | | | | | | GGTTCGGCTTCGCACA |
| | | | | | | GAAGAAGAAATTCAGG |
| | | | | | | GCCTCTGGCGGAAAAA |
| | | | | | | GACCTGCCGCCACAAA |
| | | | | | | GAAAGCCGGACAGGC |
| | | | | | | CAAGAAAAAGAAGTGA |
| | | | | | | CCACACCCCCATTCCC |
| | | | | | | CCACTCCAGATAGAAC |
| | | | | | | TTCAGTTATATCTCAC |
| | | | | | | GTGTCTGGAGTTGGAT |
| | | | | | | CCAAAAAAAAAAAAAA |
| | | | | | | AAAAAAAAAAAAAAAA |
| | | | | | | AAAAAAAAAAAAAAAA |
| | | | | | | AAAAAAAAAAAAAAAA |
| | | | | | | AAAAAAAAAAAAAAAA |
| | | | | | | AAAAAAAAAAAAAAAA |
| | | | | | | AAAAAAAAAAAAA |
| MG29-1 | — | 4970 | MG29-1-hRosa26- | Nucleotide | N.A. | /AltR1/rUrArArUrUrUrCr |
| sgRNA | | | sgRNA-A1 | | | UrArCrUrGrUrUrGrUrAr |
| targeting | | | | | | GrArUrArGrGrUrCrArC |
| hRosa26 | | | | | | rUrGrUrCrCrUrArGrCrU |
| | | | | | | rCrUrCrCrA/AltR2/ |
| MG29-1 | — | 4971 | MG29-1-hRosa26- | Nucleotide | N.A. | /AltR1/rUrArArUrUrUrCr |
| sgRNA | | | sgRNA-B1 | | | UrArCrUrGrUrUrGrUrAr |
| targeting | | | | | | GrArUrUrUrUrUrUrArGr |
| hRosa26 | | | | | | GrCrCrGrGrGrCrGrCrG |
| | | | | | | rGrUrGrGrC/AltR2/ |
| MG29-1 | — | 4972 | MG29-1-hRosa26- | Nucleotide | N.A. | /AltR1/rUrArArUrUrUrCr |
| sgRNA | | | sgRNA-C1 | | | UrArCrUrGrUrUrGrUrAr |
| targeting | | | | | | GrArUrUrArGrGrCrCrG |
| hRosa26 | | | | | | rGrGrCrGrCrGrGrUrGr |
| | | | | | | GrCrUrCrArC/AltR2/ |
| MG29-1 | — | 4973 | MG29-1-hRosa26- | Nucleotide | N.A. | /AltR1/rUrArArUrUrUrCr |
| sgRNA | | | sgRNA-D1 | | | UrArCrUrGrUrUrGrUrAr |
| targeting | | | | | | GrArUrArGrGrCrCrGrG |
| hRosa26 | | | | | | rGrCrGrCrGrGrUrGrGr |
| | | | | | | CrUrCrArCrA/AltR2/ |
| MG29-1 | — | 4974 | MG29-1-hRosa26- | Nucleotide | N.A. | /AltR1/rUrArArUrUrUrCr |
| sgRNA | | | sgRNA-E1 | | | UrArCrUrGrUrUrGrUrAr |
| targeting | | | | | | GrArUrGrGrCrCrGrGrG |
| hRosa26 | | | | | | rCrGrCrGrGrUrGrGrCr |
| | | | | | | UrCrArCrArC/AltR2/ |
| MG29-1 | — | 4975 | MG29-1-hRosa26- | Nucleotide | N.A | /AltR1/rUrArArUrUrUrCr |
| sgRNA | | | sgRNA-F1 | | | UrArCrUrGrUrUrGrUrAr |
| targeting | | | | | | GrArUrGrGrArGrGrCrC |
| hRosa26 | | | | | | rGrArGrGrCrArGrGrCr |
| | | | | | | ArGrArUrCrA/AltR2/ |
| MG29-1 | — | 4976 | MG29-1-hRosa26- | Nucleotide | N.A. | /AltR1/rUrArArUrUrUrCr |
| sgRNA | | | sgRNA-G1 | | | UrArCrUrGrUrUrGrUrAr |
| targeting | | | | | | GrArUrArGrGrUrCrArG |
| hRosa26 | | | | | | rGrArGrUrUrCrArArGr |
| | | | | | | ArCrCrArGrC/AltR2/ |
| MG29-1 | — | 4977 | MG29-1-hRosa26- | Nucleotide | N.A. | /AltR1/rUrArArUrUrUrCr |
| sgRNA | | | sgRNA-H1 | | | UrArCrUrGrUrUrGrUrAr |
| targeting | | | | | | GrArUrCrArGrUrGrArG |
| hRosa26 | | | | | | rCrUrGrArGrArUrCrGr |
| | | | | | | UrGrCrCrArU/AltR2/ |
| MG29-1 | — | 4978 | MG29-1-hRosa26- | Nucleotide | N.A. | /AltR1/rUrArArUrUrUrCr |
| sgRNA | | | sgRNA-A2 | | | UrArCrUrGrUrUrGrUrAr |
| targeting | | | | | | GrArUrUrUrUrUrUrUrGr |
| hRosa26 | | | | | | GrUrUrGrGrGrUrGrUrG |
| | | | | | | rGrUrGrGrC/AltR2/ |
| MG29-1 | — | 4979 | MG29-1-hRosa26- | Nucleotide | N.A. | /AltR1/rUrArArUrUrUrCr |
| sgRNA | | | sgRNA-B2 | | | UrArCrUrGrUrUrGrUrAr |
| targeting | | | | | | GrArUrUrUrGrGrUrUrG |
| hRosa26 | | | | | | rGrGrUrGrUrGrGrUrGr |
| | | | | | | GrCrUrCrArC/AltR2/ |
| MG29-1 | — | 4980 | MG29-1-hRosa26- | Nucleotide | N.A. | /AltR1/rUrArArUrUrUrCr |
| sgRNA | | | sgRNA-C2 | | | UrArCrUrGrUrUrGrUrAr |
| targeting | | | | | | GrArUrUrGrGrUrUrGrG |
| hRosa26 | | | | | | rGrUrGrUrGrGrUrGrGr |
| | | | | | | CrUrCrArCrA/AltR2/ |
| MG29-1 | — | 4981 | MG29-1-hRosa26- | Nucleotide | N.A. | /AltR1/rUrArArUrUrUrCr |
| sgRNA | | | sgRNA-D2 | | | UrArCrUrGrUrUrGrUrAr |
| targeting | | | | | | GrArUrGrGrUrUrGrGrG |
| hRosa26 | | | | | | rUrGrUrGrGrUrGrGrCr |
| | | | | | | UrCrArCrArC/AltR2/ |
| MG29-1 | — | 4982 | MG29-1-hRosa26- | Nucleotide | N.A. | /AltR1/rUrArArUrUrUrCr |
| sgRNA | | | sgRNA-E2 | | | UrArCrUrGrUrUrGrUrAr |
| targeting | | | | | | GrArUrGrUrUrGrGrGrU |
| hRosa26 | | | | | | rGrUrGrGrUrGrGrCrUr |
| | | | | | | CrArCrArCrC/AltR2/ |
| MG29-1 | — | 4983 | MG29-1-hRosa26- | Nucleotide | N.A. | /AltR1/rUrArArUrUrUrCr |
| sgRNA | | | sgRNA-F2 | | | UrArCrUrGrUrUrGrUrAr |
| targeting | | | | | | GrArUrGrArArGrGrArU |
| hRosa26 | | | | | | rGrArGrGrCrArGrArAr |
| | | | | | | GrGrArUrCrA/AltR2/ |
| MG29-1 | — | 4984 | MG29-1-hRosa26- | Nucleotide | N.A. | /AltR1/rUrArArUrUrUrCr |
| sgRNA | | | sgRNA-G2 | | | UrArCrUrGrUrUrGrUrAr |
| targeting | | | | | | GrArUrGrGrArGrGrCrC |
| hRosa26 | | | | | | rArArGrGrCrGrGrGrCr |
| | | | | | | GrGrArUrCrA/AltR2/ |
| MG29-1 | — | 4985 | MG29-1-hRosa26- | Nucleotide | N.A. | /AltR1/rUrArArUrUrUrCr |
| sgRNA | | | sgRNA-H2 | | | UrArCrUrGrUrUrGrUrAr |
| targeting | | | | | | GrArUrCrGrCrCrArUrUr |
| hRosa26 | | | | | | CrUrCrCrUrGrCrCrUrCr |
| | | | | | | ArGrCrCrU/AltR2/ |
| MG29-1 | — | 4986 | MG29-1-hRosa26- | Nucleotide | N.A. | /AltR1/rUrArArUrUrUrCr |
| sgRNA | | | sgRNA-A3 | | | UrArCrUrGrUrUrGrUrAr |
| targeting | | | | | | GrArUrUrUrGrUrGrUrU |
| hRosa26 | | | | | | rUrUrUrArGrUrArGrAr |
| | | | | | | GrArArGrGrG/AltR2/ |
| MG29-1 | — | 4987 | MG29-1-hRosa26- | Nucleotide | N.A. | /AltR1/rUrArArUrUrUrCr |
| sgRNA | | | sgRNA-B3 | | | UrArCrUrGrUrUrGrUrAr |
| targeting | | | | | | GrArUrUrGrUrGrUrUrU |
| hRosa26 | | | | | | rUrUrArGrUrArGrArGr |
| | | | | | | ArArGrGrGrG/AltR2/ |
| MG29-1 | — | 4988 | MG29-1-hRosa26- | Nucleotide | N.A. | /AltR1/rUrArArUrUrUrCr |
| sgRNA | | | sgRNA-C3 | | | UrArCrUrGrUrUrGrUrAr |
| targeting | | | | | | GrArUrGrUrGrUrUrUrU |
| hRosa26 | | | | | | rUrArGrUrArGrArGrAr |
| | | | | | | ArGrGrGrGrU/AltR2/ |
| MG29-1 | — | 4989 | MG29-1-hRosa26- | Nucleotide | N.A. | /AltR1/rUrArArUrUrUrCr |
| sgRNA | | | sgRNA-D3 | | | UrArCrUrGrUrUrGrUrAr |
| targeting | | | | | | GrArUrUrGrUrUrUrUrUr |
| hRosa26 | | | | | | ArGrUrArGrArGrArArG |
| | | | | | | rGrGrGrUrU/AltR2/ |
| MG29-1 | — | 4990 | MG29-1-hRosa26- | Nucleotide | N.A. | /AltR1/rUrArArUrUrUrCr |
| sgRNA | | | sgRNA-E3 | | | UrArCrUrGrUrUrGrUrAr |
| targeting | | | | | | GrArUrUrArGrUrArGrA |
| hRosa26 | | | | | | rGrArArGrGrGrGrUrUr |
| | | | | | | UrCrArCrCrG/AltR2/ |
| MG29-1 | — | 4991 | MG29-1-hRosa26- | Nucleotide | N.A. | /AltR1/rUrArArUrUrUrCr |
| sgRNA | | | sgRNA-F3 | | | UrArCrUrGrUrUrGrUrAr |
| targeting | | | | | | GrArUrArGrUrArGrArG |
| hRosa26 | | | | | | rArArGrGrGrGrUrUrUr |
| | | | | | | CrArCrCrGrU/AltR2/ |
| MG29-1 | — | 4992 | MG29-1-hRosa26- | Nucleotide | N.A. | /AltR1/rUrArArUrUrUrCr |
| sgRNA | | | sgRNA-G3 | | | UrArCrUrGrUrUrGrUrAr |
| targeting | | | | | | GrArUrGrUrArGrArGrA |
| hRosa26 | | | | | | rArGrGrGrGrUrUrUrCr |
| | | | | | | ArCrCrGrUrG/AltR2/ |
| MG29-1 | — | 4993 | MG29-1-hRosa26- | Nucleotide | N.A. | /AltR1/rUrArArUrUrUrCr |
| sgRNA | | | sgRNA-H3 | | | UrArCrUrGrUrUrGrUrAr |
| targeting | | | | | | GrArUrArCrCrGrUrGrU |
| hRosa26 | | | | | | rUrArGrCrCrArGrGrAr |
| | | | | | | UrGrGrUrCrU/AltR2/ |
| MG29-1 | — | 4994 | MG29-1-hRosa26- | Nucleotide | N.A. | /AltR1/rUrArArUrUrUrCr |
| sgRNA | | | sgRNA-A4 | | | UrArCrUrGrUrUrGrUrAr |
| targeting | | | | | | GrArUrGrArArCrUrCrCr |
| hRosa26 | | | | | | UrUrGrGrCrUrCrArArG |
| | | | | | | rUrGrArUrC/AltR2/ |
| MG29-1 | — | 4995 | MG29-1-hRosa26- | Nucleotide | N.A. | /AltR1/rUrArArUrUrUrCr |
| sgRNA | | | sgRNA-B4 | | | UrArCrUrGrUrUrGrUrAr |
| targeting | | | | | | GrArUrArArCrUrCrCrUr |
| hRosa26 | | | | | | UrGrGrCrUrCrArArGrU |
| | | | | | | rGrArUrCrC/AltR2/ |
| MG29-1 | — | 4996 | MG29-1-hRosa26- | Nucleotide | N.A. | /AltR1/rUrArArUrUrUrCr |
| sgRNA | | | sgRNA-C4 | | | UrArCrUrGrUrUrGrUrAr |
| targeting | | | | | | GrArUrUrUrUrUrUrUrUr |
| hRosa26 | | | | | | UrCrUrUrGrArGrUrCrAr |
| | | | | | | GrArGrUrC/AltR2/ |
| MG29-1 | — | 4997 | MG29-1-hRosa26- | Nucleotide | N.A. | /AltR1/rUrArArUrUrUrCr |
| sgRNA | | | sgRNA-D4 | | | UrArCrUrGrUrUrGrUrAr |
| targeting | | | | | | GrArUrUrUrUrUrCrUrUr |
| hRosa26 | | | | | | GrArGrUrCrArGrArGrU |
| | | | | | | rCrUrUrGrC/AltR2/ |
| MG29-1 | — | 4998 | MG29-1-hRosa26- | Nucleotide | N.A. | /AltR1/rUrArArUrUrUrCr |
| sgRNA | | | sgRNA-E4 | | | UrArCrUrGrUrUrGrUrAr |
| targeting | | | | | | GrArUrUrUrUrCrUrUrGr |
| hRosa26 | | | | | | ArGrUrCrArGrArGrUrC |
| | | | | | | rUrUrGrCrU/AltR2/ |
| MG29-1 | — | 4999 | MG29-1-hRosa26- | Nucleotide | N.A. | /AltR1/rUrArArUrUrUrCr |
| sgRNA | | | sgRNA-F4 | | | UrArCrUrGrUrUrGrUrAr |
| targeting | | | | | | GrArUrUrUrCrUrUrGrAr |
| hRosa26 | | | | | | GrUrCrArGrArGrUrCrU |
| | | | | | | rUrGrCrUrC/AltR2/ |
| MG29-1 | — | 5000 | MG29-1-hRosa26- | Nucleotide | N.A. | /AltR1/rUrArArUrUrUrCr |
| sgRNA | | | sgRNA-G4 | | | UrArCrUrGrUrUrGrUrAr |
| targeting | | | | | | GrArUrUrCrUrUrGrArG |
| hRosa26 | | | | | | rUrCrArGrArGrUrCrUrU |
| | | | | | | rGrCrUrCrC/AltR2/ |
| MG29-1 | — | 5001 | MG29-1-hRosa26- | Nucleotide | N.A. | /AltR1/rUrArArUrUrUrCr |
| sgRNA | | | sgRNA-H4 | | | UrArCrUrGrUrUrGrUrAr |
| targeting | | | | | | GrArUrCrUrUrGrArGrU |
| hRosa26 | | | | | | rCrArGrArGrUrCrUrUr |
| | | | | | | GrCrUrCrCrG/AltR2/ |
| MG29-1 | — | 5002 | MG29-1-hRosa26- | Nucleotide | N.A. | /AltR1/rUrArArUrUrUrCr |
| sgRNA | | | sgRNA-A5 | | | UrArCrUrGrUrUrGrUrAr |
| targeting | | | | | | GrArUrUrUrGrArGrUrC |
| hRosa26 | | | | | | rArGrArGrUrCrUrUrGr |
| | | | | | | CrUrCrCrGrU/AltR2/ |
| MG29-1 | — | 5003 | MG29-1-hRosa26- | Nucleotide | N.A. | /AltR1/rUrArArUrUrUrCr |
| sgRNA | | | sgRNA-B5 | | | UrArCrUrGrUrUrGrUrAr |
| targeting | | | | | | GrArUrUrGrUrArUrUrUr |
| hRosa26 | | | | | | UrUrArGrUrArGrArGrA |
| | | | | | | rUrGrGrGrG/AltR2/ |
| MG29-1 | — | 5004 | MG29-1-hRosa26- | Nucleotide | N.A. | /AltR1/rUrArArUrUrUrCr |
| sgRNA | | | sgRNA-C5 | | | UrArCrUrGrUrUrGrUrAr |
| targeting | | | | | | GrArUrGrUrArUrUrUrUr |
| hRosa26 | | | | | | UrArGrUrArGrArGrArU |
| | | | | | | rGrGrGrGrU/AltR2/ |
| MG29-1 | — | 5005 | MG29-1-hRosa26- | Nucleotide | N.A. | /AltR1/rUrArArUrUrUrCr |
| sgRNA | | | sgRNA-D5 | | | UrArCrUrGrUrUrGrUrAr |
| targeting | | | | | | GrArUrUrArUrUrUrUrUr |
| hRosa26 | | | | | | ArGrUrArGrArGrArUrG |
| | | | | | | rGrGrGrUrU/AltR2/ |
| MG29-1 | — | 5006 | MG29-1-hRosa26- | Nucleotide | N.A. | /AltR1/rUrArArUrUrUrCr |
| sgRNA | | | sgRNA-E5 | | | UrArCrUrGrUrUrGrUrAr |
| targeting | | | | | | GrArUrUrArGrUrArGrA |
| hRosa26 | | | | | | rGrArUrGrGrGrGrUrUr |
| | | | | | | UrCrArCrCrA/AltR2/ |
| MG29-1 | — | 5007 | MG29-1-hRosa26- | Nucleotide | N.A. | /AltR1/rUrArArUrUrUrCr |
| sgRNA | | | sgRNA-F5 | | | UrArCrUrGrUrUrGrUrAr |
| targeting | | | | | | GrArUrArGrUrArGrArG |
| hRosa26 | | | | | | rArUrGrGrGrGrUrUrUr |
| | | | | | | CrArCrCrArC/AltR2/ |
| MG29-1 | — | 5008 | MG29-1-hRosa26- | Nucleotide | N.A. | /AltR1/rUrArArUrUrUrCr |
| sgRNA | | | sgRNA-G5 | | | UrArCrUrGrUrUrGrUrAr |
| targeting | | | | | | GrArUrGrUrArGrArGrA |
| hRosa26 | | | | | | rUrGrGrGrGrUrUrUrCr |
| | | | | | | ArCrCrArCrG/AltR2/ |
| MG29-1 | — | 5009 | MG29-1-hRosa26- | Nucleotide | N.A. | /AltR1/rUrArArUrUrUrCr |
| sgRNA | | | sgRNA-H5 | | | UrArCrUrGrUrUrGrUrAr |
| targeting | | | | | | GrArUrArCrCrArCrGrUr |
| hRosa26 | | | | | | UrGrGrUrCrArGrGrCrU |
| | | | | | | rGrGrUrCrU/AltR2/ |
| MG29-1 | — | 5010 | MG29-1-hRosa26- | Nucleotide | N.A. | /AltR1/rUrArArUrUrUrCr |
| sgRNA | | | sgRNA-A6 | | | UrArCrUrGrUrUrGrUrAr |
| targeting | | | | | | GrArUrArCrCrUrUrCrCr |
| hRosa26 | | | | | | UrGrUrGrArCrUrUrCrCr |
| | | | | | | UrGrGrArG/AltR2/ |
| MG29-1 | — | 5011 | MG29-1-hRosa26- | Nucleotide | N.A. | /AltR1/rUrArArUrUrUrCr |
| sgRNA | | | sgRNA-B6 | | | UrArCrUrGrUrUrGrUrAr |
| targeting | | | | | | GrArUrCrCrUrUrCrCrUr |
| hRosa26 | | | | | | GrUrGrArCrUrUrCrCrUr |
| | | | | | | GrGrArGrA/AltR2/ |
| MG29-1 | — | 5012 | MG29-1-hRosa26- | Nucleotide | N.A. | /AltR1/rUrArArUrUrUrCr |
| sgRNA | | | sgRNA-C6 | | | UrArCrUrGrUrUrGrUrAr |
| targeting | | | | | | GrArUrUrGrGrGrGrArA |
| hRosa26 | | | | | | rGrGrUrUrCrUrCrUrGr |
| | | | | | | UrCrUrGrCrC/AltR2/ |
| DNA | — | 5013 | MG29-1-hRosa26- | Nucleotide | N.A. | AGGTCACTGTCCTAGC |
| sequence | | | target site-A1 | | | TCTCCA |
| of | | | | | | |
| hRosa26 | | | | | | |
| target | | | | | | |
| site | | | | | | |
| DNA | — | 5014 | MG29-1-hRosa26- | Nucleotide | N.A. | TTTTTAGGCCGGGCGC |
| sequence | | | target site-B1 | | | GGTGGC |
| of | | | | | | |
| hRosa26 | | | | | | |
| target | | | | | | |
| site | | | | | | |
| DNA | — | 5015 | MG29-1-hRosa26- | Nucleotide | N.A. | TAGGCCGGGCGCGGT |
| sequence | | | target site-C1 | | | GGCTCAC |
| of | | | | | | |
| hRosa26 | | | | | | |
| target | | | | | | |
| site | | | | | | |
| DNA | — | 5016 | MG29-1-hRosa26- | Nucleotide | N.A. | AGGCCGGGCGCGGTG |
| sequence | | | target site-D1 | | | GCTCACA |
| of | | | | | | |
| hRosa26 | | | | | | |
| target | | | | | | |
| site | | | | | | |
| DNA | — | 5017 | MG29-1-hRosa26- | Nucleotide | N.A. | GGCCGGGCGCGGTGG |
| sequence | | | target site-E1 | | | CTCACAC |
| of | | | | | | |
| hRosa26 | | | | | | |
| target | | | | | | |
| site | | | | | | |
| DNA | — | 5018 | MG29-1-hRosa26- | Nucleotide | N.A. | GGAGGCCGAGGCAGG |
| sequence | | | target site-F1 | | | CAGATCA |
| of | | | | | | |
| hRosa26 | | | | | | |
| target | | | | | | |
| site | | | | | | |
| DNA | — | 5019 | MG29-1-hRosa26- | Nucleotide | N.A. | AGGTCAGGAGTTCAAG |
| sequence | | | target site-G1 | | | ACCAGC |
| of | | | | | | |
| hRosa26 | | | | | | |
| target | | | | | | |
| site | | | | | | |
| DNA | — | 5020 | MG29-1-hRosa26- | Nucleotide | N.A. | CAGTGAGCTGAGATCG |
| sequence | | | target site-H1 | | | TGCCAT |
| of | | | | | | |
| hRosa26 | | | | | | |
| target | | | | | | |
| site | | | | | | |
| DNA | — | 5021 | MG29-1-hRosa26- | Nucleotide | N.A. | TTTTTTGGTTGGGTGT |
| sequence | | | target site-A2 | | | GGTGGC |
| of | | | | | | |
| hRosa26 | | | | | | |
| target | | | | | | |
| site | | | | | | |
| DNA | — | 5022 | MG29-1-hRosa26- | Nucleotide | N.A. | TTGGTTGGGTGTGGTG |
| sequence | | | target site-B2 | | | GCTCAC |
| of | | | | | | |
| hRosa26 | | | | | | |
| target | | | | | | |
| site | | | | | | |
| DNA | — | 5023 | MG29-1-hRosa26- | Nucleotide | N.A. | TGGTTGGGTGTGGTGG |
| sequence | | | target site-C2 | | | CTCACA |
| of | | | | | | |
| hRosa26 | | | | | | |
| target | | | | | | |
| site | | | | | | |
| DNA | — | 5024 | MG29-1-hRosa26- | Nucleotide | N.A. | GGTTGGGTGTGGTGG |
| sequence | | | target site-D2 | | | CTCACAC |
| of | | | | | | |
| hRosa26 | | | | | | |
| target | | | | | | |
| site | | | | | | |
| DNA | — | 5025 | MG29-1-hRosa26- | Nucleotide | N.A. | GTTGGGTGTGGTGGCT |
| sequence | | | target site-E2 | | | CACACC |
| of | | | | | | |
| hRosa26 | | | | | | |
| target | | | | | | |
| site | | | | | | |
| DNA | — | 5026 | MG29-1-hRosa26- | Nucleotide | N.A. | GAAGGATGAGGCAGA |
| sequence | | | target site-F2 | | | AGGATCA |
| of | | | | | | |
| hRosa26 | | | | | | |
| target | | | | | | |
| site | | | | | | |
| DNA | — | 5027 | MG29-1-hRosa26- | Nucleotide | N.A. | GGAGGCCAAGGCGGG |
| sequence | | | target site-G2 | | | CGGATCA |
| of | | | | | | |
| hRosa26 | | | | | | |
| target | | | | | | |
| site | | | | | | |
| DNA | — | 5028 | MG29-1-hRosa26- | Nucleotide | N.A. | CGCCATTCTCCTGCCT |
| sequence | | | target site-H2 | | | CAGCCT |
| of | | | | | | |
| hRosa26 | | | | | | |
| target | | | | | | |
| site | | | | | | |
| DNA | — | 5029 | MG29-1-hRosa26- | Nucleotide | N.A. | TTGTGTTTTTAGTAGA |
| sequence | | | target site-A3 | | | GAAGGG |
| of | | | | | | |
| hRosa26 | | | | | | |
| target | | | | | | |
| site | | | | | | |
| DNA | — | 5030 | MG29-1-hRosa26- | Nucleotide | N.A. | TGTGTTTTTAGTAGAG |
| sequence | | | target site-B3 | | | AAGGGG |
| of | | | | | | |
| hRosa26 | | | | | | |
| target | | | | | | |
| site | | | | | | |
| DNA | — | 5031 | MG29-1-hRosa26- | Nucleotide | N.A. | GTGTTTTTAGTAGAGA |
| sequence | | | target site-C3 | | | AGGGGT |
| of | | | | | | |
| hRosa26 | | | | | | |
| target | | | | | | |
| site | | | | | | |
| DNA | — | 5032 | MG29-1-hRosa26- | Nucleotide | N.A. | TGTTTTTAGTAGAGAA |
| sequence | | | target site-D3 | | | GGGGTT |
| of | | | | | | |
| hRosa26 | | | | | | |
| target | | | | | | |
| site | | | | | | |
| DNA | — | 5033 | MG29-1-hRosa26- | Nucleotide | N.A. | TAGTAGAGAAGGGGTT |
| sequence | | | target site-E3 | | | TCACCG |
| of | | | | | | |
| hRosa26 | | | | | | |
| target | | | | | | |
| site | | | | | | |
| DNA | — | 5034 | MG29-1-hRosa26- | Nucleotide | N.A. | AGTAGAGAAGGGGTTT |
| sequence | | | target site-F3 | | | CACCGT |
| of | | | | | | |
| hRosa26 | | | | | | |
| target | | | | | | |
| site | | | | | | |
| DNA | — | 5035 | MG29-1-hRosa26- | Nucleotide | N.A. | GTAGAGAAGGGGTTTC |
| sequence | | | target site-G3 | | | ACCGTG |
| of | | | | | | |
| hRosa26 | | | | | | |
| target | | | | | | |
| site | | | | | | |
| DNA | — | 5036 | MG29-1-hRosa26- | Nucleotide | N.A. | ACCGTGTTAGCCAGGA |
| sequence | | | target site-H3 | | | TGGTCT |
| of | | | | | | |
| hRosa26 | | | | | | |
| target | | | | | | |
| site | | | | | | |
| DNA | — | 5037 | MG29-1-hRosa26- | Nucleotide | N.A. | GAACTCCTTGGCTCAA |
| sequence | | | target site-A4 | | | GTGATC |
| of | | | | | | |
| hRosa26 | | | | | | |
| target | | | | | | |
| site | | | | | | |
| DNA | — | 5038 | MG29-1-hRosa26- | Nucleotide | N.A. | AACTCCTTGGCTCAAG |
| sequence | | | target site-B4 | | | TGATCC |
| of | | | | | | |
| hRosa26 | | | | | | |
| target | | | | | | |
| site | | | | | | |
| DNA | — | 5039 | MG29-1-hRosa26- | Nucleotide | N.A | TTTTTTTTCTTGAGTCA |
| sequence | | | target site-C4 | | | GAGTC |
| of | | | | | | |
| hRosa26 | | | | | | |
| target | | | | | | |
| site | | | | | | |
| DNA | — | 5040 | MG29-1-hRosa26- | Nucleotide | N.A. | TTTTCTTGAGTCAGAG |
| sequence | | | target site-D4 | | | TCTTGC |
| of | | | | | | |
| hRosa26 | | | | | | |
| -target | | | | | | |
| site | | | | | | |
| DNA | — | 5041 | MG29-1-hRosa26- | Nucleotide | N.A. | TTTCTTGAGTCAGAGT |
| sequence | | | target site-E4 | | | CTTGCT |
| of | | | | | | |
| hRosa26 | | | | | | |
| target | | | | | | |
| site | | | | | | |
| DNA | — | 5042 | MG29-1-hRosa26- | Nucleotide | N.A. | TTCTTGAGTCAGAGTC |
| sequence | | | target site-F4 | | | TTGCTC |
| of | | | | | | |
| hRosa26 | | | | | | |
| target | | | | | | |
| site | | | | | | |
| DNA | — | 5043 | MG29-1-hRosa26- | Nucleotide | N.A. | TCTTGAGTCAGAGTCT |
| sequence | | | target site-G4 | | | TGCTCC |
| of | | | | | | |
| hRosa26 | | | | | | |
| target | | | | | | |
| site | | | | | | |
| DNA | — | 5044 | MG29-1-hRosa26- | Nucleotide | N.A. | CTTGAGTCAGAGTCTT |
| sequence | | | target site-H4 | | | GCTCCG |
| of | | | | | | |
| hRosa26 | | | | | | |
| target | | | | | | |
| site | | | | | | |
| DNA | — | 5045 | MG29-1-hRosa26- | Nucleotide | N.A. | TTGAGTCAGAGTCTTG |
| sequence | | | target site-A5 | | | CTCCGT |
| of | | | | | | |
| hRosa26 | | | | | | |
| target | | | | | | |
| site | | | | | | |
| DNA | — | 5046 | MG29-1-hRosa26- | Nucleotide | N.A | TGTATTTTTAGTAGAG |
| sequence | | | target site-B5 | | | ATGGGG |
| of | | | | | | |
| hRosa26 | | | | | | |
| target | | | | | | |
| site | | | | | | |
| DNA | — | 5047 | MG29-1-hRosa26- | Nucleotide | N.A. | GTATTTTTAGTAGAGA |
| sequence | | | target site-C5 | | | TGGGGT |
| of | | | | | | |
| hRosa26 | | | | | | |
| target | | | | | | |
| site | | | | | | |
| DNA | — | 5048 | MG29-1-hRosa26- | Nucleotide | N.A. | TATTTTTAGTAGAGAT |
| sequence | | | target site-D5 | | | GGGGTT |
| of | | | | | | |
| hRosa26 | | | | | | |
| target | | | | | | |
| site | | | | | | |
| DNA | — | 5049 | MG29-1-hRosa26- | Nucleotide | N.A. | TAGTAGAGATGGGGTT |
| sequence | | | target site-E5 | | | TCACCA |
| of | | | | | | |
| hRosa26 | | | | | | |
| target | | | | | | |
| site | | | | | | |
| DNA | — | 5050 | MG29-1-hRosa26- | Nucleotide | N.A. | AGTAGAGATGGGGTTT |
| sequence | | | target site-F5 | | | CACCAC |
| of | | | | | | |
| hRosa26 | | | | | | |
| target | | | | | | |
| site | | | | | | |
| DNA | — | 5051 | MG29-1-hRosa26- | Nucleotide | N.A. | GTAGAGATGGGGTTTC |
| sequence | | | target site-G5 | | | ACCACG |
| of | | | | | | |
| hRosa26 | | | | | | |
| target | | | | | | |
| site | | | | | | |
| DNA | — | 5052 | MG29-1-hRosa26- | Nucleotide | N.A. | ACCACGTTGGTCAGGC |
| sequence | | | target site-H5 | | | TGGTCT |
| of | | | | | | |
| hRosa26 | | | | | | |
| target | | | | | | |
| site | | | | | | |
| DNA | — | 5053 | MG29-1-hRosa26- | Nucleotide | N.A. | ACCTTCCTGTGACTTC |
| sequence | | | target site-A6 | | | CTGGAG |
| of | | | | | | |
| hRosa26 | | | | | | |
| target | | | | | | |
| site | | | | | | |
| DNA | — | 5054 | MG29-1-hRosa26- | Nucleotide | N.A. | CCTTCCTGTGACTTCC |
| sequence | | | target site-B6 | | | TGGAGA |
| of | | | | | | |
| hRosa26 | | | | | | |
| target | | | | | | |
| site | | | | | | |
| DNA | — | 5055 | MG29-1-hRosa26- | Nucleotide | N.A. | TGGGGAAGGTTCTCTG |
| sequence | | | target site-C6 | | | TCTGCC |
| of | | | | | | |
| hRosa26 | | | | | | |
| target | | | | | | |
| site | | | | | | |
| MG29-1 | — | 5268 | MG29-1-FAS- | Nucleotide | N.A. | /AltR1/rUrArArUrUrUrCr |
| sgRNA | | | sgRNA-A1 | | | UrArCrUrGrUrUrGrUrAr |
| targeting | | | | | | GrArUrArGrGrUrArArA |
| FAS | | | | | | rCrArArCrCrGrArArCrU |
| | | | | | | rGrArUrGrA/AltR2/ |
| MG29-1 | — | 5269 | MG29-1-FAS- | Nucleotide | N.A. | /AltR1/rUrArArUrUrUrCr |
| sgRNA | | | sgRNA-B1 | | | UrArCrUrGrUrUrGrUrAr |
| targeting | | | | | | GrArUrCrCrUrGrArGrC |
| FAS | | | | | | rArArArGrArCrUrCrUrU |
| | | | | | | rGrCrUrArC/AltR2/ |
| MG29-1 | — | 5270 | MG29-1-FAS- | Nucleotide | N.A. | /AltR1/rUrArArUrUrUrCr |
| sgRNA | | | sgRNA-C1 | | | UrArCrUrGrUrUrGrUrAr |
| targeting | | | | | | GrArUrCrArGrArArCrG |
| FAS | | | | | | rUrGrGrCrArUrCrArArC |
| | | | | | | rArUrCrArC/AltR2/ |
| MG29-1 | — | 5271 | MG29-1-FAS- | Nucleotide | N.A. | /AltR1/rUrArArUrUrUrCr |
| sgRNA | | | sgRNA-D1 | | | UrArCrUrGrUrUrGrUrAr |
| targeting | | | | | | GrArUrUrCrArCrCrArGr |
| FAS | | | | | | CrUrCrCrCrArUrGrUrGr |
| | | | | | | ArUrGrUrU/AltR2/ |
| MG29-1 | — | 5272 | MG29-1-FAS- | Nucleotide | N.A. | /AltR1/rUrArArUrUrUrCr |
| sgRNA | | | sgRNA-E1 | | | UrArCrUrGrUrUrGrUrAr |
| targeting | | | | | | GrArUrUrGrUrGrUrCrU |
| FAS | | | | | | rArUrUrArGrArUrGrCrU |
| | | | | | | rCrArGrArG/AltR2/ |
| MG29-1 | — | 5273 | MG29-1-FAS- | Nucleotide | N.A. | /AltR1/rUrArArUrUrUrCr |
| sgRNA | | | sgRNA-F1 | | | UrArCrUrGrUrUrGrUrAr |
| targeting | | | | | | GrArUrGrUrGrUrCrUrA |
| FAS | | | | | | rUrUrArGrArUrGrCrUrC |
| | | | | | | rArGrArGrU/AltR2/ |
| MG29-1 | — | 5274 | MG29-1-FAS- | Nucleotide | N.A. | /AltR1/rUrArArUrUrUrCr |
| sgRNA | | | sgRNA-G1 | | | UrArCrUrGrUrUrGrUrAr |
| targeting | | | | | | GrArUrUrGrUrCrUrArUr |
| FAS | | | | | | UrArGrArUrGrCrUrCrAr |
| | | | | | | GrArGrUrG/AltR2/ |
| MG29-1 | — | 5275 | MG29-1-FAS- | Nucleotide | N.A. | /AltR1/rUrArArUrUrUrCr |
| sgRNA | | | sgRNA-H1 | | | UrArCrUrGrUrUrGrUrAr |
| targeting | | | | | | GrArUrGrCrArUrCrUrG |
| FAS | | | | | | rUrCrArCrUrGrCrArCrU |
| | | | | | | rUrArCrCrA/AltR2/ |
| MG29-1 | — | 5276 | MG29-1-FAS- | Nucleotide | N.A. | /AltR1/rUrArArUrUrUrCr |
| sgRNA | | | sgRNA-A2 | | | UrArCrUrGrUrUrGrUrAr |
| targeting | | | | | | GrArUrCrArUrCrUrGrUr |
| FAS | | | | | | CrArCrUrGrCrArCrUrUr |
| | | | | | | ArCrCrArC/AltR2/ |
| MG29-1 | — | 5277 | MG29-1-FAS- | Nucleotide | N.A. | /AltR1/rUrArArUrUrUrCr |
| sgRNA | | | sgRNA-B2 | | | UrArCrUrGrUrUrGrUrAr |
| targeting | | | | | | GrArUrArGrUrArGrArC |
| FAS | | | | | | rUrGrUrUrArGrUrGrCr |
| | | | | | | CrArUrGrArG/AltR2/ |
| MG29-1 | — | 5278 | MG29-1-FAS- | Nucleotide | N.A. | /AltR1/rUrArArUrUrUrCr |
| sgRNA | | | sgRNA-C2 | | | UrArCrUrGrUrUrGrUrAr |
| targeting | | | | | | GrArUrArUrUrUrUrArCr |
| FAS | | | | | | ArGrGrUrUrCrUrUrArCr |
| | | | | | | GrUrCrUrG/AltR2/ |
| MG29-1 | — | 5279 | MG29-1-FAS- | Nucleotide | N.A. | /AltR1/rUrArArUrUrUrCr |
| sgRNA | | | sgRNA-D2 | | | UrArCrUrGrUrUrGrUrAr |
| targeting | | | | | | GrArUrUrUrUrUrArCrAr |
| FAS | | | | | | GrGrUrUrCrUrUrArCrG |
| | | | | | | rUrCrUrGrU/AltR2/ |
| MG29-1 | — | 5280 | MG29-1-FAS- | Nucleotide | N.A. | /AltR1/rUrArArUrUrUrCr |
| sgRNA | | | sgRNA-E2 | | | UrArCrUrGrUrUrGrUrAr |
| targeting | | | | | | GrArUrArCrArGrGrUrU |
| FAS | | | | | | rCrUrUrArCrGrUrCrUrG |
| | | | | | | rUrUrGrCrU/AltR2/ |
| MG29-1 | — | 5281 | MG29-1-FAS- | Nucleotide | N.A. | /AltR1/rUrArArUrUrUrCr |
| sgRNA | | | sgRNA-F2 | | | UrArCrUrGrUrUrGrUrAr |
| targeting | | | | | | GrArUrCrArGrGrUrUrC |
| FAS | | | | | | rUrUrArCrGrUrCrUrGrU |
| | | | | | | rUrGrCrUrA/AltR2/ |
| MG29-1 | — | 5282 | MG29-1-FAS- | Nucleotide | N.A. | /AltR1/rUrArArUrUrUrCr |
| sgRNA | | | sgRNA-G2 | | | UrArCrUrGrUrUrGrUrAr |
| targeting | | | | | | GrArUrGrUrGrUrArArC |
| FAS | | | | | | rArUrArCrCrUrGrGrAr |
| | | | | | | GrGrArCrArG/AltR2/ |
| MG29-1 | — | 5283 | MG29-1-FAS- | Nucleotide | N.A. | /AltR1/rUrArArUrUrUrCr |
| sgRNA | | | sgRNA-H2 | | | UrArCrUrGrUrUrGrUrAr |
| targeting | | | | | | GrArUrUrGrUrArArCrAr |
| FAS | | | | | | UrArCrCrUrGrGrArGrG |
| | | | | | | rArCrArGrG/AltR2/ |
| MG29-1 | — | 5284 | MG29-1-FAS- | Nucleotide | N.A. | /AltR1/rUrArArUrUrUrCr |
| sgRNA | | | sgRNA-A3 | | | UrArCrUrGrUrUrGrUrAr |
| targeting | | | | | | GrArUrGrGrArCrGrArU |
| FAS | | | | | | rArArUrCrUrArGrCrArA |
| | | | | | | rCrArGrArC/AltR2/ |
| MG29-1 | — | 5285 | MG29-1-FAS- | Nucleotide | N.A. | /AltR1/rUrArArUrUrUrCr |
| sgRNA | | | sgRNA-B3 | | | UrArCrUrGrUrUrGrUrAr |
| targeting | | | | | | GrArUrGrArCrGrArUrA |
| FAS | | | | | | rArUrCrUrArGrCrArArC |
| | | | | | | rArGrArCrG/AltR2/ |
| MG29-1 | — | 5286 | MG29-1-FAS- | Nucleotide | N.A. | /AltR1/rUrArArUrUrUrCr |
| sgRNA | | | sgRNA-C3 | | | UrArCrUrGrUrUrGrUrAr |
| targeting | | | | | | GrArUrUrUrCrCrUrUrGr |
| FAS | | | | | | GrGrCrArGrGrUrGrArA |
| | | | | | | rArGrGrArA/AltR2/ |
| MG29-1 | — | 5287 | MG29-1-FAS- | Nucleotide | N.A. | /AltR1/rUrArArUrUrUrCr |
| sgRNA | | | sgRNA-D3 | | | UrArCrUrGrUrUrGrUrAr |
| targeting | | | | | | GrArUrUrCrCrUrUrGrG |
| FAS | | | | | | rGrCrArGrGrUrGrArAr |
| | | | | | | ArGrGrArArA/AltR2/ |
| MG29-1 | — | 5288 | MG29-1-FAS- | Nucleotide | N.A. | /AltR1/rUrArArUrUrUrCr |
| sgRNA | | | sgRNA-E3 | | | UrArCrUrGrUrUrGrUrAr |
| targeting | | | | | | GrArUrCrCrUrUrGrGrG |
| FAS | | | | | | rCrArGrGrUrGrArArAr |
| | | | | | | GrGrArArArG/AltR2/ |
| MG29-1 | — | 5289 | MG29-1-FAS- | Nucleotide | N.A. | /AltR1/rUrArArUrUrUrCr |
| sgRNA | | | sgRNA-F3 | | | UrArCrUrGrUrUrGrUrAr |
| targeting | | | | | | GrArUrCrUrUrGrGrGrC |
| FAS | | | | | | rArGrGrUrGrArArArGr |
| | | | | | | GrArArArGrC/AltR2/ |
| MG29-1 | — | 5290 | MG29-1-FAS- | Nucleotide | N.A. | /AltR1/rUrArArUrUrUrCr |
| sgRNA | | | sgRNA-G3 | | | UrArCrUrGrUrUrGrUrAr |
| targeting | | | | | | GrArUrUrCrUrUrCrCrAr |
| FAS | | | | | | ArArUrGrCrArGrArArG |
| | | | | | | rArUrGrUrA/AltR2/ |
| MG29-1 | — | 5291 | MG29-1-FAS- | Nucleotide | N.A. | /AltR1/rUrArArUrUrUrCr |
| sgRNA | | | sgRNA-H3 | | | UrArCrUrGrUrUrGrUrAr |
| targeting | | | | | | GrArUrCrUrUrCrCrArAr |
| FAS | | | | | | ArUrGrCrArGrArArGrA |
| | | | | | | rUrGrUrArG/AltR2/ |
| MG29-1 | — | 5292 | MG29-1-FAS- | Nucleotide | N.A. | /AltR1/rUrArArUrUrUrCr |
| sgRNA | | | sgRNA-A4 | | | UrArCrUrGrUrUrGrUrAr |
| targeting | | | | | | GrArUrUrUrCrCrArArAr |
| FAS | | | | | | UrGrCrArGrArArGrArU |
| | | | | | | rGrUrArGrA/AltR2/ |
| MG29-1 | — | 5293 | MG29-1-FAS- | Nucleotide | N.A. | /AltR1/rUrArArUrUrUrCr |
| sgRNA | | | sgRNA-B4 | | | UrArCrUrGrUrUrGrUrAr |
| targeting | | | | | | GrArUrArArGrArCrUrCr |
| FAS | | | | | | UrUrArCrCrArUrGrUrCr |
| | | | | | | CrUrUrCrA/AltR2/ |
| MG29-1 | — | 5294 | MG29-1-FAS- | Nucleotide | N.A. | /AltR1/rUrArArUrUrUrCr |
| sgRNA | | | sgRNA-C4 | | | UrArCrUrGrUrUrGrUrAr |
| targeting | | | | | | GrArUrArGrArCrUrCrUr |
| FAS | | | | | | UrArCrCrArUrGrUrCrCr |
| | | | | | | UrUrCrArU/AltR2/ |
| MG29-1 | — | 5295 | MG29-1-FAS- | Nucleotide | N.A. | /AltR1/rUrArArUrUrUrCr |
| sgRNA | | | sgRNA-D4 | | | UrArCrUrGrUrUrGrUrAr |
| targeting | | | | | | GrArUrGrArArGrArArA |
| FAS | | | | | | rArArUrGrGrGrCrUrUr |
| | | | | | | UrGrUrCrUrG/AltR2/ |
| MG29-1 | — | 5296 | MG29-1-FAS- | Nucleotide | N.A. | /AltR1/rUrArArUrUrUrCr |
| sgRNA | | | sgRNA-E4 | | | UrArCrUrGrUrUrGrUrAr |
| targeting | | | | | | GrArUrUrCrUrGrUrGrU |
| FAS | | | | | | rArCrUrCrCrUrUrCrCrC |
| | | | | | | rUrUrCrUrU/AltR2/ |
| MG29-1 | — | 5297 | MG29-1-FAS- | Nucleotide | N.A. | /AltR1/rUrArArUrUrUrCr |
| sgRNA | | | sgRNA-F4 | | | UrArCrUrGrUrUrGrUrAr |
| targeting | | | | | | GrArUrCrArArArCrUrGr |
| FAS | | | | | | ArUrUrUrUrCrUrArGrGr |
| | | | | | | CrUrUrArG/AltR2/ |
| MG29-1 | — | 5298 | MG29-1-FAS- | Nucleotide | N.A. | /AltR1/rUrArArUrUrUrCr |
| sgRNA | | | sgRNA-G4 | | | UrArCrUrGrUrUrGrUrAr |
| targeting | | | | | | GrArUrCrUrArGrGrCrU |
| FAS | | | | | | rUrArGrArArGrUrGrGr |
| | | | | | | ArArArUrArA/AltR2/ |
| MG29-1 | — | 5299 | MG29-1-FAS- | Nucleotide | N.A. | /AltR1/rUrArArUrUrUrCr |
| sgRNA | | | sgRNA-H4 | | | UrArCrUrGrUrUrGrUrAr |
| targeting | | | | | | GrArUrUrArGrGrCrUrU |
| FAS | | | | | | rArGrArArGrUrGrGrAr |
| | | | | | | ArArUrArArA/AltR2/ |
| MG29-1 | — | 5300 | MG29-1-FAS- | Nucleotide | N.A. | /AltR1/rUrArArUrUrUrCr |
| sgRNA | | | sgRNA-A5 | | | UrArCrUrGrUrUrGrUrAr |
| targeting | | | | | | GrArUrUrUrUrGrUrArAr |
| FAS | | | | | | CrUrCrUrArCrUrGrUrAr |
| | | | | | | UrGrUrGrA/AltR2/ |
| MG29-1 | — | 5301 | MG29-1-FAS- | Nucleotide | N.A. | /AltR1/rUrArArUrUrUrCr |
| sgRNA | | | sgRNA-B5 | | | UrArCrUrGrUrUrGrUrAr |
| targeting | | | | | | GrArUrUrUrGrUrArArCr |
| FAS | | | | | | UrCrUrArCrUrGrUrArUr |
| | | | | | | GrUrGrArA/AltR2/ |
| MG29-1 | — | 5302 | MG29-1-FAS- | Nucleotide | N.A. | /AltR1/rUrArArUrUrUrCr |
| sgRNA | | | sgRNA-C5 | | | UrArCrUrGrUrUrGrUrAr |
| targeting | | | | | | GrArUrUrGrUrArArCrUr |
| FAS | | | | | | CrUrArCrUrGrUrArUrGr |
| | | | | | | UrGrArArC/AltR2/ |
| MG29-1 | — | 5303 | MG29-1-FAS- | Nucleotide | N.A. | /AltR1/rUrArArUrUrUrCr |
| sgRNA | | | sgRNA-D5 | | | UrArCrUrGrUrUrGrUrAr |
| targeting | | | | | | GrArUrGrUrArArCrUrCr |
| FAS | | | | | | UrArCrUrGrUrArUrGrUr |
| | | | | | | GrArArCrA/AltR2/ |
| MG29-1 | — | 5304 | MG29-1-FAS- | Nucleotide | N.A. | /AltR1/rUrArArUrUrUrCr |
| sgRNA | | | sgRNA-E5 | | | UrArCrUrGrUrUrGrUrAr |
| targeting | | | | | | GrArUrUrArArCrUrCrUr |
| FAS | | | | | | ArCrUrGrUrArUrGrUrG |
| | | | | | | rArArCrArC/AltR2/ |
| MG29-1 | — | 5305 | MG29-1-FAS- | Nucleotide | N.A. | /AltR1/rUrArArUrUrUrCr |
| sgRNA | | | sgRNA-F5 | | | UrArCrUrGrUrUrGrUrAr |
| targeting | | | | | | GrArUrGrUrUrUrArCrAr |
| FAS | | | | | | UrCrUrGrCrArCrUrUrGr |
| | | | | | | GrUrArUrU/AltR2/ |
| MG29-1 | — | 5306 | MG29-1-FAS- | Nucleotide | N.A. | /AltR1/rUrArArUrUrUrCr |
| sgRNA | | | sgRNA-G5 | | | UrArCrUrGrUrUrGrUrAr |
| targeting | | | | | | GrArUrCrArUrCrUrGrCr |
| FAS | | | | | | ArCrUrUrGrGrUrArUrUr |
| | | | | | | CrUrGrGrG/AltR2/ |
| MG29-1 | — | 5307 | MG29-1-FAS- | Nucleotide | N.A. | /AltR1/rUrArArUrUrUrCr |
| sgRNA | | | sgRNA-H5 | | | UrArCrUrGrUrUrGrUrAr |
| targeting | | | | | | GrArUrUrCrCrUrGrUrAr |
| FAS | | | | | | UrUrUrUrUrUrUrUrUrCr |
| | | | | | | UrArGrArU/AltR2/ |
| MG29-1 | — | 5308 | MG29-1-FAS- | Nucleotide | N.A. | /AltR1/rUrArArUrUrUrCr |
| sgRNA | | | sgRNA-A6 | | | UrArCrUrGrUrUrGrUrAr |
| targeting | | | | | | GrArUrUrUrUrUrUrCrUr |
| FAS | | | | | | ArGrArUrGrUrGrArArC |
| | | | | | | rArUrGrGrA/AltR2/ |
| MG29-1 | — | 5309 | MG29-1-FAS- | Nucleotide | N.A. | /AltR1/rUrArArUrUrUrCr |
| sgRNA | | | sgRNA-B6 | | | UrArCrUrGrUrUrGrUrAr |
| targeting | | | | | | GrArUrUrUrUrUrCrUrAr |
| FAS | | | | | | GrArUrGrUrGrArArCrA |
| | | | | | | rUrGrGrArA/AltR2/ |
| MG29-1 | — | 5310 | MG29-1-FAS- | Nucleotide | N.A. | /AltR1/rUrArArUrUrUrCr |
| sgRNA | | | sgRNA-C6 | | | UrArCrUrGrUrUrGrUrAr |
| targeting | | | | | | GrArUrUrUrUrCrUrArGr |
| FAS | | | | | | ArUrGrUrGrArArCrArUr |
| | | | | | | GrGrArArU/AltR2/ |
| MG29-1 | — | 5311 | MG29-1-FAS- | Nucleotide | N.A. | /AltR1/rUrArArUrUrUrCr |
| sgRNA | | | sgRNA-D6 | | | UrArCrUrGrUrUrGrUrAr |
| targeting | | | | | | GrArUrUrUrCrUrArGrAr |
| FAS | | | | | | UrGrUrGrArArCrArUrG |
| | | | | | | rGrArArUrC/AltR2/ |
| MG29-1 | — | 5312 | MG29-1-FAS- | Nucleotide | N.A. | /AltR1/rUrArArUrUrUrCr |
| sgRNA | | | sgRNA-E6 | | | UrArCrUrGrUrUrGrUrAr |
| targeting | | | | | | GrArUrUrCrUrArGrArUr |
| FAS | | | | | | GrUrGrArArCrArUrGrG |
| | | | | | | rArArUrCrA/AltR2/ |
| MG29-1 | — | 5313 | MG29-1-FAS- | Nucleotide | N.A. | /AltR1/rUrArArUrUrUrCr |
| sgRNA | | | sgRNA-F6 | | | UrArCrUrGrUrUrGrUrAr |
| targeting | | | | | | GrArUrCrUrArGrArUrG |
| FAS | | | | | | rUrGrArArCrArUrGrGr |
| | | | | | | ArArUrCrArU/AltR2/ |
| MG29-1 | — | 5314 | MG29-1-FAS- | Nucleotide | N.A. | /AltR1/rUrArArUrUrUrCr |
| sgRNA | | | sgRNA-G6 | | | UrArCrUrGrUrUrGrUrAr |
| targeting | | | | | | GrArUrUrArGrArUrGrU |
| FAS | | | | | | rGrArArCrArUrGrGrAr |
| | | | | | | ArUrCrArUrC/AltR2/ |
| MG29-1 | — | 5315 | MG29-1-FAS- | Nucleotide | N.A. | /AltR1/rUrArArUrUrUrCr |
| sgRNA | | | sgRNA-H6 | | | UrArCrUrGrUrUrGrUrAr |
| targeting | | | | | | GrArUrCrArCrUrUrGrG |
| FAS | | | | | | rUrGrUrUrGrCrUrGrGr |
| | | | | | | UrGrArGrUrG/AltR2/ |
| MG29-1 | — | 5316 | MG29-1-FAS- | Nucleotide | N.A. | /AltR1/rUrArArUrUrUrCr |
| sgRNA | | | sgRNA-A7 | | | UrArCrUrGrUrUrGrUrAr |
| targeting | | | | | | GrArUrUrCrUrUrCrUrUr |
| FAS | | | | | | CrUrUrUrUrGrCrCrArAr |
| | | | | | | UrUrCrCrA/AltR2/ |
| MG29-1 | — | 5317 | MG29-1-FAS- | Nucleotide | N.A. | /AltR1/rUrArArUrUrUrCr |
| sgRNA | | | sgRNA-B7 | | | UrArCrUrGrUrUrGrUrAr |
| targeting | | | | | | GrArUrGrCrCrArArUrUr |
| FAS | | | | | | CrCrArCrUrArArUrUrGr |
| | | | | | | UrUrUrGrG/AltR2/ |
| MG29-1 | — | 5318 | MG29-1-FAS- | Nucleotide | N.A. | /AltR1/rUrArArUrUrUrCr |
| sgRNA | | | sgRNA-C7 | | | UrArCrUrGrUrUrGrUrAr |
| targeting | | | | | | GrArUrCrCrArArUrUrCr |
| FAS | | | | | | CrArCrUrArArUrUrGrUr |
| | | | | | | UrUrGrGrG/AltR2/ |
| MG29-1 | — | 5319 | MG29-1-FAS- | Nucleotide | N.A. | /AltR1/rUrArArUrUrUrCr |
| sgRNA | | | sgRNA-D7 | | | UrArCrUrGrUrUrGrUrAr |
| targeting | | | | | | GrArUrArArCrArArArGr |
| FAS | | | | | | CrArArGrArArCrUrUrAr |
| | | | | | | CrCrCrCrA/AltR2/ |
| MG29-1 | — | 5320 | MG29-1-FAS- | Nucleotide | N.A. | /AltR1/rUrArArUrUrUrCr |
| sgRNA | | | sgRNA-E7 | | | UrArCrUrGrUrUrGrUrAr |
| targeting | | | | | | GrArUrUrUrUrGrUrUrCr |
| FAS | | | | | | UrUrUrCrArGrUrGrArAr |
| | | | | | | GrArGrArA/AltR2/ |
| MG29-1 | — | 5321 | MG29-1-FAS- | Nucleotide | N.A. | /AltR1/rUrArArUrUrUrCr |
| sgRNA | | | sgRNA-F7 | | | UrArCrUrGrUrUrGrUrAr |
| targeting | | | | | | GrArUrUrUrCrUrUrUrCr |
| FAS | | | | | | ArGrUrGrArArGrArGrA |
| | | | | | | rArArGrGrA/AltR2/ |
| MG29-1 | — | 5322 | MG29-1-FAS- | Nucleotide | N.A. | /AltR1/rUrArArUrUrUrCr |
| sgRNA | | | sgRNA-G7 | | | UrArCrUrGrUrUrGrUrAr |
| targeting | | | | | | GrArUrArGrUrGrArArG |
| FAS | | | | | | rArGrArArArGrGrArAr |
| | | | | | | GrUrArCrArG/AltR2/ |
| MG29-1 | — | 5323 | MG29-1-FAS- | Nucleotide | N.A. | /AltR1/rUrArArUrUrUrCr |
| sgRNA | | | sgRNA-H7 | | | UrArCrUrGrUrUrGrUrAr |
| targeting | | | | | | GrArUrArArUrArCrCrUr |
| FAS | | | | | | ArCrArGrGrArUrUrUrAr |
| | | | | | | ArArGrUrU/AltR2/ |
| MG29-1 | — | 5324 | MG29-1-FAS- | Nucleotide | N.A. | /AltR1/rUrArArUrUrUrCr |
| sgRNA | | | sgRNA-A8 | | | UrArCrUrGrUrUrGrUrAr |
| targeting | | | | | | GrArUrArArGrUrUrGrG |
| FAS | | | | | | rArGrArUrUrCrArUrGrA |
| | | | | | | rGrArArCrC/AltR2/ |
| MG29-1 | — | 5325 | MG29-1-FAS- | Nucleotide | N.A. | /AltR1/rUrArArUrUrUrCr |
| sgRNA | | | sgRNA-B8 | | | UrArCrUrGrUrUrGrUrAr |
| targeting | | | | | | GrArUrCrCrUrUrUrCrUr |
| FAS | | | | | | GrUrGrCrUrUrUrCrUrG |
| | | | | | | rCrArUrGrU/AltR2/ |
| MG29-1 | — | 5326 | MG29-1-FAS- | Nucleotide | N.A. | /AltR1/rUrArArUrUrUrCr |
| sgRNA | | | sgRNA-C8 | | | UrArCrUrGrUrUrGrUrAr |
| targeting | | | | | | GrArUrCrUrUrUrCrUrGr |
| FAS | | | | | | UrGrCrUrUrUrCrUrGrCr |
| | | | | | | ArUrGrUrU/AltR2/ |
| MG29-1 | — | 5327 | MG29-1-FAS- | Nucleotide | N.A. | /AltR1/rUrArArUrUrUrCr |
| sgRNA | | | sgRNA-D8 | | | UrArCrUrGrUrUrGrUrAr |
| targeting | | | | | | GrArUrUrGrUrGrCrUrU |
| FAS | | | | | | rUrCrUrGrCrArUrGrUrU |
| | | | | | | rUrUrCrUrG/AltR2/ |
| MG29-1 | — | 5328 | MG29-1-FAS- | Nucleotide | N.A. | /AltR1/rUrArArUrUrUrCr |
| sgRNA | | | sgRNA-E8 | | | UrArCrUrGrUrUrGrUrAr |
| targeting | | | | | | GrArUrUrGrCrArUrGrU |
| FAS | | | | | | rUrUrUrCrUrGrUrArCrU |
| | | | | | | rUrCrCrUrU/AltR2/ |
| MG29-1 | — | 5329 | MG29-1-FAS- | Nucleotide | N.A. | /AltR1/rUrArArUrUrUrCr |
| sgRNA | | | sgRNA-F8 | | | UrArCrUrGrUrUrGrUrAr |
| targeting | | | | | | GrArUrCrUrGrUrArCrUr |
| FAS | | | | | | UrCrCrUrUrUrCrUrCrUr |
| | | | | | | UrCrArCrU/AltR2/ |
| MG29-1 | — | 5330 | MG29-1-FAS- | Nucleotide | N.A. | /AltR1/rUrArArUrUrUrCr |
| sgRNA | | | sgRNA-G8 | | | UrArCrUrGrUrUrGrUrAr |
| targeting | | | | | | GrArUrUrUrGrCrUrUrUr |
| FAS | | | | | | CrUrArGrGrArArArCrAr |
| | | | | | | GrUrGrGrC/AltR2/ |
| MG29-1 | — | 5331 | MG29-1-FAS- | Nucleotide | N.A. | /AltR1/rUrArArUrUrUrCr |
| sgRNA | | | sgRNA-H8 | | | UrArCrUrGrUrUrGrUrAr |
| targeting | | | | | | GrArUrUrGrCrUrUrUrCr |
| FAS | | | | | | UrArGrGrArArArCrArG |
| | | | | | | rUrGrGrCrA/AltR2/ |
| MG29-1 | — | 5332 | MG29-1-FAS- | Nucleotide | N.A. | /AltR1/rUrArArUrUrUrCr |
| sgRNA | | | sgRNA-A9 | | | UrArCrUrGrUrUrGrUrAr |
| targeting | | | | | | GrArUrGrCrUrUrUrCrUr |
| FAS | | | | | | ArGrGrArArArCrArGrU |
| | | | | | | rGrGrCrArA/AltR2/ |
| MG29-1 | — | 5333 | MG29-1-FAS- | Nucleotide | N.A. | /AltR1/rUrArArUrUrUrCr |
| sgRNA | | | sgRNA-B9 | | | UrArCrUrGrUrUrGrUrAr |
| targeting | | | | | | GrArUrCrUrUrUrCrUrAr |
| FAS | | | | | | GrGrArArArCrArGrUrG |
| | | | | | | rGrCrArArU/AltR2/ |
| MG29-1 | — | 5334 | MG29-1-FAS- | Nucleotide | N.A. | /AltR1/rUrArArUrUrUrCr |
| sgRNA | | | sgRNA-C9 | | | UrArCrUrGrUrUrGrUrAr |
| targeting | | | | | | GrArUrUrArGrGrArArA |
| FAS | | | | | | rCrArGrUrGrGrCrArAr |
| | | | | | | UrArArArUrU/AltR2/ |
| MG29-1 | — | 5335 | MG29-1-FAS- | Nucleotide | N.A. | /AltR1/rUrArArUrUrUrCr |
| sgRNA | | | sgRNA-D9 | | | UrArCrUrGrUrUrGrUrAr |
| targeting | | | | | | GrArUrArGrArCrUrArUr |
| FAS | | | | | | UrUrUrCrUrArUrUrUrUr |
| | | | | | | UrCrArGrA/AltR2/ |
| MG29-1 | — | 5336 | MG29-1-FAS- | Nucleotide | N.A. | /AltR1/rUrArArUrUrUrCr |
| sgRNA | | | sgRNA-E9 | | | UrArCrUrGrUrUrGrUrAr |
| targeting | | | | | | GrArUrCrUrArUrUrUrUr |
| FAS | | | | | | UrCrArGrArUrGrUrUrG |
| | | | | | | rArCrUrUrG/AltR2/ |
| MG29-1 | — | 5337 | MG29-1-FAS- | Nucleotide | N.A. | /AltR1/rUrArArUrUrUrCr |
| sgRNA | | | sgRNA-F9 | | | UrArCrUrGrUrUrGrUrAr |
| targeting | | | | | | GrArUrUrArUrUrUrUrUr |
| FAS | | | | | | CrArGrArUrGrUrUrGrA |
| | | | | | | rCrUrUrGrA/AltR2/ |
| MG29-1 | — | 5338 | MG29-1-FAS- | Nucleotide | N.A. | /AltR1/rUrArArUrUrUrCr |
| sgRNA | | | sgRNA-G9 | | | UrArCrUrGrUrUrGrUrAr |
| targeting | | | | | | GrArUrUrCrArGrArUrG |
| FAS | | | | | | rUrUrGrArCrUrUrGrAr |
| | | | | | | GrUrArArArU/AltR2/ |
| MG29-1 | — | 5339 | MG29-1-FAS- | Nucleotide | N.A. | /AltR1/rUrArArUrUrUrCr |
| sgRNA | | | sgRNA-H9 | | | UrArCrUrGrUrUrGrUrAr |
| targeting | | | | | | GrArUrCrArGrArUrGrU |
| FAS | | | | | | rUrGrArCrUrUrGrArGr |
| | | | | | | UrArArArUrA/AltR2/ |
| MG29-1 | — | 5340 | MG29-1-FAS- | Nucleotide | N.A. | /AltR1/rUrArArUrUrUrCr |
| sgRNA | | | sgRNA-A10 | | | UrArCrUrGrUrUrGrUrAr |
| targeting | | | | | | GrArUrArGrArUrGrUrU |
| FAS | | | | | | rGrArCrUrUrGrArGrUr |
| | | | | | | ArArArUrArU/AltR2/ |
| MG29-1 | — | 5341 | MG29-1-FAS- | Nucleotide | N.A. | /AltR1/rUrArArUrUrUrCr |
| sgRNA | | | sgRNA-B10 | | | UrArCrUrGrUrUrGrUrAr |
| targeting | | | | | | GrArUrUrUrCrGrArArAr |
| FAS | | | | | | GrArArUrGrGrUrGrUrC |
| | | | | | | rArArUrGrA/AltR2/ |
| MG29-1 | — | 5342 | MG29-1-FAS- | Nucleotide | N.A. | /AltR1/rUrArArUrUrUrCr |
| sgRNA | | | sgRNA-C10 | | | UrArCrUrGrUrUrGrUrAr |
| targeting | | | | | | GrArUrUrArCrUrCrUrUr |
| FAS | | | | | | GrCrArGrArGrArArArA |
| | | | | | | rUrUrCrArG/AltR2/ |
| MG29-1 | — | 5343 | MG29-1-FAS- | Nucleotide | N.A. | /AltR1/rUrArArUrUrUrCr |
| sgRNA | | | sgRNA-D10 | | | UrArCrUrGrUrUrGrUrAr |
| targeting | | | | | | GrArUrUrUrGrUrUrUrUr |
| FAS | | | | | | UrCrArCrUrCrUrArGrAr |
| | | | | | | CrCrArArG/AltR2/ |
| MG29-1 | — | 5344 | MG29-1-FAS- | Nucleotide | N.A. | /AltR1/rUrArArUrUrUrCr |
| sgRNA | | | sgRNA-E10 | | | UrArCrUrGrUrUrGrUrAr |
| targeting | | | | | | GrArUrUrCrArCrUrCrUr |
| FAS | | | | | | ArGrArCrCrArArGrCrUr |
| | | | | | | UrUrGrGrA/AltR2/ |
| MG29-1 | — | 5345 | MG29-1-FAS- | Nucleotide | N.A. | /AltR1/rUrArArUrUrUrCr |
| sgRNA | | | sgRNA-F10 | | | UrArCrUrGrUrUrGrUrAr |
| targeting | | | | | | GrArUrCrArCrUrCrUrAr |
| FAS | | | | | | GrArCrCrArArGrCrUrUr |
| | | | | | | UrGrGrArU/AltR2/ |
| MG29-1 | — | 5346 | MG29-1-FAS- | Nucleotide | N.A. | /AltR1/rUrArArUrUrUrCr |
| sgRNA | | | sgRNA-G10 | | | UrArCrUrGrUrUrGrUrAr |
| targeting | | | | | | GrArUrArCrUrCrUrArGr |
| FAS | | | | | | ArCrCrArArGrCrUrUrUr |
| | | | | | | GrGrArUrU/AltR2/ |
| MG29-1 | — | 5347 | MG29-1-FAS- | Nucleotide | N.A. | /AltR1/rUrArArUrUrUrCr |
| sgRNA | | | sgRNA-H10 | | | UrArCrUrGrUrUrGrUrAr |
| targeting | | | | | | GrArUrGrArUrUrUrCrAr |
| FAS | | | | | | UrUrUrCrUrGrArArGrUr |
| | | | | | | UrUrGrArA/AltR2/ |
| MG29-1 | — | 5348 | MG29-1-FAS- | Nucleotide | N.A. | /AltR1/rUrArArUrUrUrCr |
| sgRNA | | | sgRNA-A11 | | | UrArCrUrGrUrUrGrUrAr |
| targeting | | | | | | GrArUrArUrUrUrCrUrGr |
| FAS | | | | | | ArArGrUrUrUrGrArArUr |
| | | | | | | UrUrUrCrU/AltR2/ |
| MG29-1 | — | 5349 | MG29-1-FAS- | Nucleotide | N.A. | /AltR1/rUrArArUrUrUrCr |
| sgRNA | | | sgRNA-B11 | | | UrArCrUrGrUrUrGrUrAr |
| targeting | | | | | | GrArUrUrGrArArGrUrU |
| FAS | | | | | | rUrGrArArUrUrUrUrCrU |
| | | | | | | rGrArGrUrC/AltR2/ |
| MG29-1 | — | 5350 | MG29-1-FAS- | Nucleotide | N.A. | /AltR1/rUrArArUrUrUrCr |
| sgRNA | | | sgRNA-C11 | | | UrArCrUrGrUrUrGrUrAr |
| targeting | | | | | | GrArUrArArUrUrUrUrCr |
| FAS | | | | | | UrGrArGrUrCrArCrUrAr |
| | | | | | | GrUrArArU/AltR2/ |
| MG29-1 | — | 5351 | MG29-1-FAS- | Nucleotide | N.A. | /AltR1/rUrArArUrUrUrCr |
| sgRNA | | | sgRNA-D11 | | | UrArCrUrGrUrUrGrUrAr |
| targeting | | | | | | GrArUrCrUrGrArGrUrC |
| FAS | | | | | | rArCrUrArGrUrArArUrG |
| | | | | | | rUrCrCrUrU/AltR2/ |
| MG29-1 | — | 5352 | MG29-1-FAS- | Nucleotide | N.A. | /AltR1/rUrArArUrUrUrCr |
| sgRNA | | | sgRNA-E11 | | | UrArCrUrGrUrUrGrUrAr |
| targeting | | | | | | GrArUrUrGrArGrUrCrA |
| FAS | | | | | | rCrUrArGrUrArArUrGrU |
| | | | | | | rCrCrUrUrG/AltR2/ |
| MG29-1 | — | 5353 | MG29-1-FAS- | Nucleotide | N.A. | /AltR1/rUrArArUrUrUrCr |
| sgRNA | | | sgRNA-F11 | | | UrArCrUrGrUrUrGrUrAr |
| targeting | | | | | | GrArUrCrUrCrUrGrCrAr |
| FAS | | | | | | ArGrArGrUrArCrArArAr |
| | | | | | | GrArUrUrG/AltR2/ |
| MG29-1 | — | 5354 | MG29-1-FAS- | Nucleotide | N.A. | /AltR1/rUrArArUrUrUrCr |
| sgRNA | | | sgRNA-G11 | | | UrArCrUrGrUrUrGrUrAr |
| targeting | | | | | | GrArUrUrCrUrGrCrArAr |
| FAS | | | | | | GrArGrUrArCrArArArG |
| | | | | | | rArUrUrGrG/AltR2/ |
| MG29-1 | — | 5355 | MG29-1-FAS- | Nucleotide | N.A. | /AltR1/rUrArArUrUrUrCr |
| sgRNA | | | sgRNA-H11 | | | UrArCrUrGrUrUrGrUrAr |
| targeting | | | | | | GrArUrUrUrGrArGrArU |
| FAS | | | | | | rCrUrUrUrArArUrCrArA |
| | | | | | | rUrGrUrGrU/AltR2/ |
| MG29-1 | — | 5356 | MG29-1-FAS- | Nucleotide | N.A. | /AltR1/rUrArArUrUrUrCr |
| sgRNA | | | sgRNA-A12 | | | UrArCrUrGrUrUrGrUrAr |
| targeting | | | | | | GrArUrUrGrArGrArUrC |
| FAS | | | | | | rUrUrUrArArUrCrArArU |
| | | | | | | rGrUrGrUrC/AltR2/ |
| MG29-1 | — | 5357 | MG29-1-FAS- | Nucleotide | N.A. | /AltR1/rUrArArUrUrUrCr |
| sgRNA | | | sgRNA-B12 | | | UrArCrUrGrUrUrGrUrAr |
| targeting | | | | | | GrArUrGrArGrArUrCrU |
| FAS | | | | | | rUrUrArArUrCrArArUrG |
| | | | | | | rUrGrUrCrA/AltR2/ |
| MG29-1 | — | 5358 | MG29-1-FAS- | Nucleotide | N.A. | /AltR1/rUrArArUrUrUrCr |
| sgRNA | | | sgRNA-C12 | | | UrArCrUrGrUrUrGrUrAr |
| targeting | | | | | | GrArUrArGrArUrCrUrUr |
| FAS | | | | | | UrArArUrCrArArUrGrUr |
| | | | | | | GrUrCrArU/AltR2/ |
| MG29-1 | — | 5359 | MG29-1-FAS- | Nucleotide | N.A. | /AltR1/rUrArArUrUrUrCr |
| sgRNA | | | sgRNA-D12 | | | UrArCrUrGrUrUrGrUrAr |
| targeting | | | | | | GrArUrArUrCrArArUrGr |
| FAS | | | | | | UrGrUrCrArUrArCrGrCr |
| | | | | | | UrUrCrUrU/AltR2/ |
| MG29-1 | — | 5360 | MG29-1-FAS- | Nucleotide | N.A. | /AltR1/rUrArArUrUrUrCr |
| sgRNA | | | sgRNA-E12 | | | UrArCrUrGrUrUrGrUrAr |
| targeting | | | | | | GrArUrUrUrUrCrCrArUr |
| FAS | | | | | | GrArArGrUrUrGrArUrG |
| | | | | | | rCrCrArArU/AltR2/ |
| MG29-1 | — | 5361 | MG29-1-FAS- | Nucleotide | N.A. | /AltR1/rUrArArUrUrUrCr |
| sgRNA | | | sgRNA-F12 | | | UrArCrUrGrUrUrGrUrAr |
| targeting | | | | | | GrArUrCrArUrGrArArG |
| FAS | | | | | | rUrUrGrArUrGrCrCrArA |
| | | | | | | rUrUrArCrG/AltR2/ |
| MG29-1 | — | 5362 | MG29-1-FAS- | Nucleotide | N.A. | /AltR1/rUrArArUrUrUrCr |
| sgRNA | | | sgRNA-G12 | | | UrArCrUrGrUrUrGrUrAr |
| targeting | | | | | | GrArUrUrGrUrUrCrUrG |
| FAS | | | | | | rCrUrGrUrGrUrCrUrUr |
| | | | | | | GrGrArCrArU/AltR2/ |
| MG29-1 | — | 5363 | MG29-1-FAS- | Nucleotide | N.A. | /AltR1/rUrArArUrUrUrCr |
| sgRNA | | | sgRNA-H12 | | | UrArCrUrGrUrUrGrUrAr |
| targeting | | | | | | GrArUrGrGrCrUrUrCrA |
| FAS | | | | | | rUrUrGrArCrArCrCrArU |
| | | | | | | rUrCrUrUrU/AltR2/ |
| MG29-1 | — | 5364 | MG29-1-FAS- | Nucleotide | N.A. | /AltR1/rUrArArUrUrUrCr |
| sgRNA | | | sgRNA-A13 | | | UrArCrUrGrUrUrGrUrAr |
| targeting | | | | | | GrArUrGrCrUrUrCrArUr |
| FAS | | | | | | UrGrArCrArCrCrArUrUr |
| | | | | | | CrUrUrUrC/AltR2/ |
| MG29-1 | — | 5365 | MG29-1-FAS- | Nucleotide | N.A. | /AltR1/rUrArArUrUrUrCr |
| sgRNA | | | sgRNA-B13 | | | UrArCrUrGrUrUrGrUrAr |
| targeting | | | | | | GrArUrGrArArCrArArAr |
| FAS | | | | | | GrCrCrUrUrUrArArCrUr |
| | | | | | | UrGrArCrU/AltR2/ |
| MG29-1 | — | 5366 | MG29-1-FAS- | Nucleotide | N.A. | /AltR1/rUrArArUrUrUrCr |
| sgRNA | | | sgRNA-C13 | | | UrArCrUrGrUrUrGrUrAr |
| targeting | | | | | | GrArUrArCrUrUrGrArCr |
| FAS | | | | | | UrUrArGrUrGrUrCrArUr |
| | | | | | | GrArCrUrC/AltR2/ |
| DNA | — | 5367 | MG29-1-FAS- | Nucleotide | N.A. | AGGTAAACAACCGAAC |
| sequence | | | target site-A1 | | | TGATGA |
| of FAS | | | | | | |
| target | | | | | | |
| site | | | | | | |
| DNA | — | 5368 | MG29-1-FAS- | Nucleotide | N.A. | CCTGAGCAAAGACTCT |
| sequence | | | target site-B1 | | | TGCTAC |
| of FAS | | | | | | |
| target | | | | | | |
| site | | | | | | |
| DNA | — | 5369 | MG29-1-FAS- | Nucleotide | N.A. | CAGAACGTGGCATCAA |
| sequence | | | target site-C1 | | | CATCAC |
| of FAS | | | | | | |
| target | | | | | | |
| site | | | | | | |
| DNA | — | 5370 | MG29-1-FAS- | Nucleotide | N.A. | TCACCAGCTCCCATGT |
| sequence | | | target site-D1 | | | GATGTT |
| of FAS | | | | | | |
| target | | | | | | |
| site | | | | | | |
| DNA | — | 5371 | MG29-1-FAS- | Nucleotide | N.A. | TGTGTCTATTAGATGC |
| sequence | | | target site-E1 | | | TCAGAG |
| of FAS | | | | | | |
| target | | | | | | |
| site | | | | | | |
| DNA | — | 5372 | MG29-1-FAS- | Nucleotide | N.A. | GTGTCTATTAGATGCT |
| sequence | | | target site-F1 | | | CAGAGT |
| of FAS | | | | | | |
| target | | | | | | |
| site | | | | | | |
| DNA | — | 5373 | MG29-1-FAS- | Nucleotide | N.A. | TGTCTATTAGATGCTC |
| sequence | | | target site-G1 | | | AGAGTG |
| of FAS | | | | | | |
| target | | | | | | |
| site | | | | | | |
| DNA | — | 5374 | MG29-1-FAS- | Nucleotide | N.A. | GCATCTGTCACTGCAC |
| sequence | | | target site-H1 | | | TTACCA |
| of FAS | | | | | | |
| target | | | | | | |
| site | | | | | | |
| DNA | — | 5375 | MG29-1-FAS- | Nucleotide | N.A. | CATCTGTCACTGCACT |
| sequence | | | target site-A2 | | | TACCAC |
| of FAS | | | | | | |
| target | | | | | | |
| site | | | | | | |
| DNA | — | 5376 | MG29-1-FAS- | Nucleotide | N.A. | AGTAGACTGTTAGTGC |
| sequence | | | target site-B2 | | | CATGAG |
| of FAS | | | | | | |
| target | | | | | | |
| site | | | | | | |
| DNA | — | 5377 | MG29-1-FAS- | Nucleotide | N.A. | ATTTTACAGGTTCTTA |
| sequence | | | target site-C2 | | | CGTCTG |
| of FAS | | | | | | |
| target | | | | | | |
| site | | | | | | |
| DNA | — | 5378 | MG29-1-FAS- | Nucleotide | N.A. | TTTTACAGGTTCTTAC |
| sequence | | | target site-D2 | | | GTCTGT |
| of FAS | | | | | | |
| target | | | | | | |
| site | | | | | | |
| DNA | — | 5379 | MG29-1-FAS- | Nucleotide | N.A. | ACAGGTTCTTACGTCT |
| sequence | | | target site-E2 | | | GTTGCT |
| of FAS | | | | | | |
| target | | | | | | |
| site | | | | | | |
| DNA | — | 5380 | MG29-1-FAS- | Nucleotide | N.A. | CAGGTTCTTACGTCTG |
| sequence | | | target site-F2 | | | TTGCTA |
| of FAS | | | | | | |
| target | | | | | | |
| site | | | | | | |
| DNA | — | 5381 | MG29-1-FAS- | Nucleotide | N.A. | GTGTAACATACCTGGA |
| sequence | | | target site-G2 | | | GGACAG |
| of FAS | | | | | | |
| target | | | | | | |
| site | | | | | | |
| DNA | — | 5382 | MG29-1-FAS- | Nucleotide | N.A. | TGTAACATACCTGGAG |
| sequence | | | target site-H2 | | | GACAGG |
| of FAS | | | | | | |
| target | | | | | | |
| site | | | | | | |
| DNA | — | 5383 | MG29-1-FAS- | Nucleotide | N.A. | GGACGATAATCTAGCA |
| sequence | | | target site-A3 | | | ACAGAC |
| of FAS | | | | | | |
| target | | | | | | |
| site | | | | | | |
| DNA | — | 5384 | MG29-1-FAS- | Nucleotide | N.A. | GACGATAATCTAGCAA |
| sequence | | | target site-B3 | | | CAGACG |
| of FAS | | | | | | |
| target | | | | | | |
| site | | | | | | |
| DNA | — | 5385 | MG29-1-FAS- | Nucleotide | N.A. | TTCCTTGGGCAGGTGA |
| sequence | | | target site-C3 | | | AAGGAA |
| of FAS | | | | | | |
| target | | | | | | |
| site | | | | | | |
| DNA | — | 5386 | MG29-1-FAS- | Nucleotide | N.A. | TCCTTGGGCAGGTGAA |
| sequence | | | target site-D3 | | | AGGAAA |
| of FAS | | | | | | |
| target | | | | | | |
| site | | | | | | |
| DNA | — | 5387 | MG29-1-FAS- | Nucleotide | N.A. | CCTTGGGCAGGTGAAA |
| sequence | | | target site-E3 | | | GGAAAG |
| of FAS | | | | | | |
| target | | | | | | |
| site | | | | | | |
| DNA | — | 5388 | MG29-1-FAS- | Nucleotide | N.A. | CTTGGGCAGGTGAAAG |
| sequence | | | target site-F3 | | | GAAAGC |
| of FAS | | | | | | |
| target | | | | | | |
| site | | | | | | |
| DNA | — | 5389 | MG29-1-FAS- | Nucleotide | N.A. | TCTTCCAAATGCAGAA |
| sequence | | | target site-G3 | | | GATGTA |
| of FAS | | | | | | |
| target | | | | | | |
| site | | | | | | |
| DNA | — | 5390 | MG29-1-FAS- | Nucleotide | N.A. | CTTCCAAATGCAGAAG |
| sequence | | | target site-H3 | | | ATGTAG |
| of FAS | | | | | | |
| target | | | | | | |
| site | | | | | | |
| DNA | — | 5391 | MG29-1-FAS- | Nucleotide | N.A. | TTCCAAATGCAGAAGA |
| sequence | | | target site-A4 | | | TGTAGA |
| of FAS | | | | | | |
| target | | | | | | |
| site | | | | | | |
| DNA | — | 5392 | MG29-1-FAS- | Nucleotide | N.A. | AAGACTCTTACCATGT |
| sequence | | | target site-B4 | | | CCTTCA |
| of FAS | | | | | | |
| target | | | | | | |
| site | | | | | | |
| DNA | — | 5393 | MG29-1-FAS- | Nucleotide | N.A. | AGACTCTTACCATGTC |
| sequence | | | target site-C4 | | | CTTCAT |
| of FAS | | | | | | |
| target | | | | | | |
| site | | | | | | |
| DNA | — | 5394 | MG29-1-FAS- | Nucleotide | N.A. | GAAGAAAAATGGGCTT |
| sequence | | | target site-D4 | | | TGTCTG |
| of FAS | | | | | | |
| target | | | | | | |
| site | | | | | | |
| DNA | — | 5395 | MG29-1-FAS- | Nucleotide | N.A. | TCTGTGTACTCCTTCC |
| sequence | | | target site-E4 | | | CTTCTT |
| of FAS | | | | | | |
| target | | | | | | |
| site | | | | | | |
| DNA | — | 5396 | MG29-1-FAS- | Nucleotide | N.A. | CAAACTGATTTTCTAG |
| sequence | | | target site-F4 | | | GCTTAG |
| of FAS | | | | | | |
| target | | | | | | |
| site | | | | | | |
| DNA | — | 5397 | MG29-1-FAS- | Nucleotide | N.A. | CTAGGCTTAGAAGTGG |
| sequence | | | target site-G4 | | | AAATAA |
| of FAS | | | | | | |
| target | | | | | | |
| site | | | | | | |
| DNA | — | 5398 | MG29-1-FAS- | Nucleotide | N.A. | TAGGCTTAGAAGTGGA |
| sequence | | | target site-H4 | | | AATAAA |
| of FAS | | | | | | |
| target | | | | | | |
| site | | | | | | |
| DNA | — | 5399 | MG29-1-FAS- | Nucleotide | N.A. | TTTGTAACTCTACTGT |
| sequence | | | target site-A5 | | | ATGTGA |
| of FAS | | | | | | |
| target | | | | | | |
| site | | | | | | |
| DNA | — | 5400 | MG29-1-FAS- | Nucleotide | N.A. | TTGTAACTCTACTGTA |
| sequence | | | target site-B5 | | | TGTGAA |
| of FAS | | | | | | |
| target | | | | | | |
| site | | | | | | |
| DNA | — | 5401 | MG29-1-FAS- | Nucleotide | N.A. | TGTAACTCTACTGTAT |
| sequence | | | target site-C5 | | | GTGAAC |
| of FAS | | | | | | |
| target | | | | | | |
| site | | | | | | |
| DNA | — | 5402 | MG29-1-FAS- | Nucleotide | N.A. | GTAACTCTACTGTATG |
| sequence | | | target site-D5 | | | TGAACA |
| of FAS | | | | | | |
| target | | | | | | |
| site | | | | | | |
| DNA | — | 5403 | MG29-1-FAS- | Nucleotide | N.A. | TAACTCTACTGTATGT |
| sequence | | | target site-E5 | | | GAACAC |
| of FAS | | | | | | |
| target | | | | | | |
| site | | | | | | |
| DNA | — | 5404 | MG29-1-FAS- | Nucleotide | N.A. | GTTTACATCTGCACTT |
| sequence | | | target site-F5 | | | GGTATT |
| of FAS | | | | | | |
| target | | | | | | |
| site | | | | | | |
| DNA | — | 5405 | MG29-1-FAS- | Nucleotide | N.A. | CATCTGCACTTGGTAT |
| sequence | | | target site-G5 | | | TCTGGG |
| of FAS | | | | | | |
| target | | | | | | |
| site | | | | | | |
| DNA | — | 5406 | MG29-1-FAS- | Nucleotide | N.A. | TCCTGTATTTTTTTTTC |
| sequence | | | target site-H5 | | | TAGAT |
| of FAS | | | | | | |
| target | | | | | | |
| site | | | | | | |
| DNA | — | 5407 | MG29-1-FAS- | Nucleotide | N.A. | TTTTTCTAGATGTGAA |
| sequence | | | target site-A6 | | | CATGGA |
| of FAS | | | | | | |
| target | | | | | | |
| site | | | | | | |
| DNA | — | 5408 | MG29-1-FAS- | Nucleotide | N.A. | TTTTCTAGATGTGAAC |
| sequence | | | target site-B6 | | | ATGGAA |
| of FAS | | | | | | |
| target | | | | | | |
| site | | | | | | |
| DNA | — | 5409 | MG29-1-FAS- | Nucleotide | N.A. | TTTCTAGATGTGAACA |
| sequence | | | target site-C6 | | | TGGAAT |
| of FAS | | | | | | |
| target | | | | | | |
| site | | | | | | |
| DNA | — | 5410 | MG29-1-FAS- | Nucleotide | N.A. | TTCTAGATGTGAACAT |
| sequence | | | target site-D6 | | | GGAATC |
| of FAS | | | | | | |
| target | | | | | | |
| site | | | | | | |
| DNA | — | 5411 | MG29-1-FAS- | Nucleotide | N.A. | TCTAGATGTGAACATG |
| sequence | | | target site-E6 | | | GAATCA |
| of FAS | | | | | | |
| target | | | | | | |
| site | | | | | | |
| DNA | — | 5412 | MG29-1-FAS- | Nucleotide | N.A. | CTAGATGTGAACATGG |
| sequence | | | target site-F6 | | | AATCAT |
| of FAS | | | | | | |
| target | | | | | | |
| site | | | | | | |
| DNA | — | 5413 | MG29-1-FAS- | Nucleotide | N.A. | TAGATGTGAACATGGA |
| sequence | | | target site-G6 | | | ATCATC |
| of FAS | | | | | | |
| target | | | | | | |
| site | | | | | | |
| DNA | — | 5414 | MG29-1-FAS- | Nucleotide | N.A. | CACTTGGTGTTGCTGG |
| sequence | | | target site-H6 | | | TGAGTG |
| of FAS | | | | | | |
| target | | | | | | |
| site | | | | | | |
| DNA | — | 5415 | MG29-1-FAS- | Nucleotide | N.A. | TCTTCTTCTTTTGCCA |
| sequence | | | target site-A7 | | | ATTCCA |
| of FAS | | | | | | |
| target | | | | | | |
| site | | | | | | |
| DNA | — | 5416 | MG29-1-FAS- | Nucleotide | N.A. | GCCAATTCCACTAATT |
| sequence | | | target site-B7 | | | GTTTGG |
| of FAS | | | | | | |
| target | | | | | | |
| site | | | | | | |
| DNA | — | 5417 | MG29-1-FAS- | Nucleotide | N.A. | CCAATTCCACTAATTG |
| sequence | | | target site-C7 | | | TTTGGG |
| of FAS | | | | | | |
| target | | | | | | |
| site | | | | | | |
| DNA | — | 5418 | MG29-1-FAS- | Nucleotide | N.A. | AACAAAGCAAGAACTT |
| sequence | | | target site-D7 | | | ACCCCA |
| of FAS | | | | | | |
| target | | | | | | |
| site | | | | | | |
| DNA | — | 5419 | MG29-1-FAS- | Nucleotide | N.A. | TTTGTTCTTTCAGTGA |
| sequence | | | target site-E7 | | | AGAGAA |
| of FAS | | | | | | |
| target | | | | | | |
| site | | | | | | |
| DNA | — | 5420 | MG29-1-FAS- | Nucleotide | N.A. | TTCTTTCAGTGAAGAG |
| sequence | | | target site-F7 | | | AAAGGA |
| of FAS | | | | | | |
| target | | | | | | |
| site | | | | | | |
| DNA | — | 5421 | MG29-1-FAS- | Nucleotide | N.A. | AGTGAAGAGAAAGGA |
| sequence | | | target site-G7 | | | AGTACAG |
| of FAS | | | | | | |
| target | | | | | | |
| site | | | | | | |
| DNA | — | 5422 | MG29-1-FAS- | Nucleotide | N.A. | AATACCTACAGGATTT |
| sequence | | | target site-H7 | | | AAAGTT |
| of FAS | | | | | | |
| target | | | | | | |
| site | | | | | | |
| DNA | — | 5423 | MG29-1-FAS- | Nucleotide | N.A. | AAGTTGGAGATTCATG |
| sequence | | | target site-A8 | | | AGAACC |
| of FAS | | | | | | |
| target | | | | | | |
| site | | | | | | |
| DNA | — | 5424 | MG29-1-FAS- | Nucleotide | N.A. | CCTTTCTGTGCTTTCT |
| sequence | | | target site-B8 | | | GCATGT |
| of FAS | | | | | | |
| target | | | | | | |
| site | | | | | | |
| DNA | — | 5425 | MG29-1-FAS- | Nucleotide | N.A. | CTTTCTGTGCTTTCTG |
| sequence | | | target site-C8 | | | CATGTT |
| of FAS | | | | | | |
| target | | | | | | |
| site | | | | | | |
| DNA | — | 5426 | MG29-1-FAS- | Nucleotide | N.A. | TGTGCTTTCTGCATGT |
| sequence | | | target site-D8 | | | TTTCTG |
| of FAS | | | | | | |
| target | | | | | | |
| site | | | | | | |
| DNA | — | 5427 | MG29-1-FAS- | Nucleotide | N.A. | TGCATGTTTTCTGTAC |
| sequence | | | target site-E8 | | | TTCCTT |
| of FAS | | | | | | |
| target | | | | | | |
| site | | | | | | |
| DNA | — | 5428 | MG29-1-FAS- | Nucleotide | N.A. | CTGTACTTCCTTTCTC |
| sequence | | | target site-F8 | | | TTCACT |
| of FAS | | | | | | |
| target | | | | | | |
| site | | | | | | |
| DNA | — | 5429 | MG29-1-FAS- | Nucleotide | N.A. | TTGCTTTCTAGGAAAC |
| sequence | | | target site-G8 | | | AGTGGC |
| of FAS | | | | | | |
| target | | | | | | |
| site | | | | | | |
| DNA | — | 5430 | MG29-1-FAS- | Nucleotide | N.A. | TGCTTTCTAGGAAACA |
| sequence | | | target site-H8 | | | GTGGCA |
| of FAS | | | | | | |
| target | | | | | | |
| site | | | | | | |
| DNA | — | 5431 | MG29-1-FAS- | Nucleotide | N.A. | GCTTTCTAGGAAACAG |
| sequence | | | target site-A9 | | | TGGCAA |
| of FAS | | | | | | |
| target | | | | | | |
| site | | | | | | |
| DNA | — | 5432 | MG29-1-FAS- | Nucleotide | N.A. | CTTTCTAGGAAACAGT |
| sequence | | | target site-B9 | | | GGCAAT |
| of FAS | | | | | | |
| target | | | | | | |
| site | | | | | | |
| DNA | — | 5433 | MG29-1-FAS- | Nucleotide | N.A. | TAGGAAACAGTGGCAA |
| sequence | | | target site-C9 | | | TAAATT |
| of FAS | | | | | | |
| target | | | | | | |
| site | | | | | | |
| DNA | — | 5434 | MG29-1-FAS- | Nucleotide | N.A. | AGACTATTTTCTATTTT |
| sequence | | | target site-D9 | | | TCAGA |
| of FAS | | | | | | |
| target | | | | | | |
| site | | | | | | |
| DNA | — | 5435 | MG29-1-FAS- | Nucleotide | N.A. | CTATTTTTCAGATGTT |
| sequence | | | target site-E9 | | | GACTTG |
| of FAS | | | | | | |
| target | | | | | | |
| site | | | | | | |
| DNA | — | 5436 | MG29-1-FAS- | Nucleotide | N.A. | TATTTTTCAGATGTTG |
| sequence | | | target site-F9 | | | ACTTGA |
| of FAS | | | | | | |
| target | | | | | | |
| site | | | | | | |
| DNA | — | 5437 | MG29-1-FAS- | Nucleotide | N.A. | TCAGATGTTGACTTGA |
| sequence | | | target site-G9 | | | GTAAAT |
| of FAS | | | | | | |
| target | | | | | | |
| site | | | | | | |
| DNA | — | 5438 | MG29-1-FAS- | Nucleotide | N.A. | CAGATGTTGACTTGAG |
| sequence | | | target site-H9 | | | TAAATA |
| of FAS | | | | | | |
| target | | | | | | |
| site | | | | | | |
| DNA | — | 5439 | MG29-1-FAS- | Nucleotide | N.A. | AGATGTTGACTTGAGT |
| sequence | | | target site-A10 | | | AAATAT |
| of FAS | | | | | | |
| target | | | | | | |
| site | | | | | | |
| DNA | — | 5440 | MG29-1-FAS- | Nucleotide | N.A. | TTCGAAAGAATGGTGT |
| sequence | | | target site-B10 | | | CAATGA |
| of FAS | | | | | | |
| target | | | | | | |
| site | | | | | | |
| DNA | — | 5441 | MG29-1-FAS- | Nucleotide | N.A. | TACTCTTGCAGAGAAA |
| sequence | | | target site-C10 | | | ATTCAG |
| of FAS | | | | | | |
| target | | | | | | |
| site | | | | | | |
| DNA | — | 5442 | MG29-1-FAS | Nucleotide | N.A. | TTGTTTTTCACTCTAG |
| sequence | | | target site-D10 | | | ACCAAG |
| of FAS | | | | | | |
| target | | | | | | |
| site | | | | | | |
| DNA | — | 5443 | MG29-1-FAS- | Nucleotide | N.A. | TCACTCTAGACCAAGC |
| sequence | | | target site-E10 | | | TTTGGA |
| of FAS | | | | | | |
| target | | | | | | |
| site | | | | | | |
| DNA | — | 5444 | MG29-1-FAS- | Nucleotide | N.A. | CACTCTAGACCAAGCT |
| sequence | | | target site-F10 | | | TTGGAT |
| of FAS | | | | | | |
| target | | | | | | |
| site | | | | | | |
| DNA | — | 5445 | MG29-1-FAS- | Nucleotide | N.A. | ACTCTAGACCAAGCTT |
| sequence | | | target site-G10 | | | TGGATT |
| of FAS | | | | | | |
| target | | | | | | |
| site | | | | | | |
| DNA | — | 5446 | MG29-1-FAS- | Nucleotide | N.A. | GATTTCATTTCTGAAG |
| sequence | | | target site-H10 | | | TTTGAA |
| of FAS | | | | | | |
| target | | | | | | |
| site | | | | | | |
| DNA | — | 5447 | MG29-1-FAS- | Nucleotide | N.A. | ATTTCTGAAGTTTGAA |
| sequence | | | target site-A11 | | | TTTTCT |
| of FAS | | | | | | |
| target | | | | | | |
| site | | | | | | |
| DNA | — | 5448 | MG29-1-FAS- | Nucleotide | N.A. | TGAAGTTTGAATTTTC |
| sequence | | | target site-B11 | | | TGAGTC |
| of FAS | | | | | | |
| target | | | | | | |
| site | | | | | | |
| DNA | — | 5449 | MG29-1-FAS- | Nucleotide | N.A. | AATTTTCTGAGTCACT |
| sequence | | | target site-C11 | | | AGTAAT |
| of FAS | | | | | | |
| target | | | | | | |
| site | | | | | | |
| DNA | — | 5450 | MG29-1-FAS- | Nucleotide | N.A. | CTGAGTCACTAGTAAT |
| sequence | | | target site-D11 | | | GTCCTT |
| of FAS | | | | | | |
| target | | | | | | |
| site | | | | | | |
| DNA | — | 5451 | MG29-1-FAS- | Nucleotide | N.A. | TGAGTCACTAGTAATG |
| sequence | | | target site-E11 | | | TCCTTG |
| of FAS | | | | | | |
| target | | | | | | |
| site | | | | | | |
| DNA | — | 5452 | MG29-1-FAS- | Nucleotide | N.A. | CTCTGCAAGAGTACAA |
| sequence | | | target site-F11 | | | AGATTG |
| of FAS | | | | | | |
| target | | | | | | |
| site | | | | | | |
| DNA | — | 5453 | MG29-1-FAS- | Nucleotide | N.A. | TCTGCAAGAGTACAAA |
| sequence | | | target site-G11 | | | GATTGG |
| of FAS | | | | | | |
| target | | | | | | |
| site | | | | | | |
| DNA | — | 5454 | MG29-1-FAS- | Nucleotide | N.A. | TTGAGATCTTTAATCA |
| sequence | | | target site-H11 | | | ATGTGT |
| of FAS | | | | | | |
| target | | | | | | |
| site | | | | | | |
| DNA | — | 5455 | MG29-1-FAS- | Nucleotide | N.A. | TGAGATCTTTAATCAA |
| sequence | | | target site-A12 | | | TGTGTC |
| of FAS | | | | | | |
| target | | | | | | |
| site | | | | | | |
| DNA | — | 5456 | MG29-1-FAS- | Nucleotide | N.A. | GAGATCTTTAATCAAT |
| sequence | | | target site-B12 | | | GTGTCA |
| of FAS | | | | | | |
| target | | | | | | |
| site | | | | | | |
| DNA | — | 5457 | MG29-1-FAS- | Nucleotide | N.A. | AGATCTTTAATCAATG |
| sequence | | | target site-C12 | | | TGTCAT |
| of FAS | | | | | | |
| target | | | | | | |
| site | | | | | | |
| DNA | — | 5458 | MG29-1-FAS- | Nucleotide | N.A. | ATCAATGTGTCATACG |
| sequence | | | target site-D12 | | | CTTCTT |
| of FAS | | | | | | |
| target | | | | | | |
| site | | | | | | |
| DNA | — | 5459 | MG29-1-FAS- | Nucleotide | N.A. | TTTCCATGAAGTTGAT |
| sequence | | | target site-E12 | | | GCCAAT |
| of FAS | | | | | | |
| target | | | | | | |
| site | | | | | | |
| DNA | — | 5460 | MG29-1-FAS- | Nucleotide | N.A. | CATGAAGTTGATGCCA |
| sequence | | | target site-F12 | | | ATTACG |
| of FAS | | | | | | |
| target | | | | | | |
| site | | | | | | |
| DNA | — | 5461 | MG29-1-FAS- | Nucleotide | N.A. | TGTTCTGCTGTGTCTT |
| sequence | | | target site-G12 | | | GGACAT |
| of FAS | | | | | | |
| target | | | | | | |
| site | | | | | | |
| DNA | — | 5462 | MG29-1-FAS- | Nucleotide | N.A. | GGCTTCATTGACACCA |
| sequence | | | target site-H12 | | | TTCTTT |
| of FAS | | | | | | |
| target | | | | | | |
| site | | | | | | |
| DNA | — | 5463 | MG29-1-FAS- | Nucleotide | N.A. | GCTTCATTGACACCAT |
| sequence | | | target site-A13 | | | TCTTTC |
| of FAS | | | | | | |
| target | | | | | | |
| site | | | | | | |
| DNA | — | 5464 | MG29-1-FAS- | Nucleotide | N.A. | GAACAAAGCCTTTAAC |
| sequence | | | target site-B13 | | | TTGACT |
| of FAS | | | | | | |
| target | | | | | | |
| site | | | | | | |
| DNA | — | 5465 | MG29-1-FAS- | Nucleotide | N.A. | ACTTGACTTAGTGTCA |
| sequence | | | target site-C13 | | | TGACTC |
| of FAS | | | | | | |
| target | | | | | | |
| site | | | | | | |
| MG29-1 | — | 5466 | MG29-1-PD-1- | Nucleotide | N.A. | /AltR1/rUrArArUrUrUrCr |
| sgRNA | | | sgRNA-A1 | | | UrArCrUrGrUrUrGrUrAr |
| targeting | | | | | | GrArUrCrUrArGrCrGrG |
| PD-1 | | | | | | rArArUrGrGrGrCrArCr |
| | | | | | | CrUrCrArUrC/AltR2/ |
| MG29-1 | — | 5467 | MG29-1-PD-1- | Nucleotide | N.A. | /AltR1/rUrArArUrUrUrCr |
| sgRNA | | | sgRNA-B1 | | | UrArCrUrGrUrUrGrUrAr |
| targeting | | | | | | GrArUrCrArGrUrGrGrC |
| PD-1 | | | | | | rGrArGrArGrArArGrAr |
| | | | | | | CrCrCrCrGrG/AltR2/ |
| MG29-1 | — | 5468 | MG29-1-PD-1- | Nucleotide | N.A. | /AltR1/rUrArArUrUrUrCr |
| sgRNA | | | sgRNA-C1 | | | UrArCrUrGrUrUrGrUrAr |
| targeting | | | | | | GrArUrUrCrCrUrCrArAr |
| PD-1 | | | | | | ArGrArArGrGrArGrGrA |
| | | | | | | rCrCrCrCrU/AltR2/ |
| MG29-1 | — | 5469 | MG29-1-PD-1- | Nucleotide | N.A. | /AltR1/rUrArArUrUrUrCr |
| sgRNA | | | sgRNA-D1 | | | UrArCrUrGrUrUrGrUrAr |
| targeting | | | | | | GrArUrUrCrUrGrCrArG |
| PD-1 | | | | | | rGrGrArCrArArUrArGr |
| | | | | | | GrArGrCrCrA/AltR2/ |
| MG29-1 | — | 5470 | MG29-1-PD-1- | Nucleotide | N.A. | /AltR1/rUrArArUrUrUrCr |
| sgRNA | | | sgRNA-E1 | | | UrArCrUrGrUrUrGrUrAr |
| targeting | | | | | | GrArUrGrArArCrUrGrG |
| PD-1 | | | | | | rCrCrGrGrCrUrGrGrCr |
| | | | | | | CrUrGrGrGrU/AltR2/ |
| MG29-1 | — | 5471 | MG29-1-PD-1- | Nucleotide | N.A. | /AltR1/rUrArArUrUrUrCr |
| sgRNA | | | sgRNA-F1 | | | UrArCrUrGrUrUrGrUrAr |
| targeting | | | | | | GrArUrUrGrCrCrCrUrUr |
| PD-1 | | | | | | CrCrArGrArGrArGrArA |
| | | | | | | rGrGrGrCrA/AltR2/ |
| MG29-1 | — | 5472 | MG29-1-PD-1- | Nucleotide | N.A. | /AltR1/rUrArArUrUrUrCr |
| sgRNA | | | sgRNA-G1 | | | UrArCrUrGrUrUrGrUrAr |
| targeting | | | | | | GrArUrArUrCrUrGrCrG |
| PD-1 | | | | | | rCrCrUrUrGrGrGrGrGr |
| | | | | | | CrCrArGrGrG/AltR2/ |
| MG29-1 | — | 5473 | MG29-1-PD-1- | Nucleotide | N.A. | /AltR1/rUrArArUrUrUrCr |
| sgRNA | | | sgRNA-H1 | | | UrArCrUrGrUrUrGrUrAr |
| targeting | | | | | | GrArUrGrCrArCrGrArA |
| PD-1 | | | | | | rGrCrUrCrUrCrCrGrArU |
| | | | | | | rGrUrGrUrU/AltR2/ |
| DNA | — | 5474 | MG29-1-PD-1- | Nucleotide | N.A. | ATCTGCGCCTTGGGGG |
| sequence | | | target site-A1 | | | CCAGGG |
| of PD-1 | | | | | | |
| target | | | | | | |
| site | | | | | | |
| DNA | — | 5475 | MG29-1-PD-1- | Nucleotide | N.A. | GCACGAAGCTCTCCGA |
| sequence | | | target site-B1 | | | TGTGTT |
| of PD-1 | | | | | | |
| target | | | | | | |
| site | | | | | | |
| DNA | — | 5476 | MG29-1-PD-1- | Nucleotide | N.A. | GAACTGGCCGGCTGG |
| sequence | | | target site-C1 | | | CCTGGGT |
| of PD-1 | | | | | | |
| target | | | | | | |
| site | | | | | | |
| DNA | — | 5477 | MG29-1-PD-1- | Nucleotide | N.A. | TGCCCTTCCAGAGAGA |
| sequence | | | target site-D1 | | | AGGGCA |
| of PD-1 | | | | | | |
| target | | | | | | |
| site | | | | | | |
| DNA | — | 5478 | MG29-1-PD-1- | Nucleotide | N.A. | TCTGCAGGGACAATAG |
| sequence | | | target site-E1 | | | GAGCCA |
| of PD-1 | | | | | | |
| target | | | | | | |
| site | | | | | | |
| DNA | — | 5479 | MG29-1-PD-1- | Nucleotide | N.A. | TCCTCAAAGAAGGAGG |
| sequence | | | target site-F1 | | | ACCCCT |
| of PD-1 | | | | | | |
| target | | | | | | |
| site | | | | | | |
| DNA | — | 5480 | MG29-1-PD-1- | Nucleotide | N.A. | CAGTGGCGAGAGAAG |
| sequence | | | target site-G1 | | | ACCCCGG |
| of PD-1 | | | | | | |
| target | | | | | | |
| site | | | | | | |
| DNA | — | 5481 | MG29-1-PD-1- | Nucleotide | N.A. | CTAGCGGAATGGGCAC |
| sequence | | | target site-H1 | | | CTCATC |
| of PD-1 | | | | | | |
| target | | | | | | |
| site | | | | | | |
| MG29-1 | — | 5680 | MG29-1 mRNA | Nucleotide | N.A. | GAAAAGCCAGCTCCAG |
| containing | | | | | | CAGGCGCTGCTCACTC |
| 5′ | | | | | | CTCCCCATCCTCTCCC |
| UTR, | | | | | | TCTGTCCCTCTGTCCC |
| NLS, | | | | | | TCTGACCCTGCACTGT |
| CDS, | | | | | | CCCAGCACCATGGCCC |
| NLS, | | | | | | CTAAGAAGAAGAGAAA |
| 3′UTR, | | | | | | AGTCGGCGGAGGCGG |
| polyA | | | | | | CAGCTTCAACAACTTC |
| tail | | | | | | ATCAAGAAGTACAGCC |
| | | | | | | TGCAGAAAACCCTGCG |
| | | | | | | CTTCGAGCTGAAGCCT |
| | | | | | | GTGGGCGAGACAGCC |
| | | | | | | GACTACATCGAGGACT |
| | | | | | | TCAAGAGCGAGTACCT |
| | | | | | | GAAGGACACCGTGCTG |
| | | | | | | AAGGACGAGCAGAGA |
| | | | | | | GCCAAGGACTACCAAG |
| | | | | | | AGATCAAGACCCTGAT |
| | | | | | | CGACGATTACCACCGC |
| | | | | | | GAGTACATCGAAGAGT |
| | | | | | | GCCTGAGAGAACCCGT |
| | | | | | | GGACAAGAAAACCGG |
| | | | | | | CGAGATCCTGGACTTC |
| | | | | | | ACCCAGGACCTGGAAG |
| | | | | | | ATGCCTTCAGCTACTA |
| | | | | | | CCAGAAGCTGAAAGAG |
| | | | | | | AACCCCACCGAGAACA |
| | | | | | | GAGTCGGCTGGGAGA |
| | | | | | | AAGAGCAAGAGAGCCT |
| | | | | | | GAGGAAGAAGCTGGT |
| | | | | | | CACCTCCTTCGTGGGC |
| | | | | | | AACGACGGCCTGTTCA |
| | | | | | | AGAAAGAGTTCATCAC |
| | | | | | | CAGGGACCTGCCTGAG |
| | | | | | | TGGCTGCAGAAGAAAG |
| | | | | | | GACTCTGGGGCGAGTA |
| | | | | | | CAAGGACACAGTGGAA |
| | | | | | | AACTTCAAGAAGTTCA |
| | | | | | | CCACCTACTTCAGCGG |
| | | | | | | CTTCCACGAGAACCGG |
| | | | | | | AAGAACATGTACACCG |
| | | | | | | CCGAGGCTCAGAGCAC |
| | | | | | | CGCTATCGCCAACAGA |
| | | | | | | CTGATGAACGACAACC |
| | | | | | | TGCCTAAGTTCTTTAA |
| | | | | | | CAACTACCTGGCCTAC |
| | | | | | | CAGACCATCAAAGAGA |
| | | | | | | AGCACCCCGACCTGGT |
| | | | | | | GTTCAGACTGGATGAT |
| | | | | | | GCTCTGCTGCAGGCCG |
| | | | | | | CTGGCGTGGAACATCT |
| | | | | | | GGATGAGGCTTTCCAG |
| | | | | | | CCTAGATACTTCAGCA |
| | | | | | | GACTGTTCGCCCAGAG |
| | | | | | | CGGCATCACCGCTTTC |
| | | | | | | AACGAGCTGATCGGCG |
| | | | | | | GCAGAACCACAGAGAA |
| | | | | | | CGGCGAGAAGATCCA |
| | | | | | | GGGCCTGAACGAGCA |
| | | | | | | GATCAACCTGTACAGA |
| | | | | | | CAGCAGAACCCCGAGA |
| | | | | | | AGGCCAAGGGCTTCCC |
| | | | | | | CAGATTCATGCCTCTG |
| | | | | | | TTCAAGCAGATCCTGA |
| | | | | | | GCGACAGAGAGACAC |
| | | | | | | ACAGCTTTCTGCCCGA |
| | | | | | | CGCCTTCGAGAACGAC |
| | | | | | | AAAGAGCTGCTCCAGG |
| | | | | | | CTCTGAGAGACTACGT |
| | | | | | | GGACGCCGCCACATCT |
| | | | | | | GAGGAAGGCATGATCA |
| | | | | | | GCCAGCTGAACAAGGC |
| | | | | | | CATGAACCAGTTCGTG |
| | | | | | | ACCGCCGACCTGAAGA |
| | | | | | | GAGTGTACATCAAGAG |
| | | | | | | CGCCGCTCTGACCAGC |
| | | | | | | CTGAGCCAAGAGCTGT |
| | | | | | | TCCACTTCTTCGGCGT |
| | | | | | | GATCAGCGACGCTATC |
| | | | | | | GCTTGGTACGCCGAGA |
| | | | | | | AGAGACTGAGCCCCAA |
| | | | | | | GAAGGCCCAAGAGTCT |
| | | | | | | TTCCTGAAGCAAGAGG |
| | | | | | | TGTACGCCATCGAGGA |
| | | | | | | ACTGAACCAGGCTGTC |
| | | | | | | GTGGGCTACATCGACC |
| | | | | | | AGCTGGAAGATCAGAG |
| | | | | | | CGAGCTGCAGCAACTG |
| | | | | | | CTGGTGGACCTGCCAG |
| | | | | | | ATCCTCAGAAACCCGT |
| | | | | | | GTCCAGCTTCATCCTG |
| | | | | | | ACACACTGGCAGAAGT |
| | | | | | | CTCAAGAGCCCCTGCA |
| | | | | | | GGCAGTGATCGCCAAG |
| | | | | | | GTGGAACCTCTGTTCG |
| | | | | | | AACTGGAAGAACTGAG |
| | | | | | | CAAGAACAAGAGGGC |
| | | | | | | CCCAAAGCACGACAAG |
| | | | | | | GACCAAGGCGGCGAG |
| | | | | | | GGATTTCAGCAGGTCG |
| | | | | | | ACGCCATCAAGAACAT |
| | | | | | | GCTGGACGCCTTCATG |
| | | | | | | GAAGTGTCCCACGCTA |
| | | | | | | TCAAGCCCCTGTACCT |
| | | | | | | GGTCAAGGGAAGAAA |
| | | | | | | GGCCATCGACATGCCC |
| | | | | | | GACGTGGACACCGGCT |
| | | | | | | TCTACGCTGATTTCGC |
| | | | | | | CGAGGCCTACAGCGCC |
| | | | | | | TACGAGCAAGTGACAG |
| | | | | | | TGTCCCTGTACAACAA |
| | | | | | | GACCAGAAACCACCTG |
| | | | | | | TCCAAGAAGCCCTTCA |
| | | | | | | GCAAGGACAAGATCAA |
| | | | | | | GATCAACTTCGACGCC |
| | | | | | | CCTACACTGCTGAACG |
| | | | | | | GCTGGGACCTGAACAA |
| | | | | | | AGAGAGCGACAACAA |
| | | | | | | GTCCATCATCCTGCGG |
| | | | | | | AAGGACGGCAACTTCT |
| | | | | | | ACCTGGCAATCATGCA |
| | | | | | | CCCCAAGCACACCAAG |
| | | | | | | GTGTTCGACTGCTACT |
| | | | | | | CTGCCTCTGAGGCTGC |
| | | | | | | CGGCAAGTGCTACGAG |
| | | | | | | AAGATGAACTACAAGC |
| | | | | | | TGCTGAGCGGCGCCAA |
| | | | | | | CAAGATGCTGCCTAAG |
| | | | | | | GTGTTCTTTAGCAAGA |
| | | | | | | AGGGCATCGAGACATT |
| | | | | | | CAGCCCTCCACAAGAA |
| | | | | | | ATCCTGGACCTGTACA |
| | | | | | | AGAACAACGAGCATAA |
| | | | | | | GAAGGGCGCCACCTTC |
| | | | | | | AAGCTGGAATCCTGCC |
| | | | | | | ACAAGCTGATCGATTT |
| | | | | | | CTTCAAGCGGAACATC |
| | | | | | | CCCAAGTACAAGGTGC |
| | | | | | | ACCCTACCGACAACTT |
| | | | | | | TGGCTGGGACGTGTTC |
| | | | | | | GGCTTTCACTTCAGCC |
| | | | | | | CTACCAGCAGCTACGG |
| | | | | | | CGACCTGTCTGGCTTC |
| | | | | | | TACAGAGAGGTGGAA |
| | | | | | | GCCCAGGGATACAAGC |
| | | | | | | TGTGGTTCAGCGACGT |
| | | | | | | GTCCGAGGCTTACATC |
| | | | | | | AACAAATGCGTGGAAG |
| | | | | | | AGGGCAAGCTGTTCCT |
| | | | | | | GTTCCAAATCTACAAC |
| | | | | | | AAGGACTTCTCCCCTA |
| | | | | | | ACTCCACCGGCAAGCC |
| | | | | | | CAACCTGCACACCCTG |
| | | | | | | TATTGGAAGGGCCTGT |
| | | | | | | TCGAGCCCGAGAACCT |
| | | | | | | GAAAGACGTGGTGCTG |
| | | | | | | AAGCTGAATGGCGAG |
| | | | | | | GCCGAGATCTTCTACC |
| | | | | | | GGAAGCACAGCATCAA |
| | | | | | | GCACGAGGACAAGAC |
| | | | | | | CATCCACAGAGCTAAG |
| | | | | | | GACCCTATCGCTAACA |
| | | | | | | AGAACGCTGACAACCC |
| | | | | | | CAAGAAACAGAGCGTG |
| | | | | | | TTCGATTACGACATCA |
| | | | | | | TCAAGGATAAGCGGTA |
| | | | | | | TACCCAGGACAAGTTC |
| | | | | | | TTCTTCCACGTGCCAA |
| | | | | | | TCAGCCTGAACTTCAA |
| | | | | | | AAGCCAGGGCGTCGT |
| | | | | | | GCGGTTCAACGATAAG |
| | | | | | | ATCAACGGCCTGCTGG |
| | | | | | | CCGCTCAGGACGATGT |
| | | | | | | GCATGTGATCGGCATC |
| | | | | | | GACAGAGGCGAGAGA |
| | | | | | | CATCTGCTGTACTACA |
| | | | | | | CCGTGGTCAACGGCAA |
| | | | | | | GGGCGAAGTGGTGGA |
| | | | | | | ACAGGGCAGCCTGAAT |
| | | | | | | CAGGTGGCCACAGATC |
| | | | | | | AGGGCTACGTGGTGG |
| | | | | | | ATTACCAGCAGAAGCT |
| | | | | | | GCACGCCAAAGAGAAA |
| | | | | | | GAACGCGACCAGGCC |
| | | | | | | AGAAAGAACTGGTCCA |
| | | | | | | CCATCGAGAACATCAA |
| | | | | | | AGAACTGAAGGCCGG |
| | | | | | | CTACCTGAGCCAGGTG |
| | | | | | | GTGCATAAGCTGGCTC |
| | | | | | | AGCTGATCGTGAAGCA |
| | | | | | | CAACGCCATCGTGTGC |
| | | | | | | CTCGAGGACCTGAATT |
| | | | | | | TCGGCTTCAAGAGGGG |
| | | | | | | CAGATTCAAGGTCGAG |
| | | | | | | AAACAGGTGTACCAGA |
| | | | | | | AGTTCGAGAAGGCTCT |
| | | | | | | GATCGACAAGCTGAAC |
| | | | | | | TACCTCGTGTTCAAAG |
| | | | | | | AGAGAGGCGCCACAC |
| | | | | | | AGGCTGGCGGATACCT |
| | | | | | | GAATGCTTACCAGCTG |
| | | | | | | GCCGCACCTTTCGAGA |
| | | | | | | GCTTTGAGAAGCTGGG |
| | | | | | | CAAGCAGACCGGCATC |
| | | | | | | CTGTACTACGTGCGGA |
| | | | | | | GCGACTACACCAGCAA |
| | | | | | | GATCGACCCTGCTACC |
| | | | | | | GGCTTCGTGGACTTTC |
| | | | | | | TGAAGCCTAAGTACGA |
| | | | | | | GAGCATGGCCAAGAG |
| | | | | | | CAAAGTGTTCTTCGAG |
| | | | | | | TCCTTCGAGCGCATCC |
| | | | | | | AGTGGAACCAGGCCAA |
| | | | | | | AGGCTACTTCGAGTTC |
| | | | | | | GAGTTTGACTACAAGA |
| | | | | | | AGATGTGCCCCAGCAG |
| | | | | | | AAAGTTCGGCGACTAC |
| | | | | | | AGAACCAGATGGGTCG |
| | | | | | | TGTGCACCTTCGGCGA |
| | | | | | | CACCCGCTACCAGAAC |
| | | | | | | AGAAGAAACAAGAGCA |
| | | | | | | GCGGCCAGTGGGAGA |
| | | | | | | CAGAGACAATCGATGT |
| | | | | | | GACAGCCCAGCTGAAA |
| | | | | | | GCCCTGTTCGCCGCTT |
| | | | | | | ACGGCATCACATACAA |
| | | | | | | TCAAGAGGATAACATC |
| | | | | | | AAGGACGCCATTGCCG |
| | | | | | | CCGTGAAGTACACCAA |
| | | | | | | GTTCTACAAGCAGCTG |
| | | | | | | TACTGGCTGCTGAGAC |
| | | | | | | TGACCCTGAGCCTGAG |
| | | | | | | ACACAGCGTGACAGGC |
| | | | | | | ACCGACGAGGATTTCA |
| | | | | | | TCCTGTCTCCAGTGGC |
| | | | | | | CGACGAGAATGGCGT |
| | | | | | | GTTCTTTGACTCTAGG |
| | | | | | | AAGGCCACCGACAAGC |
| | | | | | | AGCCTAAGGACGCTGA |
| | | | | | | TGCTAACGGCGCCTAC |
| | | | | | | CATATCGCCCTGAAAG |
| | | | | | | GCCTGTGGAATCTCCA |
| | | | | | | GCAGATCAGACAGCAC |
| | | | | | | GACTGGAACGTGGAAA |
| | | | | | | AGCCCAAAAAGCTGAA |
| | | | | | | CCTCGCCATGAAGAAC |
| | | | | | | GAAGAGTGGTTCGGCT |
| | | | | | | TCGCTCAGAAGAAGAA |
| | | | | | | GTTTAGAGCCAGCGGC |
| | | | | | | GGCAAGAGGCCTGCC |
| | | | | | | GCTACAAAAAAAGCCG |
| | | | | | | GCCAGGCCAAGAAAAA |
| | | | | | | GAAGTGACCACACCCC |
| | | | | | | CATTCCCCCACTCCAG |
| | | | | | | ATAGAACTTCAGTTAT |
| | | | | | | ATCTCACGTGTCTGGA |
| | | | | | | GTTGGATCCCTTGAAG |
| | | | | | | ACTAAAAAAAAAAAAA |
| | | | | | | AAAAAAAAAAAAAAAA |
| | | | | | | AAAAAAAAAAAAAAAA |
| | | | | | | AAAAAAAAAAAAAAAA |
| | | | | | | AAAAAAAAAAAAAAAA |
| | | | | | | AAAAAAAAAAAAAAAA |
| | | | | | | AAAAAAAAAAAAAAA |
| MG29-1 | — | 5681 | MG29-1-TRAC- | Nucleotide | N.A. | mU*rArArUrUrUrCrUrA |
| sgRNA | | | sgRNA-35 | | | rCrUrGrUrUrGrUrArGr |
| targeting | | | | | | ArUrGrArGrUrCrUrCrUr |
| TRAC | | | | | | CrArGrCrUrGrGrUrArC |
| | | | | | | rArCrG*mG |
| DNA | — | 5682 | MG29-1-TRAC- | Nucleotide | N.A. | GAGTCTCTCAGCTGGT |
| sequence | | | target site-35 | | | ACACGG |
| of TRAC | | | | | | |
| target | | | | | | |
| site | | | | | | |
| MG29-1 | — | 5683 | MG29-1-TRAC- | Nucleotide | N.A. | /AltR1/rUrArArUrUrUrCr |
| sgRNA | | | sgRNA-35-AltR | | | UrArCrUrGrUrUrGrUrAr |
| targeting | | | | | | GrArUrGrArGrUrCrUrC |
| TRAC | | | | | | rUrCrArGrCrUrGrGrUr |
| | | | | | | ArCrArCrGrG/AltR2/ |
| DNA | — | 5684 | MG29-1-TRAC- | Nucleotide | N.A. | GAGTCTCTCAGCTGGT |
| sequence | | | target site- | | | ACACGG |
| of TRAC | | | 35-AltR | | | |
| target | | | | | | |
| site | | | | | | |
| MG29-1 | — | 5685 | MG29-1-CD38- | Nucleotide | N.A. | mC*mU*mU*rU*rUrArAr |
| sgRNA | | | sgRNA | | | UrUmUmCmUmArCrU*r |
| targeting | | | | | | G*rU*rU*rGrUrArGrArU |
| CD38 | | | | | | rCrCrGrArGrArC/i2FC//i |
| | | | | | | 2FG//i2FU//i2FC//i2FC//12 |
| | | | | | | FU//12FG//12FG//i2FC//i2F |
| | | | | | | G/*/12FC/*/12FG//i2FA/*/12 |
| | | | | | | FU/*mG |
| DNA | — | 5686 | MG29-1-CD38- | Nucleotide | N.A. | CCGAGACCGTCCTGGC |
| sequence | | | target site | | | GCGATG |
| of CD38 | | | | | | |
| target | | | | | | |
| site | | | | | | |
| MG29-1 | — | 5687 | MG29-1-mRNA | Nucleotide | N.A. | ATGGCCCCTAAGAAGA |
| coding | | | coding sequence | | | AGAGAAAAGTCGGCG |
| sequence | | | | | | GAGGCGGCAGCTTCAA |
| used for | | | | | | CAACTTCATCAAGAAG |
| generati | | | | | | TACAGCCTGCAGAAAA |
| on of | | | | | | CCCTGCGCTTCGAGCT |
| mRNA | | | | | | GAAGCCTGTGGGCGA |
| | | | | | | GACAGCCGACTACATC |
| | | | | | | GAGGACTTCAAGAGCG |
| | | | | | | AGTACCTGAAGGACAC |
| | | | | | | CGTGCTGAAGGACGA |
| | | | | | | GCAGAGAGCCAAGGA |
| | | | | | | CTACCAAGAGATCAAG |
| | | | | | | ACCCTGATCGACGATT |
| | | | | | | ACCACCGCGAGTACAT |
| | | | | | | CGAAGAGTGCCTGAGA |
| | | | | | | GAACCCGTGGACAAGA |
| | | | | | | AAACCGGCGAGATCCT |
| | | | | | | GGACTTCACCCAGGAC |
| | | | | | | CTGGAAGATGCCTTCA |
| | | | | | | GCTACTACCAGAAGCT |
| | | | | | | GAAAGAGAACCCCACC |
| | | | | | | GAGAACAGAGTCGGCT |
| | | | | | | GGGAGAAAGAGCAAG |
| | | | | | | AGAGCCTGAGGAAGA |
| | | | | | | AGCTGGTCACCTCCTT |
| | | | | | | CGTGGGCAACGACGG |
| | | | | | | CCTGTTCAAGAAAGAG |
| | | | | | | TTCATCACCAGGGACC |
| | | | | | | TGCCTGAGTGGCTGCA |
| | | | | | | GAAGAAAGGACTCTGG |
| | | | | | | GGCGAGTACAAGGAC |
| | | | | | | ACAGTGGAAAACTTCA |
| | | | | | | AGAAGTTCACCACCTA |
| | | | | | | CTTCAGCGGCTTCCAC |
| | | | | | | GAGAACCGGAAGAAC |
| | | | | | | ATGTACACCGCCGAGG |
| | | | | | | CTCAGAGCACCGCTAT |
| | | | | | | CGCCAACAGACTGATG |
| | | | | | | AACGACAACCTGCCTA |
| | | | | | | AGTTCTTTAACAACTA |
| | | | | | | CCTGGCCTACCAGACC |
| | | | | | | ATCAAAGAGAAGCACC |
| | | | | | | CCGACCTGGTGTTCAG |
| | | | | | | ACTGGATGATGCTCTG |
| | | | | | | CTGCAGGCCGCTGGC |
| | | | | | | GTGGAACATCTGGATG |
| | | | | | | AGGCTTTCCAGCCTAG |
| | | | | | | ATACTTCAGCAGACTG |
| | | | | | | TTCGCCCAGAGCGGCA |
| | | | | | | TCACCGCTTTCAACGA |
| | | | | | | GCTGATCGGCGGCAG |
| | | | | | | AACCACAGAGAACGGC |
| | | | | | | GAGAAGATCCAGGGC |
| | | | | | | CTGAACGAGCAGATCA |
| | | | | | | ACCTGTACAGACAGCA |
| | | | | | | GAACCCCGAGAAGGC |
| | | | | | | CAAGGGCTTCCCCAGA |
| | | | | | | TTCATGCCTCTGTTCA |
| | | | | | | AGCAGATCCTGAGCGA |
| | | | | | | CAGAGAGACACACAGC |
| | | | | | | TTTCTGCCCGACGCCT |
| | | | | | | TCGAGAACGACAAAGA |
| | | | | | | GCTGCTCCAGGCTCTG |
| | | | | | | AGAGACTACGTGGACG |
| | | | | | | CCGCCACATCTGAGGA |
| | | | | | | AGGCATGATCAGCCAG |
| | | | | | | CTGAACAAGGCCATGA |
| | | | | | | ACCAGTTCGTGACCGC |
| | | | | | | CGACCTGAAGAGAGTG |
| | | | | | | TACATCAAGAGCGCCG |
| | | | | | | CTCTGACCAGCCTGAG |
| | | | | | | CCAAGAGCTGTTCCAC |
| | | | | | | TTCTTCGGCGTGATCA |
| | | | | | | GCGACGCTATCGCTTG |
| | | | | | | GTACGCCGAGAAGAG |
| | | | | | | ACTGAGCCCCAAGAAG |
| | | | | | | GCCCAAGAGTCTTTCC |
| | | | | | | TGAAGCAAGAGGTGTA |
| | | | | | | CGCCATCGAGGAACTG |
| | | | | | | AACCAGGCTGTCGTGG |
| | | | | | | GCTACATCGACCAGCT |
| | | | | | | GGAAGATCAGAGCGA |
| | | | | | | GCTGCAGCAACTGCTG |
| | | | | | | GTGGACCTGCCAGATC |
| | | | | | | CTCAGAAACCCGTGTC |
| | | | | | | CAGCTTCATCCTGACA |
| | | | | | | CACTGGCAGAAGTCTC |
| | | | | | | AAGAGCCCCTGCAGGC |
| | | | | | | AGTGATCGCCAAGGTG |
| | | | | | | GAACCTCTGTTCGAAC |
| | | | | | | TGGAAGAACTGAGCAA |
| | | | | | | GAACAAGAGGGCCCC |
| | | | | | | AAAGCACGACAAGGAC |
| | | | | | | CAAGGCGGCGAGGGA |
| | | | | | | TTTCAGCAGGTCGACG |
| | | | | | | CCATCAAGAACATGCT |
| | | | | | | GGACGCCTTCATGGAA |
| | | | | | | GTGTCCCACGCTATCA |
| | | | | | | AGCCCCTGTACCTGGT |
| | | | | | | CAAGGGAAGAAAGGC |
| | | | | | | CATCGACATGCCCGAC |
| | | | | | | GTGGACACCGGCTTCT |
| | | | | | | ACGCTGATTTCGCCGA |
| | | | | | | GGCCTACAGCGCCTAC |
| | | | | | | GAGCAAGTGACAGTGT |
| | | | | | | CCCTGTACAACAAGAC |
| | | | | | | CAGAAACCACCTGTCC |
| | | | | | | AAGAAGCCCTTCAGCA |
| | | | | | | AGGACAAGATCAAGAT |
| | | | | | | CAACTTCGACGCCCCT |
| | | | | | | ACACTGCTGAACGGCT |
| | | | | | | GGGACCTGAACAAAGA |
| | | | | | | GAGCGACAACAAGTCC |
| | | | | | | ATCATCCTGCGGAAGG |
| | | | | | | ACGGCAACTTCTACCT |
| | | | | | | GGCAATCATGCACCCC |
| | | | | | | AAGCACACCAAGGTGT |
| | | | | | | TCGACTGCTACTCTGC |
| | | | | | | CTCTGAGGCTGCCGGC |
| | | | | | | AAGTGCTACGAGAAGA |
| | | | | | | TGAACTACAAGCTGCT |
| | | | | | | GAGCGGCGCCAACAA |
| | | | | | | GATGCTGCCTAAGGTG |
| | | | | | | TTCTTTAGCAAGAAGG |
| | | | | | | GCATCGAGACATTCAG |
| | | | | | | CCCTCCACAAGAAATC |
| | | | | | | CTGGACCTGTACAAGA |
| | | | | | | ACAACGAGCATAAGAA |
| | | | | | | GGGCGCCACCTTCAAG |
| | | | | | | CTGGAATCCTGCCACA |
| | | | | | | AGCTGATCGATTTCTT |
| | | | | | | CAAGCGGAACATCCCC |
| | | | | | | AAGTACAAGGTGCACC |
| | | | | | | CTACCGACAACTTTGG |
| | | | | | | CTGGGACGTGTTCGGC |
| | | | | | | TTTCACTTCAGCCCTA |
| | | | | | | CCAGCAGCTACGGCGA |
| | | | | | | CCTGTCTGGCTTCTAC |
| | | | | | | AGAGAGGTGGAAGCC |
| | | | | | | CAGGGATACAAGCTGT |
| | | | | | | GGTTCAGCGACGTGTC |
| | | | | | | CGAGGCTTACATCAAC |
| | | | | | | AAATGCGTGGAAGAG |
| | | | | | | GGCAAGCTGTTCCTGT |
| | | | | | | TCCAAATCTACAACAA |
| | | | | | | GGACTTCTCCCCTAAC |
| | | | | | | TCCACCGGCAAGCCCA |
| | | | | | | ACCTGCACACCCTGTA |
| | | | | | | TTGGAAGGGCCTGTTC |
| | | | | | | GAGCCCGAGAACCTGA |
| | | | | | | AAGACGTGGTGCTGAA |
| | | | | | | GCTGAATGGCGAGGC |
| | | | | | | CGAGATCTTCTACCGG |
| | | | | | | AAGCACAGCATCAAGC |
| | | | | | | ACGAGGACAAGACCAT |
| | | | | | | CCACAGAGCTAAGGAC |
| | | | | | | CCTATCGCTAACAAGA |
| | | | | | | ACGCTGACAACCCCAA |
| | | | | | | GAAACAGAGCGTGTTC |
| | | | | | | GATTACGACATCATCA |
| | | | | | | AGGATAAGCGGTATAC |
| | | | | | | CCAGGACAAGTTCTTC |
| | | | | | | TTCCACGTGCCAATCA |
| | | | | | | GCCTGAACTTCAAAAG |
| | | | | | | CCAGGGCGTCGTGCG |
| | | | | | | GTTCAACGATAAGATC |
| | | | | | | AACGGCCTGCTGGCCG |
| | | | | | | CTCAGGACGATGTGCA |
| | | | | | | TGTGATCGGCATCGAC |
| | | | | | | AGAGGCGAGAGACAT |
| | | | | | | CTGCTGTACTACACCG |
| | | | | | | TGGTCAACGGCAAGG |
| | | | | | | GCGAAGTGGTGGAAC |
| | | | | | | AGGGCAGCCTGAATCA |
| | | | | | | GGTGGCCACAGATCAG |
| | | | | | | GGCTACGTGGTGGATT |
| | | | | | | ACCAGCAGAAGCTGCA |
| | | | | | | CGCCAAAGAGAAAGAA |
| | | | | | | CGCGACCAGGCCAGA |
| | | | | | | AAGAACTGGTCCACCA |
| | | | | | | TCGAGAACATCAAAGA |
| | | | | | | ACTGAAGGCCGGCTAC |
| | | | | | | CTGAGCCAGGTGGTGC |
| | | | | | | ATAAGCTGGCTCAGCT |
| | | | | | | GATCGTGAAGCACAAC |
| | | | | | | GCCATCGTGTGCCTCG |
| | | | | | | AGGACCTGAATTTCGG |
| | | | | | | CTTCAAGAGGGGCAGA |
| | | | | | | TTCAAGGTCGAGAAAC |
| | | | | | | AGGTGTACCAGAAGTT |
| | | | | | | CGAGAAGGCTCTGATC |
| | | | | | | GACAAGCTGAACTACC |
| | | | | | | TCGTGTTCAAAGAGAG |
| | | | | | | AGGCGCCACACAGGCT |
| | | | | | | GGCGGATACCTGAATG |
| | | | | | | CTTACCAGCTGGCCGC |
| | | | | | | ACCTTTCGAGAGCTTT |
| | | | | | | GAGAAGCTGGGCAAG |
| | | | | | | CAGACCGGCATCCTGT |
| | | | | | | ACTACGTGCGGAGCGA |
| | | | | | | CTACACCAGCAAGATC |
| | | | | | | GACCCTGCTACCGGCT |
| | | | | | | TCGTGGACTTTCTGAA |
| | | | | | | GCCTAAGTACGAGAGC |
| | | | | | | ATGGCCAAGAGCAAAG |
| | | | | | | TGTTCTTCGAGTCCTT |
| | | | | | | CGAGCGCATCCAGTGG |
| | | | | | | AACCAGGCCAAAGGCT |
| | | | | | | ACTTCGAGTTCGAGTT |
| | | | | | | TGACTACAAGAAGATG |
| | | | | | | TGCCCCAGCAGAAAGT |
| | | | | | | TCGGCGACTACAGAAC |
| | | | | | | CAGATGGGTCGTGTGC |
| | | | | | | ACCTTCGGCGACACCC |
| | | | | | | GCTACCAGAACAGAAG |
| | | | | | | AAACAAGAGCAGCGG |
| | | | | | | CCAGTGGGAGACAGA |
| | | | | | | GACAATCGATGTGACA |
| | | | | | | GCCCAGCTGAAAGCCC |
| | | | | | | TGTTCGCCGCTTACGG |
| | | | | | | CATCACATACAATCAA |
| | | | | | | GAGGATAACATCAAGG |
| | | | | | | ACGCCATTGCCGCCGT |
| | | | | | | GAAGTACACCAAGTTC |
| | | | | | | TACAAGCAGCTGTACT |
| | | | | | | GGCTGCTGAGACTGAC |
| | | | | | | CCTGAGCCTGAGACAC |
| | | | | | | AGCGTGACAGGCACC |
| | | | | | | GACGAGGATTTCATCC |
| | | | | | | TGTCTCCAGTGGCCGA |
| | | | | | | CGAGAATGGCGTGTTC |
| | | | | | | TTTGACTCTAGGAAGG |
| | | | | | | CCACCGACAAGCAGCC |
| | | | | | | TAAGGACGCTGATGCT |
| | | | | | | AACGGCGCCTACCATA |
| | | | | | | TCGCCCTGAAAGGCCT |
| | | | | | | GTGGAATCTCCAGCAG |
| | | | | | | ATCAGACAGCACGACT |
| | | | | | | GGAACGTGGAAAAGC |
| | | | | | | CCAAAAAGCTGAACCT |
| | | | | | | CGCCATGAAGAACGAA |
| | | | | | | GAGTGGTTCGGCTTCG |
| | | | | | | CTCAGAAGAAGAAGTT |
| | | | | | | TAGAGCCAGCGGCGG |
| | | | | | | CAAGAGGCCTGCCGCT |
| | | | | | | ACAAAAAAAGCCGGCC |
| | | | | | | AGGCCAAGAAAAAGAA |
| | | | | | | GTGA |
| MG29-1 | — | 5688 | mAlb29-8-44 | Nucleotide | N.A. | mC*mU*mU*U*U*AAUU |
| sgRNA | | | | | | mUmCmUmACU*G*U*U |
| targeting | | | | | | *GUAGAUCUGUAACfGf |
| mouse | | | | | | AfUfCfGfGfGfA*fAfC*fU |
| albumin | | | | | | *fG*fG*fC*mA |
| MG29-1 | — | 5689 | mAlb29-8-50 | Nucleotide | N.A. | mG*mU*mU*GAGAAUC |
| sgRNA | | | | | | *mG*mA*mA*mAGAUU |
| targeting | | | | | | CUCAAC*mC*mU*mU*U |
| mouse | | | | | | *UAAUUmUmCmUmACU |
| albumin | | | | | | *G*U*U*GUAGAUCUGU |
| | | | | | | AACfGfAfUfCfGfGfGfAf |
| | | | | | | AfC*fU*fGfG*fC*mA |
| MG29-1 | — | 5690 | mAlb29-8-50b | Nucleotide | N.A. | mG*mU*mU*GAGAAUC |
| sgRNA | | | | | | *mG*mA*mA*mAGAUU |
| targeting | | | | | | CUCAAC*mC*mU*mU*U |
| mouse | | | | | | *UAAUUmUmCmUmACU |
| albumin | | | | | | *G*U*U*GUAGAUCUGU |
| | | | | | | AACfGfAfUfCfGfGfGfAf |
| | | | | | | AfC*fU*fG*mG |
| MG29-1 | — | 5691 | mAlb29-8-51b | Nucleotide | N.A. | mG*mU*mU*GAGAAUC |
| sgRNA | | | | | | *mG*mA*mA*mAGAUU |
| targeting | | | | | | CUCAAC*mC*mU*mU*U |
| mouse | | | | | | *UAAUUmUmCmUmACU |
| albumin | | | | | | *G*U*U*GUAGAUCUGU |
| | | | | | | AACGAUCGGGAAC*U* |
| | | | | | | mG*mG |
| MG29-1 | — | 5692 | mAlb29-8-52b | Nucleotide | N.A. | mG*mU*mU*GAGAAUC |
| sgRNA | | | | | | *mG*mA*mA*mAGAUU |
| targeting | | | | | | CUCAAC*mC*mU*mU*U |
| mouse | | | | | | *UAAUUmUmCmUmACU |
| albumin | | | | | | *G*U*U*GUAGAUCUGU |
| | | | | | | AACGfAUfCGfGGfA*A*f |
| | | | | | | CU*fG*mG |
| MG29-1 | — | 5693 | mAlb29-8-53b | Nucleotide | N.A. | mG*mU*mU*mG*mA*m |
| sgRNA | | | | | | G*mA*mA*mU*mC*mG* |
| targeting | | | | | | mA*mA*mA*mG*mA*m |
| mouse | | | | | | U*mU*mC*mU*mC*mA* |
| albumin | | | | | | mA*mC*mC*mU*mU*U* |
| | | | | | | UAAUUmUmCmUmACU* |
| | | | | | | G*U*U*GUAGAUCUGU |
| | | | | | | AACfGfAfUfCfGfGfGfAf |
| | | | | | | AfC*fU*fG*mG |
| MG29-1 | — | 5694 | mAlb29-8-54b | Nucleotide | N.A. | mG*mU*mU*mG*mA*m |
| sgRNA | | | | | | G*mA*mA*mU*mC*mG* |
| targeting | | | | | | mA*mA*mA*mG*mA*m |
| mouse | | | | | | U*mU*mC*mU*mC*mA* |
| albumin | | | | | | mA*mC*mC*mU*mU*U* |
| | | | | | | UAAUUmUmCmUmACU* |
| | | | | | | G*U*U*GUAGAUCUGU |
| | | | | | | AACGAUCGGGAAC*U* |
| | | | | | | mG*mG |
| Guide | — | 5695 | Chemistry 44 (22 | Nucleotide | N.A. | mC*mU*mU*U*U*AAUU |
| modifica- | | | nt spacer) | | | mUmCmUmACU*G*U*U |
| tion | | | | | | *GUAGAUNNNNNNNfNf |
| chemistry | | | | | | NfNfNfNfNfNfN*fNfN*fN* |
| | | | | | | fN*fN*fN*mN |
| Guide | — | 5696 | Chemistry 50 (22 | Nucleotide | N.A. | mG*mU*mU*GAGAAUC |
| modifica- | | | nt spacer) | | | *mG*mA*mA*mAGAUU |
| tion | | | | | | CUCAAC*mC*mU*mU*U |
| chemistry | | | | | | *UAAUUmUmCmUmACU |
| | | | | | | *G*U*U*GUAGAUNNNN |
| | | | | | | NNNfNfNfNfNfNfNfNfNfN |
| | | | | | | fN*fN*fNfN*fN*mN |
| Guide | — | 5697 | Chemistry 50 (20 | Nucleotide | N.A. | mG*mU*mU*GAGAAUC |
| modifica- | | | nt spacer) | | | *mG*mA*mA*mAGAUU |
| tion | | | | | | CUCAAC*mC*mU*mU*U |
| chemistry | | | | | | *UAAUUmUmCmUmACU |
| | | | | | | *G*U*U*GUAGAUNNNN |
| | | | | | | NNNfNfNfNfNfNfNfNfNfN |
| | | | | | | fN*fN*fN*mN |
| Guide | — | 5698 | Chemistry 51 (20 | Nucleotide | N.A. | mG*mU*mU*GAGAAUC |
| modifica- | | | nt spacer) | | | *mG*mA*mA*mAGAUU |
| tion | | | | | | CUCAAC*mC*mU*mU*U |
| chemistry | | | | | | *UAAUUmUmCmUmACU |
| | | | | | | *G*U*U*GUAGAUNNNN |
| | | | | | | NNNNNNNNNNNNN*N* |
| | | | | | | mN*mN |
| Guide | — | 5699 | Chemistry 52 (20 | Nucleotide | N.A. | mG*mU*mU*GAGAAUC |
| modifica- | | | nt spacer) | | | *mG*mA*mA*mAGAUU |
| tion | | | | | | CUCAAC*mC*mU*mU*U |
| chemistry | | | | | | *UAAUUmUmCmUmACU |
| | | | | | | *G*U*U*GUAGAUNNNN |
| | | | | | | NNNNfNNfNNfNNfN*N*f |
| | | | | | | NN*fN*mN |
| Guide | — | 5700 | Chemistry 53 (20 | Nucleotide | N.A. | mG*mU*mU*mG*mA*m |
| modifica- | | | nt spacer) | | | G*mA*mA*mU*mC*mG* |
| tion | | | | | | mA*mA*mA*mG*mA*m |
| chemistry | | | | | | U*mU*mC*mU*mC*mA* |
| | | | | | | mA*mC*mC*mU*mU*U* |
| | | | | | | UAAUUmUmCmUmACU* |
| | | | | | | G*U*U*GUAGAUNNNNN |
| | | | | | | NNfNfNfNfNfNfNfNfNfNf |
| Guide | — | 5701 | Chemistry 54 (20 | Nucleotide | N.A. | mG*mU*mU*mG*mA*m |
| modifica- | | | nt spacer) | | | G*mA*mA*mU*mC*mG* |
| tion | | | | | | mA*mA*mA*mG*mA*m |
| chemistry | | | | | | U*mU*mC*mU*mC*mA* |
| | | | | | | mA*mC*mC*mU*mU*U* |
| | | | | | | UAAUUmUmCmUmACU* |
| | | | | | | G*U*U*GUAGAUNNNNN |
| | | | | | | NNNNNNNNNNNN*N*m |
| | | | | | | N*mN |
| MG29-1 | — | 5702 | mAlb29-8-37 | Nucleotide | N.A. | mC*mU*mU*U*UAAUU |
| sgRNA | | | | | | mUmCmUmACU*G*U*U |
| targeting | | | | | | *GUAGAUCUGUAACfGf |
| mouse | | | | | | AfUfCfGfGfGfAfAfC*fU*f |
| albumin | | | | | | GfG*fC*mA |
| MG29-1 | — | 5703 | mAlb29-12-44 | Nucleotide | N.A. | mC*mU*mU*U*U*AAUU |
| sgRNA | | | | | | mUmCmUmACU*G*U*U |
| targeting | | | | | | *GUAGAUAGUGUAGfCf |
| mouse | | | | | | AfGfAfGfAfGfG*fAfA*fC |
| albumin | | | | | | *fC*fA*fU*mU |
| MG29-1 | — | 5704 | mH29-29-50 | Nucleotide | N.A. | mG*mU*mU*GAGAAUC |
| sgRNA | | | | | | *mG*mA*mA*mAGAUU |
| targeting | | | | | | CUCAAC*mC*mU*mU*U |
| mouse | | | | | | *UAAUUmUmCmUmACU |
| HA01 | | | | | | *G*U*U*GUAGAUCCUU |
| | | | | | | AGGfAfGfAfAfAfAfUfGf |
| | | | | | | CfC*fA*fAfA*fU*mC |
| MG29-1 | — | 5705 | mH29-29-50b | Nucleotide | N.A. | mG*mU*mU*GAGAAUC |
| sgRNA | | | | | | *mG*mA*mA*mAGAUU |
| targeting | | | | | | CUCAAC*mC*mU*mU*U |
| mouse | | | | | | *UAAUUmUmCmUmACU |
| HA01 | | | | | | *G*U*U*GUAGAUCCUU |
| | | | | | | AGGfAfGfAfAfAfAfUfGf |
| | | | | | | CfC*fA*fA*mA |
| MG29-1 | — | 5706 | mH29-29-51b | Nucleotide | N.A. | mG*mU*mU*GAGAAUC |
| sgRNA | | | | | | *mG*mA*mA*mAGAUU |
| targeting | | | | | | CUCAAC*mC*mU*mU*U |
| mouse | | | | | | *UAAUUmUmCmUmACU |
| HA01 | | | | | | *G*U*U*GUAGAUCCUU |
| | | | | | | AGGAGAAAAUGCC*A* |
| | | | | | | mA*mA |
| MG29-1 | — | 5707 | mH29-29-52b | Nucleotide | N.A. | mG*mU*mU*GAGAAUC |
| sgRNA | | | | | | *mG*mA*mA*mAGAUU |
| targeting | | | | | | CUCAAC*mC*mU*mU*U |
| mouse | | | | | | *UAAUUmUmCmUmACU |
| HA01 | | | | | | *G*U*U*GUAGAUCCUU |
| | | | | | | AGGAfGAfAAfAUfG*C*f |
| | | | | | | CA*fA*mA |
| MG29-1 | — | 5708 | mH29-29-53b | Nucleotide | N.A. | mG*mU*mU*mG*mA*m |
| sgRNA | | | | | | G*mA*mA*mU*mC*mG* |
| targeting | | | | | | mA*mA*mA*mG*mA*m |
| mouse | | | | | | U*mU*mC*mU*mC*mA* |
| HA01 | | | | | | mA*mC*mC*mU*mU*U* |
| | | | | | | UAAUUmUmCmUmACU* |
| | | | | | | G*U*U*GUAGAUCCUUA |
| | | | | | | GGfAfGfAfAfAfAfUfGfCf |
| | | | | | | C*fA*fA*mA |
| MG29-1 | — | 5709 | mH29-29-54b | Nucleotide | N.A. | mG*mU*mU*mG*mA*m |
| sgRNA | | | | | | G*mA*mA*mU*mC*mG* |
| targeting | | | | | | mA*mA*mA*mG*mA*m |
| mouse | | | | | | U*mU*mC*mU*mC*mA* |
| HA01 | | | | | | mA*mC*mC*mU*mU*U* |
| | | | | | | UAAUUmUmCmUmACU* |
| | | | | | | G*U*U*GUAGAUCCUUA |
| | | | | | | GGAGAAAAUGCC*A*m |
| | | | | | | A*mA |
| MG29-1 | — | 5710 | mH29-29.1_37 | Nucleotide | N.A. | mC*mU*mU*U*UAAUU |
| sgRNA | | | | | | mUmCmUmACU*G*U*U |
| targeting | | | | | | *GUAGAUCCUUAGGfAf |
| mouse | | | | | | GfAfAfAfAfUfG*fCfC*fA |
| HA01 | | | | | | *fA*mA |
| MG29-1 | — | 5711 | mH29-29.2_37 | Nucleotide | N.A. | mC*mU*mU*U*UAAUU |
| sgRNA | | | | | | mUmCmUmACU*G*U*U |
| targeting | | | | | | *GUAGAUCCUUAGGfAf |
| mouse | | | | | | GfAfAfAfAfUfG*fC*fC*f |
| HA01 | | | | | | A*fA*mA |
| MG29-1 | — | 5712 | mAlb29-g8-37- | Nucleotide | N.A. | mG*mU*mC*UAAGACC |
| CRISPR | | | array | | | UmU*mA*mC*U*U*AAU |
| array | | | | | | UmUmCmUmACU*G*U* |
| targeting | | | | | | U*GUAGAUCUGUAACf |
| mouse | | | | | | GfAfUfCfGfGfGfA*fAfC*f |
| albumin | | | | | | U*fG*fG*fC*mAUCUUC |
| | | | | | | AGUCUAAGACCUMU*m |
| | | | | | | A*mC*U*U*AAUUmUmC |
| | | | | | | mUmACU*G*U*U*GUAG |
| | | | | | | AUCUGUAACfGfAfUfCf |
| | | | | | | GfGfGfA*fAfC*fU*fG*fG |
| | | | | | | *fC*mAUCU*mU*mC*m |
| | | | | | | A |
| MG29-1 | — | 5713 | hA29-87-37B | Nucleotide | N.A. | mC*mU*mU*U*UAAUU |
| sgRNA | | | | | | mUmCmUmACU*G*U*U |
| targeting | | | | | | *GUAGAUCGCACUAfAf |
| human | | | | | | GfGfAfAfAfGfU*fGfC*fA |
| albumin | | | | | | *fA*mA |
| MG29-1 | — | 5714 | hA29-78-37B | Nucleotide | N.A. | mC*mU*mU*U*UAAUU |
| sgRNA | | | | | | mUmCmUmACU*G*U*U |
| targeting | | | | | | *GUAGAUUUUUGCGfCf |
| human | | | | | | AfCfUfAfAfGfG*fAfA*fA |
| albumin | | | | | | *fG*mU |
| MG29-1 | — | 5715 | hA29-74-37B | Nucleotide | N.A. | mC*mU*mU*U*UAAUU |
| sgRNA | | | | | | mUmCmUmACU*G*U*U |
| targeting | | | | | | *GUAGAUAAUAAAGfCf |
| human | | | | | | AfUfAfGfUfGfC*fAfA*fU |
| albumin | | | | | | *fG*mG |
| MG29-1 | — | 5716 | hA29-83-37B | Nucleotide | N.A. | mC*mU*mU*U*UAAUU |
| sgRNA | | | | | | mUmCmUmACU*G*U*U |
| targeting | | | | | | *GUAGAUUGAGAUCfAf |
| human | | | | | | AfCfAfGfCfAfC*fAfG*fG |
| albumin | | | | | | *fU*mU |
| MG29-1 | — | 5717 | hA29-84-37B | Nucleotide | N.A. | mC*mU*mU*U*UAAUU |
| sgRNA | | | | | | mUmCmUmACU*G*U*U |
| targeting | | | | | | *GUAGAUCACUUUCfCf |
| human | | | | | | UfUfAfGfUfGfC*fGfC*fA |
| albumin | | | | | | *fA*mA |
| MG29-1 | — | 5718 | hH29-4_37b | Nucleotide | N.A. | mC*mU*mU*U*UAAUU |
| sgRNA | | | | | | mUmCmUmACU*G*U*U |
| targeting | | | | | | *GUAGAUCCCCAGAfCf |
| human | | | | | | CfUfGfUfAfAfU*fAfG*fU |
| HA01 | | | | | | *fC*mA |
| MG29-1 | — | 5719 | hH29-21 37b | Nucleotide | N.A. | mC*mU*mU*U*UAAUU |
| sgRNA | | | | | | mUmCmUmACU*G*U*U |
| targeting | | | | | | *GUAGAUGGACAGAfGf |
| human | | | | | | GfGfUfCfAfGfC*fAfU*fG |
| HA01 | | | | | | *fC*mC |
| MG29-1 | — | 5720 | hH29-23_37b | Nucleotide | N.A. | mC*mU*mU*U*UAAUU |
| sgRNA | | | | | | mUmCmUmACU*G*U*U |
| targeting | | | | | | *GUAGAUUCAGCCUfGf |
| human | | | | | | UfCfAfGfUfCfC*fCfU*fG |
| HA01 | | | | | | *fG*mG |
| MG29-1 | — | 5721 | hH29-41_37b | Nucleotide | N.A. | mC*mU*mU*U*UAAUU |
| sgRNA | | | | | | mUmCmUmACU*G*U*U |
| targeting | | | | | | *GUAGAUAUAUCUUfCf |
| human | | | | | | CfCfAfGfCfUfG*fAfU*fA |
| HAO1 | | | | | | *fG*mA |
| MG29-1 | — | 5722 | hH29-4_50 | Nucleotide | N.A. | mG*mU*mU*GAGAAUC |
| sgRNA | | | | | | *mG*mA*mA*mAGAUU |
| targeting | | | | | | CUCAAC*mC*mU*mU*U |
| human | | | | | | *UAAUUmUmCmUmACU |
| HA01 | | | | | | *G*U*U*GUAGAUCCCC |
| | | | | | | AGAfCfCfUfGfUfAfAfUfA |
| | | | | | | fG*fU*fCfA*fU*mA |
| MG29-1 | — | 5723 | hH29-21_50 | Nucleotide | N.A. | mG*mU*mU*GAGAAUC |
| sgRNA | | | | | | *mG*mA*mA*mAGAUU |
| targeting | | | | | | CUCAAC*mC*mU*mU*U |
| human | | | | | | *UAAUUmUmCmUmACU |
| HA01 | | | | | | *G*U*U*GUAGAUGGAC |
| | | | | | | AGAfGfGfGfUfCfAfGfCf |
| | | | | | | AfU*fG*fCfC*fA*mA |
| MG29-1 | — | 5724 | hH29-23_50 | Nucleotide | N.A. | mG*mU*mU*GAGAAUC |
| sgRNA | | | | | | *mG*mA*mA*mAGAUU |
| targeting | | | | | | CUCAAC*mC*mU*mU*U |
| human | | | | | | *UAAUUmUmCmUmACU |
| HA01 | | | | | | *G*U*U*GUAGAUUCAG |
| | | | | | | CCUfGfUfCfAfGfUfCfCfC |
| | | | | | | fU*fG*fGfG*fA*mA |
| MG29-1 | — | 5725 | hH29-41_50 | Nucleotide | N.A. | mG*mU*mU*GAGAAUC |
| sgRNA | | | | | | *mG*mA*mA*mAGAUU |
| targeting | | | | | | CUCAAC*mC*mU*mU*U |
| human | | | | | | *UAAUUmUmCmUmACU |
| HA01 | | | | | | *G*U*U*GUAGAUAUAU |
| | | | | | | CUUfCfCfCfAfGfCfUfGfA |
| | | | | | | fU*fA*fGfA*fU*mG |
| MG29-1 | — | 5726 | hH29-4_50b | Nucleotide | N.A. | mG*mU*mU*GAGAAUC |
| sgRNA | | | | | | *mG*mA*mA*mAGAUU |
| targeting | | | | | | CUCAAC*mC*mU*mU*U |
| human | | | | | | *UAAUUmUmCmUmACU |
| HA01 | | | | | | *G*U*U*GUAGAUCCCC |
| | | | | | | AGAfCfCfUfGfUfAfAfU*f |
| | | | | | | AfG*fU*fC*mA |
| MG29-1 | — | 5727 | hH29-21_50b | Nucleotide | N.A. | mG*mU*mU*GAGAAUC |
| sgRNA | | | | | | *mG*mA*mA*mAGAUU |
| targeting | | | | | | CUCAAC*mC*mU*mU*U |
| human | | | | | | *UAAUUmUmCmUmACU |
| HA01 | | | | | | *G*U*U*GUAGAUGGAC |
| | | | | | | AGAfGfGfGfUfCfAfGfC*f |
| | | | | | | AfU*fG*fC*mC |
| MG29-1 | — | 5728 | hH29-23_50b | Nucleotide | N.A. | mG*mU*mU*GAGAAUC |
| sgRNA | | | | | | *mG*mA*mA*mAGAUU |
| targeting | | | | | | CUCAAC*mC*mU*mU*U |
| human | | | | | | *UAAUUmUmCmUmACU |
| HA01 | | | | | | *G*U*U*GUAGAUUCAG |
| | | | | | | CCUfGfUfCfAfGfUfCfC*f |
| | | | | | | CfU*fG*fG*mG |
| MG29-1 | — | 5729 | hH29-41_50b | Nucleotide | N.A. | mG*mU*mU*GAGAAUC |
| sgRNA | | | | | | *mG*mA*mA*mAGAUU |
| targeting | | | | | | CUCAAC*mC*mU*mU*U |
| human | | | | | | *UAAUUmUmCmUmACU |
| HA01 | | | | | | *G*U*U*GUAGAUAUAU |
| | | | | | | CUUfCfCfCfAfGfCfUfG*f |
| | | | | | | AfU*fA*fG*mA |
| MG29-1 | — | 5730 | mH29-1-50 | Nucleotide | N.A. | mG*mU*mU*GAGAAUC |
| sgRNA | | | | | | *mG*mA*mA*mAGAUU |
| targeting | | | | | | CUCAAC*mC*mU*mU*U |
| mouse | | | | | | *UAAUUmUmCmUmACU |
| HA01 | | | | | | *G*U*U*GUAGAUCCCC |
| | | | | | | AGAfCfCfUfGfUfAfAfUfA |
| | | | | | | fG*fU*fCfA*fU*mA |
| MG29-1 | — | 5731 | mH29-15-50 | Nucleotide | N.A. | mG*mU*mU*GAGAAUC |
| sgRNA | | | | | | *mG*mA*mA*mAGAUU |
| targeting | | | | | | CUCAAC*mC*mU*mU*U |
| mouse | | | | | | *UAAUUmUmCmUmACU |
| HA01 | | | | | | *G*U*U*GUAGAUUGAC |
| | | | | | | UGUfGfGfAfCfAfCfCfCf |
| | | | | | | CfU*fU*fAfC*fC*mU |
| MG29-1 | — | 5732 | mH29-1-50b | Nucleotide | N.A. | mG*mU*mU*GAGAAUC |
| sgRNA | | | | | | *mG*mA*mA*mAGAUU |
| targeting | | | | | | CUCAAC*mC*mU*mU*U |
| mouse | | | | | | *UAAUUmUmCmUmACU |
| HA01 | | | | | | *G*U*U*GUAGAUCCCC |
| | | | | | | AGAfCfCfUfGfUfAfAfUfA |
| | | | | | | fG*fU*fC*mA |
| MG29-1 | — | 5733 | mH29-15-50b | Nucleotide | N.A. | mG*mU*mU*GAGAAUC |
| sgRNA | | | | | | *mG*mA*mA*mAGAUU |
| targeting | | | | | | CUCAAC*mC*mU*mU*U |
| mouse | | | | | | *UAAUUmUmCmUmACU |
| HA01 | | | | | | *G*U*U*GUAGAUUGAC |
| | | | | | | UGUfGfGfAfCfAfCfCfCf |
| | | | | | | CfU*fU*fA*mC |
| SpCas9 | — | 5734 | mAlbR1 guide | Nucleotide | N.A. | mU*mU*mA*GUAUAGC |
| sgRNA | | | RNA | | | AUGGUCGAGCGUUUU |
| targeting | | | | | | AGAGCUAGAAAUAGCA |
| mouse | | | | | | AGUUAAAAUAAGGCUA |
| albumin | | | | | | GUCCGUUAUCAACUUG |
| | | | | | | AAAAAGUGGCACCGA |
| | | | | | | GUCGGUGCmU*mU*mU |
| | | | | | | *U |
| SpCas9 | — | 5735 | mAlbR2 guide | Nucleotide | N.A. | mU*mU*mC*CUGUAAC |
| sgRNA | | | RNA | | | GAUCGGGAACGUUUU |
| targeting | | | | | | AGAGCUAGAAAUAGCA |
| mouse | | | | | | AGUUAAAAUAAGGCUA |
| albumin | | | | | | GUCCGUUAUCAACUUG |
| | | | | | | AAAAAGUGGCACCGA |
| | | | | | | GUCGGUGCmU*mU*mU |
| | | | | | | *U |
| SpCas9 | — | 5736 | mAlbR3 guide | Nucleotide | N.A. | mU*mG*mC*CAGUUCC |
| sgRNA | | | RNA | | | CGAUCGUUACGUUUUA |
| targeting | | | | | | GAGCUAGAAAUAGCAA |
| mouse | | | | | | GUUAAAAUAAGGCUAG |
| albumin | | | | | | UCCGUUAUCAACUUGA |
| | | | | | | AAAAGUGGCACCGAG |
| | | | | | | UCGGUGCmU*mU*mU* |
| | | | | | | U |
| PCR | — | 5737 | mAlb90F PCR | Nucleotide | N.A. | CTCCTCTTCGTCTCCG |
| primer | | | primer | | | GC |
| PCR | — | 5738 | mAlb1073R PCR | Nucleotide | N.A. | CTGCCACATTGCTCAG |
| primer | | | primer | | | CAC |
| PCR | — | 5739 | mAlb282F PCR | Nucleotide | N.A. | TTGCATCTGAGAACCC |
| primer | | | primer | | | TTAGG |
| PCR | — | 5740 | mAlb460F PCR | Nucleotide | N.A. | GCCTGCTCGACCATGC |
| primer | | | primer | | | TATA |
| SpCas9 | — | 5741 | mAlbR2 guide | Nucleotide | N.A. | mU*mU*mC*CUGUAAC |
| sgRNA | | | RNA with | | | GAUCGGGAACGUUUU |
| targeting | | | extensive | | | AGAmGmCmUmAGAAA |
| mouse | | | chemical | | | mUmAmGmCAAGUUAA |
| albumin | | | modifications | | | AAUAAGGCUAGUCCGU |
| | | | | | | UAUCmAmAmCmUmUG |
| | | | | | | AAAmAmAmGmUmGmG |
| | | | | | | mCmAmCmCmGmAmG |
| | | | | | | mUmCmGmGmUmGmC |
| | | | | | | mU*mU*mU*U |
| SpCas9 | — | 5742 | Template DNA for | Nucleotide | N.A. | GCGGCCGCTAATACGA |
| DNA | | | spCas9 in vitro | | | CTCACTATAAGAAAAG |
| sequence | | | transcription | | | CCAGCTCCAGCAGGCG |
| | | | | | | CTGCTCACTCCTCCCC |
| | | | | | | ATCCTCTCCCTCTGTC |
| | | | | | | CCTCTGTCCCTCTGAC |
| | | | | | | CCTGCACTGTCCCAGC |
| | | | | | | ACCATGGCCCCCAAGA |
| | | | | | | AGAAGCGGAAAGTTG |
| | | | | | | GCGGCGGAGGCAGCG |
| | | | | | | ACAAGAAGTACTCTAT |
| | | | | | | CGGCCTGGACATCGGC |
| | | | | | | ACCAACTCTGTTGGAT |
| | | | | | | GGGCCGTGATCACCGA |
| | | | | | | CGAGTACAAGGTGCCC |
| | | | | | | AGCAAGAAATTCAAGG |
| | | | | | | TGCTGGGCAACACCGA |
| | | | | | | CCGGCACAGCATCAAG |
| | | | | | | AAGAATCTGATCGGCG |
| | | | | | | CCCTGCTGTTCGACTC |
| | | | | | | TGGCGAAACAGCCGAA |
| | | | | | | GCCACCAGACTGAAGA |
| | | | | | | GAACCGCCAGACGGC |
| | | | | | | GGTACACCAGAAGAAA |
| | | | | | | GAACCGGATCTGCTAC |
| | | | | | | CTGCAAGAGATCTTCA |
| | | | | | | GCAACGAGATGGCCAA |
| | | | | | | GGTGGACGACAGCTTC |
| | | | | | | TTCCACAGACTGGAAG |
| | | | | | | AGTCCTTCCTGGTGGA |
| | | | | | | AGAGGACAAGAAGCA |
| | | | | | | CGAGCGGCACCCCATC |
| | | | | | | TTCGGCAACATCGTGG |
| | | | | | | ATGAGGTGGCCTACCA |
| | | | | | | CGAGAAGTACCCCACC |
| | | | | | | ATCTACCACCTGAGAA |
| | | | | | | AGAAACTGGTGGACAG |
| | | | | | | CACCGACAAGGCCGAC |
| | | | | | | CTGAGACTGATCTATC |
| | | | | | | TGGCCCTGGCTCACAT |
| | | | | | | GATCAAGTTCCGGGGC |
| | | | | | | CACTTCCTGATCGAGG |
| | | | | | | GCGACCTGAATCCTGA |
| | | | | | | CAACAGCGACGTGGAC |
| | | | | | | AAGCTGTTCATCCAGC |
| | | | | | | TGGTGCAGACCTACAA |
| | | | | | | CCAGCTGTTCGAGGAA |
| | | | | | | AACCCCATCAACGCCA |
| | | | | | | GCGGAGTGGATGCCA |
| | | | | | | AGGCCATCCTGTCTGC |
| | | | | | | CAGACTGAGCAAGAGC |
| | | | | | | AGACGGCTGGAAAACC |
| | | | | | | TGATCGCTCAGCTGCC |
| | | | | | | CGGCGAGAAGAAGAA |
| | | | | | | TGGCCTGTTCGGCAAC |
| | | | | | | CTGATTGCCCTGAGCC |
| | | | | | | TGGGCCTGACACCTAA |
| | | | | | | CTTCAAGAGCAACTTC |
| | | | | | | GACCTGGCCGAGGAC |
| | | | | | | GCCAAACTGCAGCTGT |
| | | | | | | CCAAGGACACCTACGA |
| | | | | | | CGACGACCTGGACAAT |
| | | | | | | CTGCTGGCCCAGATCG |
| | | | | | | GCGATCAGTACGCCGA |
| | | | | | | CTTGTTTCTGGCCGCC |
| | | | | | | AAGAACCTGTCCGACG |
| | | | | | | CCATCCTGCTGAGCGA |
| | | | | | | CATCCTGAGAGTGAAC |
| | | | | | | ACCGAGATCACAAAGG |
| | | | | | | CCCCTCTGAGCGCCTC |
| | | | | | | TATGATCAAGAGATAC |
| | | | | | | GACGAGCACCACCAG |
| | | | | | | GATCTGACCCTGCTGA |
| | | | | | | AGGCCCTCGTTAGACA |
| | | | | | | GCAGCTGCCTGAGAAG |
| | | | | | | TACAAAGAGATTTTCT |
| | | | | | | TCGACCAGAGCAAGAA |
| | | | | | | CGGCTACGCCGGCTAC |
| | | | | | | ATTGATGGCGGAGCCA |
| | | | | | | GCCAAGAGGAATTCTA |
| | | | | | | CAAGTTCATCAAGCCC |
| | | | | | | ATCCTCGAGAAGATGG |
| | | | | | | ACGGCACCGAGGAACT |
| | | | | | | GCTGGTCAAGCTGAAC |
| | | | | | | AGAGAGGACCTGCTGC |
| | | | | | | GGAAGCAGCGGACCTT |
| | | | | | | CGACAATGGCTCTATC |
| | | | | | | CCTCACCAGATCCACC |
| | | | | | | TGGGAGAGCTGCACG |
| | | | | | | CCATTCTGCGGAGACA |
| | | | | | | AGAGGACTTTTACCCA |
| | | | | | | TTCCTGAAGGACAACC |
| | | | | | | GGGAAAAGATTGAGAA |
| | | | | | | GATCCTGACCTTCAGG |
| | | | | | | ATCCCCTACTACGTGG |
| | | | | | | GACCACTGGCCAGAG |
| | | | | | | GCAATAGCAGATTCGC |
| | | | | | | CTGGATGACCAGAAAG |
| | | | | | | AGCGAGGAAACCATCA |
| | | | | | | CACCCTGGAACTTCGA |
| | | | | | | GGAAGTGGTGGACAA |
| | | | | | | GGGCGCCAGCGCTCA |
| | | | | | | GTCCTTCATCGAGCGG |
| | | | | | | ATGACCAACTTCGATA |
| | | | | | | AGAACCTGCCTAACGA |
| | | | | | | GAAGGTGCTGCCCAAG |
| | | | | | | CACAGCCTGCTGTACG |
| | | | | | | AGTACTTCACCGTGTA |
| | | | | | | CAACGAGCTGACCAAA |
| | | | | | | GTGAAATACGTGACCG |
| | | | | | | AGGGAATGAGAAAGC |
| | | | | | | CCGCCTTTCTGAGCGG |
| | | | | | | CGAGCAGAAAAAGGC |
| | | | | | | CATTGTGGATCTGCTG |
| | | | | | | TTCAAGACCAACCGGA |
| | | | | | | AAGTGACCGTGAAGCA |
| | | | | | | GCTGAAAGAGGACTAC |
| | | | | | | TTCAAGAAAATCGAGT |
| | | | | | | GCTTCGACAGCGTGGA |
| | | | | | | AATCAGCGGCGTGGAA |
| | | | | | | GATCGGTTCAATGCCA |
| | | | | | | GCCTGGGCACATACCA |
| | | | | | | CGACCTGCTGAAAATT |
| | | | | | | ATCAAGGACAAGGACT |
| | | | | | | TCCTGGACAACGAAGA |
| | | | | | | GAACGAGGACATCCTG |
| | | | | | | GAAGATATCGTGCTGA |
| | | | | | | CCCTGACACTGTTTGA |
| | | | | | | GGACAGAGAGATGATC |
| | | | | | | GAGGAACGGCTGAAA |
| | | | | | | ACATACGCCCACCTGT |
| | | | | | | TCGACGACAAAGTGAT |
| | | | | | | GAAGCAACTGAAGCG |
| | | | | | | GCGGAGATACACCGG |
| | | | | | | CTGGGGCAGACTGTCT |
| | | | | | | CGGAAGCTGATCAACG |
| | | | | | | GCATCCGGGATAAGCA |
| | | | | | | GTCCGGCAAGACCATC |
| | | | | | | CTGGACTTTCTGAAGT |
| | | | | | | CCGACGGCTTCGCCAA |
| | | | | | | CAGAAACTTCATGCAG |
| | | | | | | CTGATCCACGACGACA |
| | | | | | | GCCTGACCTTTAAAGA |
| | | | | | | GGATATCCAGAAAGCC |
| | | | | | | CAGGTGTCCGGCCAG |
| | | | | | | GGCGATTCTCTGCATG |
| | | | | | | AGCACATTGCCAACCT |
| | | | | | | GGCCGGCTCTCCCGCC |
| | | | | | | ATTAAGAAGGGCATTC |
| | | | | | | TGCAGACAGTGAAGGT |
| | | | | | | GGTGGACGAGCTGGT |
| | | | | | | CAAAGTCATGGGCAGA |
| | | | | | | CACAAGCCCGAGAACA |
| | | | | | | TCGTGATCGAAATGGC |
| | | | | | | CAGAGAGAACCAGACC |
| | | | | | | ACACAGAAGGGCCAG |
| | | | | | | AAGAACAGCCGCGAG |
| | | | | | | AGAATGAAGCGGATCG |
| | | | | | | AAGAGGGCATCAAAGA |
| | | | | | | GCTGGGCAGCCAGATC |
| | | | | | | CTGAAAGAACACCCCG |
| | | | | | | TGGAAAACACCCAGCT |
| | | | | | | GCAGAACGAGAAGCT |
| | | | | | | GTACCTGTACTACCTC |
| | | | | | | CAGAACGGCCGGGAT |
| | | | | | | ATGTACGTGGACCAAG |
| | | | | | | AGCTGGACATCAACCG |
| | | | | | | GCTGTCCGACTACGAT |
| | | | | | | GTGGACCATATCGTGC |
| | | | | | | CCCAGTCTTTTCTGAA |
| | | | | | | GGACGACTCCATCGAC |
| | | | | | | AACAAGGTCCTGACCA |
| | | | | | | GATCCGACAAGAATCG |
| | | | | | | GGGCAAGAGCGACAA |
| | | | | | | CGTGCCCTCCGAAGAG |
| | | | | | | GTGGTCAAGAAGATGA |
| | | | | | | AGAACTACTGGCGACA |
| | | | | | | GCTGCTGAACGCCAAG |
| | | | | | | CTGATTACCCAGCGGA |
| | | | | | | AGTTCGATAACCTGAC |
| | | | | | | CAAGGCCGAGAGAGG |
| | | | | | | CGGCCTGTCTGAACTG |
| | | | | | | GATAAGGCCGGCTTCA |
| | | | | | | TCAAGAGACAGCTGGT |
| | | | | | | GGAAACCCGGCAGATC |
| | | | | | | ACCAAACACGTGGCAC |
| | | | | | | AGATTCTGGACTCCCG |
| | | | | | | GATGAACACTAAGTAC |
| | | | | | | GACGAGAATGACAAGC |
| | | | | | | TGATCCGGGAAGTGAA |
| | | | | | | AGTGATCACCCTGAAG |
| | | | | | | TCCAAGCTGGTGTCCG |
| | | | | | | ATTTCCGGAAGGATTT |
| | | | | | | CCAGTTCTACAAAGTG |
| | | | | | | CGCGAGATCAACAACT |
| | | | | | | ACCATCACGCCCACGA |
| | | | | | | CGCCTACCTGAATGCC |
| | | | | | | GTTGTTGGAACAGCCC |
| | | | | | | TGATCAAGAAGTATCC |
| | | | | | | CAAGCTGGAAAGCGA |
| | | | | | | GTTCGTGTACGGCGAC |
| | | | | | | TACAAGGTGTACGACG |
| | | | | | | TGCGGAAGATGATCGC |
| | | | | | | CAAGAGCGAGCAAGA |
| | | | | | | GATTGGCAAGGCTACC |
| | | | | | | GCCAAGTACTTTTTCT |
| | | | | | | ACAGCAACATCATGAA |
| | | | | | | CTTTTTCAAGACCGAG |
| | | | | | | ATTACCCTGGCCAACG |
| | | | | | | GCGAGATCAGAAAGC |
| | | | | | | GGCCTCTGATCGAGAC |
| | | | | | | AAACGGCGAAACCGG |
| | | | | | | CGAGATTGTGTGGGAT |
| | | | | | | AAGGGCAGAGACTTTG |
| | | | | | | CCACAGTGCGGAAAGT |
| | | | | | | GCTGAGCATGCCCCAA |
| | | | | | | GTGAATATCGTGAAGA |
| | | | | | | AAACCGAGGTGCAGAC |
| | | | | | | AGGCGGCTTCAGCAAA |
| | | | | | | GAGTCCATTCTGCCCA |
| | | | | | | AGAGAAACAGCGATAA |
| | | | | | | GCTGATCGCCCGGAAG |
| | | | | | | AAGGACTGGGACCCTA |
| | | | | | | AGAAGTACGGCGGCTT |
| | | | | | | CGATAGCCCTACCGTG |
| | | | | | | GCCTATTCTGTGCTGG |
| | | | | | | TGGTGGCCAAAGTGGA |
| | | | | | | AAAGGGCAAGTCCAAG |
| | | | | | | AAACTCAAGAGCGTGA |
| | | | | | | AAGAGCTGCTGGGGAT |
| | | | | | | CACCATCATGGAAAGA |
| | | | | | | AGCAGCTTCGAGAAGA |
| | | | | | | ATCCTATCGATTTCCT |
| | | | | | | CGAGGCCAAGGGCTA |
| | | | | | | CAAAGAAGTGAAAAAG |
| | | | | | | GACCTGATCATCAAGC |
| | | | | | | TCCCCAAGTACTCCCT |
| | | | | | | GTTCGAGCTGGAAAAT |
| | | | | | | GGCCGGAAGCGGATG |
| | | | | | | CTGGCTTCTGCTGGCG |
| | | | | | | AACTGCAGAAGGGAAA |
| | | | | | | CGAACTGGCCCTGCCT |
| | | | | | | AGCAAATATGTGAACT |
| | | | | | | TCCTGTACCTGGCCAG |
| | | | | | | CCACTATGAGAAGCTG |
| | | | | | | AAGGGCAGCCCCGAG |
| | | | | | | GACAATGAGCAAAAGC |
| | | | | | | AGCTGTTTGTGGAACA |
| | | | | | | GCACAAGCACTACCTG |
| | | | | | | GACGAGATCATCGAGC |
| | | | | | | AGATCAGCGAGTTCTC |
| | | | | | | CAAGAGAGTGATCCTG |
| | | | | | | GCCGACGCTAATCTGG |
| | | | | | | ACAAAGTGCTGTCCGC |
| | | | | | | CTACAACAAGCACCGG |
| | | | | | | GACAAGCCTATCAGAG |
| | | | | | | AGCAGGCCGAGAATAT |
| | | | | | | CATCCACCTGTTTACC |
| | | | | | | CTGACCAATCTGGGAG |
| | | | | | | CCCCTGCCGCCTTCAA |
| | | | | | | GTACTTCGACACCACC |
| | | | | | | ATCGACCGGAAGCGCT |
| | | | | | | ACACCAGCACCAAAGA |
| | | | | | | GGTGCTGGACGCCACA |
| | | | | | | CTGATCCACCAGTCTA |
| | | | | | | TCACCGGCCTGTACGA |
| | | | | | | GACACGGATCGACCTG |
| | | | | | | TCTCAGCTCGGAGGCG |
| | | | | | | ATTCTGGCGGAAAAAG |
| | | | | | | ACCTGCCGCCACAAAG |
| | | | | | | AAAGCCGGACAGGCC |
| | | | | | | AAGAAAAAGAAGTGAC |
| | | | | | | CACACCCCCATTCCCC |
| | | | | | | CACTCCAGATAAAGCT |
| | | | | | | TCAGTTATATCTCACG |
| | | | | | | TGTCTGGAGTTAAAAA |
| | | | | | | AAAAAAAAAAAAAAAA |
| | | | | | | AAAAAAAAAAAAAAAA |
| | | | | | | AAAAAAAAAAAAAAAA |
| | | | | | | AAAAAAAAAAAAAAAA |
| | | | | | | AAAAAAAAAAAAAAAA |
| | | | | | | AAAAAAAAAAAAAAAG |
| | | | | | | AAGAGCCCTGCAGG |
| SpCas9 | — | 5743 | Amino acid | Protein | N.A. | MAPKKKRKVGGGGSD |
| protein | | | sequence of | | | KKYSIGLDIGTNSVGWA |
| sequence | | | spCas9 encoded in | | | VITDEYKVPSKKFKVLG |
| | | | mRNA inclusing | | | NTDRHSIKKNLIGALLF |
| | | | nuclear | | | DSGETAEATRLKRTAR |
| | | | localization | | | RRYTRRKNRICYLQEIF |
| | | | signals | | | SNEMAKVDDSFFHRLE |
| | | | | | | ESFLVEEDKKHERHPIF |
| | | | | | | GNIVDEVAYHEKYPTIY |
| | | | | | | HLRKKLVDSTDKADLR |
| | | | | | | LIYLALAHMIKFRGHFL |
| | | | | | | IEGDLNPDNSDVDKLFI |
| | | | | | | QLVQTYNQLFEENPINA |
| | | | | | | SGVDAKAILSARLSKSR |
| | | | | | | RLENLIAQLPGEKKNGL |
| | | | | | | FGNLIALSLGLTPNFKS |
| | | | | | | NFDLAEDAKLQLSKDT |
| | | | | | | YDDDLDNLLAQIGDQY |
| | | | | | | ADLFLAAKNLSDAILLS |
| | | | | | | DILRVNTEITKAPLSAS |
| | | | | | | MIKRYDEHHQDLTLLK |
| | | | | | | ALVRQQLPEKYKEIFFD |
| | | | | | | QSKNGYAGYIDGGASQ |
| | | | | | | EEFYKFIKPILEKMDGT |
| | | | | | | EELLVKLNREDLLRKQ |
| | | | | | | RTFDNGSIPHQIHLGEL |
| | | | | | | HAILRRQEDFYPFLKDN |
| | | | | | | REKIEKILTFRIPYYVGP |
| | | | | | | LARGNSRFAWMTRKSE |
| | | | | | | ETITPWNFEEVVDKGAS |
| | | | | | | AQSFIERMTNFDKNLPN |
| | | | | | | EKVLPKHSLLYEYFTVY |
| | | | | | | NELTKVKYVTEGMRKP |
| | | | | | | AFLSGEQKKAIVDLLFK |
| | | | | | | TNRKVTVKQLKEDYFK |
| | | | | | | KIECFDSVEISGVEDRFN |
| | | | | | | ASLGTYHDLLKIIKDKD |
| | | | | | | FLDNEENEDILEDIVLTL |
| | | | | | | TLFEDREMIEERLKTYA |
| | | | | | | HLFDDKVMKQLKRRR |
| | | | | | | YTGWGRLSRKLINGIRD |
| | | | | | | KQSGKTILDFLKSDGFA |
| | | | | | | NRNFMQLIHDDSLTFKE |
| | | | | | | DIQKAQVSGQGDSLHE |
| | | | | | | HIANLAGSPAIKKGILQ |
| | | | | | | TVKVVDELVKVMGRH |
| | | | | | | KPENIVIEMARENQTTQ |
| | | | | | | KGQKNSRERMKRIEEG |
| | | | | | | IKELGSQILKEHPVENT |
| | | | | | | QLQNEKLYLYYLQNGR |
| | | | | | | DMYVDQELDINRLSDY |
| | | | | | | DVDHIVPQSFLKDDSID |
| | | | | | | NKVLTRSDKNRGKSDN |
| | | | | | | VPSEEVVKKMKNYWR |
| | | | | | | QLLNAKLITQRKFDNLT |
| | | | | | | KAERGGLSELDKAGFIK |
| | | | | | | RQLVETRQITKHVAQIL |
| | | | | | | DSRMNTKYDENDKLIR |
| | | | | | | EVKVITLKSKLVSDFRK |
| | | | | | | DFQFYKVREINNYHHA |
| | | | | | | HDAYLNAVVGTALIKK |
| | | | | | | YPKLESEFVYGDYKVY |
| | | | | | | DVRKMIAKSEQEIGKAT |
| | | | | | | AKYFFYSNIMNFFKTEI |
| | | | | | | TLANGEIRKRPLIETNG |
| | | | | | | ETGEIVWDKGRDFATV |
| | | | | | | RKVLSMPQVNIVKKTE |
| | | | | | | VQTGGFSKESILPKRNS |
| | | | | | | DKLIARKKDWDPKKYG |
| | | | | | | GFDSPTVAYSVLVVAKV |
| | | | | | | EKGKSKKLKSVKELLGI |
| | | | | | | TIMERSSFEKNPIDFLEA |
| | | | | | | KGYKEVKKDLIIKLPKY |
| | | | | | | SLFELENGRKRMLASA |
| | | | | | | GELQKGNELALPSKYV |
| | | | | | | NFLYLASHYEKLKGSPE |
| | | | | | | DNEQKQLFVEQHKHYL |
| | | | | | | DEIIEQISEFSKRVILAD |
| | | | | | | ANLDKVLSAYNKHRDK |
| | | | | | | PIREQAENIIHLFTLTNL |
| | | | | | | GAPAAFKYFDTTIDRKR |
| | | | | | | YTSTKEVLDATLIHQSIT |
| | | | | | | GLYETRIDLSQLGGDSG |
| | | | | | | GKRPAATKKAGQAKK |
| | | | | | | KK |
| MG29-1 | — | 5744 | mAlb29-8-50 | Nucleotide | N.A. | mG*mU*mU*GAGAAUC |
| sgRNA | | | guide RNA | | | *mG*mA*mA*mAGAUU |
| targeting | | | | | | CUCAAC*mC*mU*mU*U |
| mouse | | | | | | *UAAUUmUmCmUmACU |
| albumin | | | | | | *G*U*U*GUAGAUCUGU |
| | | | | | | AACfGfAfUfCfGfGfGfAf |
| | | | | | | AfC*fU*fGfG*fC*mA |
| MG29-1 | — | 5788 | hH29-1 | Nucleotide | N.A. | UAAUUUCUACUGUUGU |
| sgRNA | | | | | | AGAUGCAUGUUGUUCA |
| targeting | | | | | | UAAUCAUUGA |
| human | | | | | | |
| HAO-1 | | | | | | |
| MG29-1 | — | 5789 | hH29-2 | Nucleotide | N.A. | UAAUUUCUACUGUUGU |
| sgRNA | | | | | | AGAUGAAGUACUGAUU |
| targeting | | | | | | UAGCAUGUUG |
| human | | | | | | |
| HAO-1 | | | | | | |
| MG29-1 | — | 5790 | hH29-3 | Nucleotide | N.A. | UAAUUUCUACUGUUGU |
| sgRNA | | | | | | AGAUUAUCAAUGAUUA |
| targeting | | | | | | UGAACAACAU |
| human | | | | | | |
| HAO-1 | | | | | | |
| MG29-1 | — | 5791 | hH29-4 | Nucleotide | N.A. | UAAUUUCUACUGUUGU |
| sgRNA | | | | | | AGAUCCCCAGACCUGU |
| targeting | | | | | | AAUAGUCAUA |
| human | | | | | | |
| HAO-1 | | | | | | |
| MG29-1 | — | 5792 | hH29-5 | Nucleotide | N.A. | UAAUUUCUACUGUUGU |
| sgRNA | | | | | | AGAUUUCAUCAUUUGC |
| targeting | | | | | | CCCAGACCUG |
| human | | | | | | |
| HAO-1 | | | | | | |
| MG29-1 | — | 5793 | hH29-6 | Nucleotide | N.A. | UAAUUUCUACUGUUGU |
| sgRNA | | | | | | AGAUUUACCUGGAAAA |
| targeting | | | | | | UGCUGCAAUA |
| human | | | | | | |
| HAO-1 | | | | | | |
| MG29-1 | — | 5794 | hH29-7 | Nucleotide | N.A. | UAAUUUCUACUGUUGU |
| sgRNA | | | | | | AGAUCUUACCUGGAAA |
| targeting | | | | | | AUGCUGCAAU |
| human | | | | | | |
| HAO-1 | | | | | | |
| MG29-1 | — | 5795 | hH29-8 | Nucleotide | N.A. | UAAUUUCUACUGUUGU |
| sgRNA | | | | | | AGAUGCUGAUAAUAUU |
| targeting | | | | | | GCAGCAUUUU |
| human | | | | | | |
| HAO-1 | | | | | | |
| MG29-1 | — | 5796 | hH29-9 | Nucleotide | N.A. | UAAUUUCUACUGUUGU |
| sgRNA | | | | | | AGAUAAAAAUAAAUUU |
| targeting | | | | | | UCUUACCUGG |
| human | | | | | | |
| HAO-1 | | | | | | |
| MG29-1 | — | 5797 | hH29-10 | Nucleotide | N.A. | UAAUUUCUACUGUUGU |
| sgRNA | | | | | | AGAUAAAAAAUAAAUU |
| targeting | | | | | | UUCUUACCUG |
| human | | | | | | |
| HAO-1 | | | | | | |
| MG29-1 | — | 5798 | hH29-11 | Nucleotide | N.A. | UAAUUUCUACUGUUGU |
| sgRNA | | | | | | AGAUAUUUUAUUUUUU |
| targeting | | | | | | AAUUCUAGAU |
| human | | | | | | |
| HAO-1 | | | | | | |
| MG29-1 | — | 5799 | hH29-12 | Nucleotide | N.A | UAAUUUCUACUGUUGU |
| sgRNA | | | | | | AGAUUUUUAUUUUUUA |
| targeting | | | | | | AUUCUAGAUG |
| human | | | | | | |
| HAO-1 | | | | | | |
| MG29-1 | — | 5800 | hH29-13 | Nucleotide | N.A. | UAAUUUCUACUGUUGU |
| sgRNA | | | | | | AGAUAUUUUUUAAUUC |
| targeting | | | | | | UAGAUGGAAG |
| human | | | | | | |
| HAO-1 | | | | | | |
| MG29-1 | — | 5801 | hH29-14 | Nucleotide | N.A. | UAAUUUCUACUGUUGU |
| sgRNA | | | | | | AGAUUUUUUUAAUUCU |
| targeting | | | | | | AGAUGGAAGC |
| human | | | | | | |
| HAO-1 | | | | | | |
| MG29-1 | — | 5802 | hH29-15 | Nucleotide | N.A. | UAAUUUCUACUGUUGU |
| sgRNA | | | | | | AGAUUUAAUUCUAGAU |
| targeting | | | | | | GGAAGCUGUA |
| human | | | | | | |
| HAO-1 | | | | | | |
| MG29-1 | — | 5803 | hH29-16 | Nucleotide | N.A. | UAAUUUCUACUGUUGU |
| sgRNA | | | | | | AGAUUAAUUCUAGAUG |
| targeting | | | | | | GAAGCUGUAU |
| human | | | | | | |
| HAO-1 | | | | | | |
| MG29-1 | — | 5804 | hH29-17 | Nucleotide | N.A. | UAAUUUCUACUGUUGU |
| sgRNA | | | | | | AGAUAAUUCUAGAUGG |
| targeting | | | | | | AAGCUGUAUC |
| human | | | | | | |
| HAO-1 | | | | | | |
| MG29-1 | — | 5805 | hH29-18 | Nucleotide | N.A. | UAAUUUCUACUGUUGU |
| sgRNA | | | | | | AGAUAUUCUAGAUGGA |
| targeting | | | | | | AGCUGUAUCC |
| human | | | | | | |
| HAO-1 | | | | | | |
| MG29-1 | — | 5806 | hH29-19 | Nucleotide | N.A. | UAAUUUCUACUGUUGU |
| sgRNA | | | | | | AGAUAGCAACAUUCCG |
| targeting | | | | | | GAGCAUCCUU |
| human | | | | | | |
| HAO-1 | | | | | | |
| MG29-1 | — | 5807 | hH29-20 | Nucleotide | N.A. | UAAUUUCUACUGUUGU |
| sgRNA | | | | | | AGAUAGGACAGAGGG |
| targeting | | | | | | UCAGCAUGCCA |
| human | | | | | | |
| HAO-1 | | | | | | |
| MG29-1 | — | 5808 | hH29-21 | Nucleotide | N.A. | UAAUUUCUACUGUUGU |
| sgRNA | | | | | | AGAUGGACAGAGGGU |
| targeting | | | | | | CAGCAUGCCAA |
| human | | | | | | |
| HAO-1 | | | | | | |
| MG29-1 | — | 5809 | hH29-22 | Nucleotide | N.A. | UAAUUUCUACUGUUGU |
| sgRNA | | | | | | AGAUUUUCUCAGCCUG |
| targeting | | | | | | UCAGUCCCUG |
| human | | | | | | |
| HAO-1 | | | | | | |
| MG29-1 | — | 5810 | hH29-23 | Nucleotide | N.A. | UAAUUUCUACUGUUGU |
| sgRNA | | | | | | AGAUUCAGCCUGUCAG |
| targeting | | | | | | UCCCUGGGAA |
| human | | | | | | |
| HAO-1 | | | | | | |
| MG29-1 | — | 5811 | hH29-24 | Nucleotide | N.A. | UAAUUUCUACUGUUGU |
| sgRNA | | | | | | AGAUUGACAGUGGAC |
| targeting | | | | | | ACACCUUACCU |
| human | | | | | | |
| HAO-1 | | | | | | |
| MG29-1 | — | 5812 | hH29-25 | Nucleotide | N.A. | UAAUUUCUACUGUUGU |
| sgRNA | | | | | | AGAUAAUCUGUUACGC |
| targeting | | | | | | ACAUCAUCCA |
| human | | | | | | |
| HAO-1 | | | | | | |
| MG29-1 | — | 5813 | hH29-26 | Nucleotide | N.A. | UAAUUUCUACUGUUGU |
| sgRNA | | | | | | AGAUAUGCAUUUCUUA |
| targeting | | | | | | UUUUAGGAUG |
| human | | | | | | |
| HAO-1 | | | | | | |
| MG29-1 | — | 5814 | hH29-27 | Nucleotide | N.A. | UAAUUUCUACUGUUGU |
| sgRNA | | | | | | AGAUUGCAUUUCUUAU |
| targeting | | | | | | UUUAGGAUGA |
| human | | | | | | |
| HAO-1 | | | | | | |
| MG29-1 | — | 5815 | hH29-28 | Nucleotide | N.A. | UAAUUUCUACUGUUGU |
| sgRNA | | | | | | AGAUUUAUUUUAGGAU |
| targeting | | | | | | GAAAAAUUUU |
| human | | | | | | |
| HAO-1 | | | | | | |
| MG29-1 | — | 5816 | hH29-29 | Nucleotide | N.A. | UAAUUUCUACUGUUGU |
| sgRNA | | | | | | AGAUAGGAUGAAAAAU |
| targeting | | | | | | UUUGAAACCA |
| human | | | | | | |
| HAO-1 | | | | | | |
| MG29-1 | — | 5817 | hH29-30 | Nucleotide | N.A. | UAAUUUCUACUGUUGU |
| sgRNA | | | | | | AGAUGGAUGAAAAAUU |
| targeting | | | | | | UUGAAACCAG |
| human | | | | | | |
| HAO-1 | | | | | | |
| MG29-1 | — | 5818 | hH29-31 | Nucleotide | N.A. | UAAUUUCUACUGUUGU |
| sgRNA | | | | | | AGAUCUCAGGAGAAAA |
| targeting | | | | | | UGAUAAAGUA |
| human | | | | | | |
| HAO-1 | | | | | | |
| MG29-1 | — | 5819 | hH29-32 | Nucleotide | N.A. | UAAUUUCUACUGUUGU |
| sgRNA | | | | | | AGAUCCUCAGGAGAAA |
| targeting | | | | | | AUGAUAAAGU |
| human | | | | | | |
| HAO-1 | | | | | | |
| MG29-1 | — | 5820 | hH29-33 | Nucleotide | N.A. | UAAUUUCUACUGUUGU |
| sgRNA | | | | | | AGAUGAAACCAGUACU |
| targeting | | | | | | UUAUCAUUUU |
| human | | | | | | |
| HAO-1 | | | | | | |
| MG29-1 | — | 5821 | hH29-34 | Nucleotide | N.A. | UAAUUUCUACUGUUGU |
| sgRNA | | | | | | AGAUAAACCAGUACUU |
| targeting | | | | | | UAUCAUUUUC |
| human | | | | | | |
| HAO-1 | | | | | | |
| MG29-1 | | 5822 | hH29-35 | Nucleotide | N.A. | UAAUUUCUACUGUUGU |
| sgRNA | | | | | | AGAUUCAUUUUCUCCU |
| targeting | | | | | | GAGGAAAAUU |
| human | | | | | | |
| HAO-1 | | | | | | |
| MG29-1 | — | 5823 | hH29-36 | Nucleotide | N.A. | UAAUUUCUACUGUUGU |
| sgRNA | | | | | | AGAUCUCCUGAGGAAA |
| targeting | | | | | | AUUUUGGAGA |
| human | | | | | | |
| HAO-1 | | | | | | |
| MG29-1 | — | 5824 | hH29-37 | Nucleotide | N.A. | UAAUUUCUACUGUUGU |
| sgRNA | | | | | | AGAUUCCUGAGGAAAA |
| targeting | | | | | | UUUUGGAGAC |
| human | | | | | | |
| HAO-1 | | | | | | |
| MG29-1 | — | 5825 | hH29-38 | Nucleotide | N.A. | UAAUUUCUACUGUUGU |
| sgRNA | | | | | | AGAUGCCACAUAUGCA |
| targeting | | | | | | GCAAGUCCAC |
| human | | | | | | |
| HAO-1 | | | | | | |
| MG29-1 | — | 5826 | hH29-39 | Nucleotide | N.A. | UAAUUUCUACUGUUGU |
| sgRNA | | | | | | AGAUGGAGACGACAG |
| targeting | | | | | | UGGACUUGCUG |
| human | | | | | | |
| HAO-1 | | | | | | |
| MG29-1 | — | 5827 | hH29-40 | Nucleotide | N.A. | UAAUUUCUACUGUUGU |
| sgRNA | | | | | | AGAUGAGACGACAGU |
| targeting | | | | | | GGACUUGCUGC |
| human | | | | | | |
| HAO-1 | | | | | | |
| MG29-1 | — | 5828 | hH29-41 | Nucleotide | N.A. | UAAUUUCUACUGUUGU |
| sgRNA | | | | | | AGAUAUAUCUUCCCAG |
| targeting | | | | | | CUGAUAGAUG |
| human | | | | | | |
| HAO-1 | | | | | | |
| MG29-1 | — | 5829 | hH29-42 | Nucleotide | N.A. | UAAUUUCUACUGUUGU |
| sgRNA | | | | | | AGAUCAACAAUUGGCA |
| targeting | | | | | | AUGAUGUCAG |
| human | | | | | | |
| HAO-1 | | | | | | |
| DNA | — | 5830 | DNA sequence | Nucleotide | N.A. | AAAAGCCAGCTCCAGC |
| sequence | | | encoding the | | | AGGCGCTGCTCACTCC |
| encoding | | | MG29-1 | | | TCCCCATCCTCTCCCT |
| the | | | messenger RNA | | | CTGTCCCTCTGTCCCT |
| MG29-1 | | | | | | CTGACCCTGCACTGTC |
| messenger | | | | | | CCAGCACCATGGCCCC |
| RNA | | | | | | TAAGAAGAAGAGAAAA |
| | | | | | | GTCGGCGGAGGCGGC |
| | | | | | | AGCTTCAACAACTTCA |
| | | | | | | TCAAGAAGTACAGCCT |
| | | | | | | GCAGAAAACCCTGCGC |
| | | | | | | TTCGAGCTGAAGCCTG |
| | | | | | | TGGGCGAGACAGCCG |
| | | | | | | ACTACATCGAGGACTT |
| | | | | | | CAAGAGCGAGTACCTG |
| | | | | | | AAGGACACCGTGCTGA |
| | | | | | | AGGACGAGCAGAGAG |
| | | | | | | CCAAGGACTACCAAGA |
| | | | | | | GATCAAGACCCTGATC |
| | | | | | | GACGATTACCACCGCG |
| | | | | | | AGTACATCGAAGAGTG |
| | | | | | | CCTGAGAGAACCCGTG |
| | | | | | | GACAAGAAAACCGGC |
| | | | | | | GAGATCCTGGACTTCA |
| | | | | | | CCCAGGACCTGGAAGA |
| | | | | | | TGCCTTCAGCTACTAC |
| | | | | | | CAGAAGCTGAAAGAGA |
| | | | | | | ACCCCACCGAGAACAG |
| | | | | | | AGTCGGCTGGGAGAA |
| | | | | | | AGAGCAAGAGAGCCT |
| | | | | | | GAGGAAGAAGCTGGT |
| | | | | | | CACCTCCTTCGTGGGC |
| | | | | | | AACGACGGCCTGTTCA |
| | | | | | | AGAAAGAGTTCATCAC |
| | | | | | | CAGGGACCTGCCTGAG |
| | | | | | | TGGCTGCAGAAGAAAG |
| | | | | | | GACTCTGGGGCGAGTA |
| | | | | | | CAAGGACACAGTGGAA |
| | | | | | | AACTTCAAGAAGTTCA |
| | | | | | | CCACCTACTTCAGCGG |
| | | | | | | CTTCCACGAGAACCGG |
| | | | | | | AAGAACATGTACACCG |
| | | | | | | CCGAGGCTCAGAGCAC |
| | | | | | | CGCTATCGCCAACAGA |
| | | | | | | CTGATGAACGACAACC |
| | | | | | | TGCCTAAGTTCTTTAA |
| | | | | | | CAACTACCTGGCCTAC |
| | | | | | | CAGACCATCAAAGAGA |
| | | | | | | AGCACCCCGACCTGGT |
| | | | | | | GTTCAGACTGGATGAT |
| | | | | | | GCTCTGCTGCAGGCCG |
| | | | | | | CTGGCGTGGAACATCT |
| | | | | | | GGATGAGGCTTTCCAG |
| | | | | | | CCTAGATACTTCAGCA |
| | | | | | | GACTGTTCGCCCAGAG |
| | | | | | | CGGCATCACCGCTTTC |
| | | | | | | AACGAGCTGATCGGCG |
| | | | | | | GCAGAACCACAGAGAA |
| | | | | | | CGGCGAGAAGATCCA |
| | | | | | | GGGCCTGAACGAGCA |
| | | | | | | GATCAACCTGTACAGA |
| | | | | | | CAGCAGAACCCCGAGA |
| | | | | | | AGGCCAAGGGCTTCCC |
| | | | | | | CAGATTCATGCCTCTG |
| | | | | | | TTCAAGCAGATCCTGA |
| | | | | | | GCGACAGAGAGACAC |
| | | | | | | ACAGCTTTCTGCCCGA |
| | | | | | | CGCCTTCGAGAACGAC |
| | | | | | | AAAGAGCTGCTCCAGG |
| | | | | | | CTCTGAGAGACTACGT |
| | | | | | | GGACGCCGCCACATCT |
| | | | | | | GAGGAAGGCATGATCA |
| | | | | | | GCCAGCTGAACAAGGC |
| | | | | | | CATGAACCAGTTCGTG |
| | | | | | | ACCGCCGACCTGAAGA |
| | | | | | | GAGTGTACATCAAGAG |
| | | | | | | CGCCGCTCTGACCAGC |
| | | | | | | CTGAGCCAAGAGCTGT |
| | | | | | | TCCACTTCTTCGGCGT |
| | | | | | | GATCAGCGACGCTATC |
| | | | | | | GCTTGGTACGCCGAGA |
| | | | | | | AGAGACTGAGCCCCAA |
| | | | | | | GAAGGCCCAAGAGTCT |
| | | | | | | TTCCTGAAGCAAGAGG |
| | | | | | | TGTACGCCATCGAGGA |
| | | | | | | ACTGAACCAGGCTGTC |
| | | | | | | GTGGGCTACATCGACC |
| | | | | | | AGCTGGAAGATCAGAG |
| | | | | | | CGAGCTGCAGCAACTG |
| | | | | | | CTGGTGGACCTGCCAG |
| | | | | | | ATCCTCAGAAACCCGT |
| | | | | | | GTCCAGCTTCATCCTG |
| | | | | | | ACACACTGGCAGAAGT |
| | | | | | | CTCAAGAGCCCCTGCA |
| | | | | | | GGCAGTGATCGCCAAG |
| | | | | | | GTGGAACCTCTGTTCG |
| | | | | | | AACTGGAAGAACTGAG |
| | | | | | | CAAGAACAAGAGGGC |
| | | | | | | CCCAAAGCACGACAAG |
| | | | | | | GACCAAGGCGGCGAG |
| | | | | | | GGATTTCAGCAGGTCG |
| | | | | | | ACGCCATCAAGAACAT |
| | | | | | | GCTGGACGCCTTCATG |
| | | | | | | GAAGTGTCCCACGCTA |
| | | | | | | TCAAGCCCCTGTACCT |
| | | | | | | GGTCAAGGGAAGAAA |
| | | | | | | GGCCATCGACATGCCC |
| | | | | | | GACGTGGACACCGGCT |
| | | | | | | TCTACGCTGATTTCGC |
| | | | | | | CGAGGCCTACAGCGCC |
| | | | | | | TACGAGCAAGTGACAG |
| | | | | | | TGTCCCTGTACAACAA |
| | | | | | | GACCAGAAACCACCTG |
| | | | | | | TCCAAGAAGCCCTTCA |
| | | | | | | GCAAGGACAAGATCAA |
| | | | | | | GATCAACTTCGACGCC |
| | | | | | | CCTACACTGCTGAACG |
| | | | | | | GCTGGGACCTGAACAA |
| | | | | | | AGAGAGCGACAACAA |
| | | | | | | GTCCATCATCCTGCGG |
| | | | | | | AAGGACGGCAACTTCT |
| | | | | | | ACCTGGCAATCATGCA |
| | | | | | | CCCCAAGCACACCAAG |
| | | | | | | GTGTTCGACTGCTACT |
| | | | | | | CTGCCTCTGAGGCTGC |
| | | | | | | CGGCAAGTGCTACGAG |
| | | | | | | AAGATGAACTACAAGC |
| | | | | | | TGCTGAGCGGCGCCAA |
| | | | | | | CAAGATGCTGCCTAAG |
| | | | | | | GTGTTCTTTAGCAAGA |
| | | | | | | AGGGCATCGAGACATT |
| | | | | | | CAGCCCTCCACAAGAA |
| | | | | | | ATCCTGGACCTGTACA |
| | | | | | | AGAACAACGAGCATAA |
| | | | | | | GAAGGGCGCCACCTTC |
| | | | | | | AAGCTGGAATCCTGCC |
| | | | | | | ACAAGCTGATCGATTT |
| | | | | | | CTTCAAGCGGAACATC |
| | | | | | | CCCAAGTACAAGGTGC |
| | | | | | | ACCCTACCGACAACTT |
| | | | | | | TGGCTGGGACGTGTTC |
| | | | | | | GGCTTTCACTTCAGCC |
| | | | | | | CTACCAGCAGCTACGG |
| | | | | | | CGACCTGTCTGGCTTC |
| | | | | | | TACAGAGAGGTGGAA |
| | | | | | | GCCCAGGGATACAAGC |
| | | | | | | TGTGGTTCAGCGACGT |
| | | | | | | GTCCGAGGCTTACATC |
| | | | | | | AACAAATGCGTGGAAG |
| | | | | | | AGGGCAAGCTGTTCCT |
| | | | | | | GTTCCAAATCTACAAC |
| | | | | | | AAGGACTTCTCCCCTA |
| | | | | | | ACTCCACCGGCAAGCC |
| | | | | | | CAACCTGCACACCCTG |
| | | | | | | TATTGGAAGGGCCTGT |
| | | | | | | TCGAGCCCGAGAACCT |
| | | | | | | GAAAGACGTGGTGCTG |
| | | | | | | AAGCTGAATGGCGAG |
| | | | | | | GCCGAGATCTTCTACC |
| | | | | | | GGAAGCACAGCATCAA |
| | | | | | | GCACGAGGACAAGAC |
| | | | | | | CATCCACAGAGCTAAG |
| | | | | | | GACCCTATCGCTAACA |
| | | | | | | AGAACGCTGACAACCC |
| | | | | | | CAAGAAACAGAGCGTG |
| | | | | | | TTCGATTACGACATCA |
| | | | | | | TCAAGGATAAGCGGTA |
| | | | | | | TACCCAGGACAAGTTC |
| | | | | | | TTCTTCCACGTGCCAA |
| | | | | | | TCAGCCTGAACTTCAA |
| | | | | | | AAGCCAGGGCGTCGT |
| | | | | | | GCGGTTCAACGATAAG |
| | | | | | | ATCAACGGCCTGCTGG |
| | | | | | | CCGCTCAGGACGATGT |
| | | | | | | GCATGTGATCGGCATC |
| | | | | | | GACAGAGGCGAGAGA |
| | | | | | | CATCTGCTGTACTACA |
| | | | | | | CCGTGGTCAACGGCAA |
| | | | | | | GGGCGAAGTGGTGGA |
| | | | | | | ACAGGGCAGCCTGAAT |
| | | | | | | CAGGTGGCCACAGATC |
| | | | | | | AGGGCTACGTGGTGG |
| | | | | | | ATTACCAGCAGAAGCT |
| | | | | | | GCACGCCAAAGAGAAA |
| | | | | | | GAACGCGACCAGGCC |
| | | | | | | AGAAAGAACTGGTCCA |
| | | | | | | CCATCGAGAACATCAA |
| | | | | | | AGAACTGAAGGCCGG |
| | | | | | | CTACCTGAGCCAGGTG |
| | | | | | | GTGCATAAGCTGGCTC |
| | | | | | | AGCTGATCGTGAAGCA |
| | | | | | | CAACGCCATCGTGTGC |
| | | | | | | CTCGAGGACCTGAATT |
| | | | | | | TCGGCTTCAAGAGGGG |
| | | | | | | CAGATTCAAGGTCGAG |
| | | | | | | AAACAGGTGTACCAGA |
| | | | | | | AGTTCGAGAAGGCTCT |
| | | | | | | GATCGACAAGCTGAAC |
| | | | | | | TACCTCGTGTTCAAAG |
| | | | | | | AGAGAGGCGCCACAC |
| | | | | | | AGGCTGGCGGATACCT |
| | | | | | | GAATGCTTACCAGCTG |
| | | | | | | GCCGCACCTTTCGAGA |
| | | | | | | GCTTTGAGAAGCTGGG |
| | | | | | | CAAGCAGACCGGCATC |
| | | | | | | CTGTACTACGTGCGGA |
| | | | | | | GCGACTACACCAGCAA |
| | | | | | | GATCGACCCTGCTACC |
| | | | | | | GGCTTCGTGGACTTTC |
| | | | | | | TGAAGCCTAAGTACGA |
| | | | | | | GAGCATGGCCAAGAG |
| | | | | | | CAAAGTGTTCTTCGAG |
| | | | | | | TCCTTCGAGCGCATCC |
| | | | | | | AGTGGAACCAGGCCAA |
| | | | | | | AGGCTACTTCGAGTTC |
| | | | | | | GAGTTTGACTACAAGA |
| | | | | | | AGATGTGCCCCAGCAG |
| | | | | | | AAAGTTCGGCGACTAC |
| | | | | | | AGAACCAGATGGGTCG |
| | | | | | | TGTGCACCTTCGGCGA |
| | | | | | | CACCCGCTACCAGAAC |
| | | | | | | AGAAGAAACAAGAGCA |
| | | | | | | GCGGCCAGTGGGAGA |
| | | | | | | CAGAGACAATCGATGT |
| | | | | | | GACAGCCCAGCTGAAA |
| | | | | | | GCCCTGTTCGCCGCTT |
| | | | | | | ACGGCATCACATACAA |
| | | | | | | TCAAGAGGATAACATC |
| | | | | | | AAGGACGCCATTGCCG |
| | | | | | | CCGTGAAGTACACCAA |
| | | | | | | GTTCTACAAGCAGCTG |
| | | | | | | TACTGGCTGCTGAGAC |
| | | | | | | TGACCCTGAGCCTGAG |
| | | | | | | ACACAGCGTGACAGGC |
| | | | | | | ACCGACGAGGATTTCA |
| | | | | | | TCCTGTCTCCAGTGGC |
| | | | | | | CGACGAGAATGGCGT |
| | | | | | | GTTCTTTGACTCTAGG |
| | | | | | | AAGGCCACCGACAAGC |
| | | | | | | AGCCTAAGGACGCTGA |
| | | | | | | TGCTAACGGCGCCTAC |
| | | | | | | CATATCGCCCTGAAAG |
| | | | | | | GCCTGTGGAATCTCCA |
| | | | | | | GCAGATCAGACAGCAC |
| | | | | | | GACTGGAACGTGGAAA |
| | | | | | | AGCCCAAAAAGCTGAA |
| | | | | | | CCTCGCCATGAAGAAC |
| | | | | | | GAAGAGTGGTTCGGCT |
| | | | | | | TCGCTCAGAAGAAGAA |
| | | | | | | GTTTAGAGCCAGCGGC |
| | | | | | | GGCAAGAGGCCTGCC |
| | | | | | | GCTACAAAAAAAGCCG |
| | | | | | | GCCAGGCCAAGAAAAA |
| | | | | | | GAAGTGACCACACCCC |
| | | | | | | CATTCCCCCACTCCAG |
| | | | | | | ATAGAACTTCAGTTAT |
| | | | | | | ATCTCACGTGTCTGGA |
| | | | | | | GTT |
| MG29-1 | — | 5831 | hH29-4_37 | Nucleotide | N.A. | mC*mU*mU*U*UAAUU |
| sgRNA | | | | | | mUmCmUmACU*G*U*U |
| targeting | | | | | | *GUAGAUCCCCAGAfCf |
| human | | | | | | CfUfGfUfAfAfUfAfG*fU*f |
| HAO-1 | | | | | | CfA*fU*mA |
| MG29-1 | — | 5832 | hH29-21-37 | Nucleotide | N.A. | mC*mU*mU*U*UAAUU |
| sgRNA | | | | | | mUmCmUmACU*G*U*U |
| targeting | | | | | | *GUAGAUGGACAGAfGf |
| human | | | | | | GfGfUfCfAfGfCfAfU*fG*f |
| HAO-1 | | | | | | CfC*fA*mA |
| MG29-1 | — | 5833 | hH29-23-37 | Nucleotide | N.A. | mC*mU*mU*U*UAAUU |
| sgRNA | | | | | | mUmCmUmACU*G*U*U |
| targeting | | | | | | *GUAGAUUCAGCCUfGf |
| human | | | | | | UfCfAfGfUfCfCfCfU*fG*f |
| HAO-1 | | | | | | GfG*fA*mA |
| MG29-1 | — | 5834 | hH29-41-37 | Nucleotide | N.A. | mC*mU*mU*U*UAAUU |
| sgRNA | | | | | | mUmCmUmACU*G*U*U |
| targeting | | | | | | *GUAGAUAUAUCUUfCf |
| human | | | | | | CfCfAfGfCfUfGfAfU*fA*f |
| HAO-1 | | | | | | GfA*fU*mG |
| Guide | — | 5835 | Chemistry 37 | Nucleotide | N.A. | mC*mU*mU*U*UAAUU |
| modification | | | (22 nt spacer) | | | mUmCmUmACU*G*U*U |
| chemistry | | | | | | *GUAGAUNNNNNNNfNf |
| | | | | | | NfNfNfNfNfNfNfNfN*fN*f |
| | | | | | | NfN*fN*mN |
| MG29-1 | — | 5836 | mH29-29-37 | Nucleotide | N.A. | mC*mU*mU*U*UAAUU |
| sgRNA | | | | | | mUmCmUmACU*G*U*U |
| targeting | | | | | | *GUAGAUCCUUAGGfAf |
| mouse | | | | | | GfAfAfAfAfUfGfCfC*fA*f |
| HAO-1 | | | | | | AfA*fU*mC |
| MG29-1 | — | 5837 | mH29-29-44 | Nucleotide | N.A. | mC*mU*mU*U*U*AAUU |
| sgRNA | | | | | | mUmCmUmACU*G*U*U |
| targeting | | | | | | *GUAGAUCCUUAGGfAf |
| mouse | | | | | | GfAfAfAfAfUfG*fCfC*fA |
| HAO-1 | | | | | | *fA*fA*fU*mC |
| MG29-1 | — | 5838 | mH29-29s-37 | Nucleotide | N.A. | mC*mU*mU*U*UAAUU |
| sgRNA | | | | | | mUmCmUmACU*G*U*U |
| targeting | | | | | | *GUAGAUCCUUAGGfAf |
| mouse | | | | | | GfAfAfAfAfUfG*fCfC*fA |
| HAO-1 | | | | | | *fA*mA |
| MG29-1 | — | 5839 | mH29-29s-44 | Nucleotide | N.A. | mC*mU*mU*U*UAAUU |
| sgRNA | | | | | | mUmCmUmACU*G*U*U |
| targeting | | | | | | *GUAGAUCCUUAGGfAf |
| mouse | | | | | | GfAfAfAfAfUfG*fC*fC*f |
| HAO-1 | | | | | | A*fA*mA |
| MG29-1 | — | 5840 | mH29-29-50 | Nucleotide | N.A. | mG*mU*mU*GAGAAUC |
| sgRNA | | | | | | *mG*mA*mA*mAGAUU |
| targeting | | | | | | CUCAAC*mC*mU*mU*U |
| mouse | | | | | | *UAAUUmUmCmUmACU |
| HAO-1 | | | | | | *G*U*U*GUAGAUCCUU |
| | | | | | | AGGfAfGfAfAfAfAfUfGf |
| | | | | | | CfC*fA*fAfA*fU*mC |
| MG29-1 | — | 5841 | mH29-29-50b | Nucleotide | N.A. | mG*mU*mU*GAGAAUC |
| sgRNA | | | | | | *mG*mA*mA*mAGAUU |
| targeting | | | | | | CUCAAC*mC*mU*mU*U |
| mouse | | | | | | *UAAUUmUmCmUmACU |
| HAO-1 | | | | | | *G*U*U*GUAGAUCCUU |
| | | | | | | AGGfAfGfAfAfAfAfUfGf |
| | | | | | | CfC*fA*fA*mA |
| MG29-1 | — | 5842 | mH29-29-51b | Nucleotide | N.A. | mG*mU*mU*GAGAAUC |
| sgRNA | | | | | | *mG*mA*mA*mAGAUU |
| targeting | | | | | | CUCAAC*mC*mU*mU*U |
| mouse | | | | | | *UAAUUmUmCmUmACU |
| HAO-1 | | | | | | *G*U*U*GUAGAUCCUU |
| | | | | | | AGGAGAAAAUGCC*A* |
| | | | | | | mA*mA |
| MG29-1 | — | 5843 | mH29-29-52b | Nucleotide | N.A. | mG*mU*mU*GAGAAUC |
| sgRNA | | | | | | *mG*mA*mA*mAGAUU |
| targeting | | | | | | CUCAAC*mC*mU*mU*U |
| mouse | | | | | | *UAAUUmUmCmUmACU |
| HAO-1 | | | | | | *G*U*U*GUAGAUCCUU |
| | | | | | | AGGAfGAfAAfAUfG*C |
| | | | | | | *fCA*fA*mA |
| MG29-1 | — | 5844 | mH29-29-53b | Nucleotide | N.A. | mG*mU*mU*mG*mA*m |
| sgRNA | | | | | | G*mA*mA*mU*mC*mG* |
| targeting | | | | | | mA*mA*mA*mG*mA*m |
| mouse | | | | | | mA*mC*mC*mU*mU*U* |
| HAO-1 | | | | | | UAAUUmUmCmUmACU* |
| | | | | | | G*U*U*GUAGAUCCUUA |
| | | | | | | GGfAfGfAfAfAfAfUfG |
| | | | | | | fCfC*fA*fA*mA |
| MG29-1 | — | 5845 | mH29-29-54b | Nucleotide | N.A. | mG*mU*mU*mG*mA*m |
| sgRNA | | | | | | G*mA*mA*mU*mC*mG* |
| targeting | | | | | | mA*mA*mA*mG*mA*m |
| mouse | | | | | | U*mU*mC*mU*mC*mA* |
| HAO-1 | | | | | | mA*mC*mC*mU*mU*U* |
| | | | | | | UAAUUmUmCmUmACU* |
| | | | | | | G*U*U*GUAGAUCCUUA |
| | | | | | | GGAGAAAAUGCC*A*m |
| | | | | | | A*mA |
| DNA | — | 5846 | DNA sequence | Nucleotide | N.A. | AAAAGCCAGCTCCAGC |
| sequence | | | encoding the | | | AGGCGCTGCTCACTCC |
| encoding | | | MG29-1 | | | TCCCCATCCTCTCCCT |
| the | | | messenger RNA | | | CTGTCCCTCTGTCCCT |
| MG29-1 | | | | | | CTGACCCTGCACTGTC |
| messenger | | | | | | CCAGCACCATGGCCCC |
| RNA | | | | | | TAAGAAGAAGAGAAAA |
| | | | | | | GTCGGCGGAGGCGGC |
| | | | | | | AGCTTCAACAACTTCA |
| | | | | | | TCAAGAAGTACAGCCT |
| | | | | | | GCAGAAAACCCTGCGC |
| | | | | | | TTCGAGCTGAAGCCTG |
| | | | | | | TGGGCGAGACAGCCG |
| | | | | | | ACTACATCGAGGACTT |
| | | | | | | CAAGAGCGAGTACCTG |
| | | | | | | AAGGACACCGTGCTGA |
| | | | | | | AGGACGAGCAGAGAG |
| | | | | | | CCAAGGACTACCAAGA |
| | | | | | | GATCAAGACCCTGATC |
| | | | | | | GACGATTACCACCGCG |
| | | | | | | AGTACATCGAAGAGTG |
| | | | | | | CCTGAGAGAACCCGTG |
| | | | | | | GACAAGAAAACCGGC |
| | | | | | | GAGATCCTGGACTTCA |
| | | | | | | CCCAGGACCTGGAAGA |
| | | | | | | TGCCTTCAGCTACTAC |
| | | | | | | CAGAAGCTGAAAGAGA |
| | | | | | | ACCCCACCGAGAACAG |
| | | | | | | AGTCGGCTGGGAGAA |
| | | | | | | AGAGCAAGAGAGCCT |
| | | | | | | GAGGAAGAAGCTGGT |
| | | | | | | CACCTCCTTCGTGGGC |
| | | | | | | AACGACGGCCTGTTCA |
| | | | | | | AGAAAGAGTTCATCAC |
| | | | | | | CAGGGACCTGCCTGAG |
| | | | | | | TGGCTGCAGAAGAAAG |
| | | | | | | GACTCTGGGGCGAGTA |
| | | | | | | CAAGGACACAGTGGAA |
| | | | | | | AACTTCAAGAAGTTCA |
| | | | | | | CCACCTACTTCAGCGG |
| | | | | | | CTTCCACGAGAACCGG |
| | | | | | | AAGAACATGTACACCG |
| | | | | | | CCGAGGCTCAGAGCAC |
| | | | | | | CGCTATCGCCAACAGA |
| | | | | | | CTGATGAACGACAACC |
| | | | | | | TGCCTAAGTTCTTTAA |
| | | | | | | CAACTACCTGGCCTAC |
| | | | | | | CAGACCATCAAAGAGA |
| | | | | | | AGCACCCCGACCTGGT |
| | | | | | | GTTCAGACTGGATGAT |
| | | | | | | GCTCTGCTGCAGGCCG |
| | | | | | | CTGGCGTGGAACATCT |
| | | | | | | GGATGAGGCTTTCCAG |
| | | | | | | CCTAGATACTTCAGCA |
| | | | | | | GACTGTTCGCCCAGAG |
| | | | | | | CGGCATCACCGCTTTC |
| | | | | | | AACGAGCTGATCGGCG |
| | | | | | | GCAGAACCACAGAGAA |
| | | | | | | CGGCGAGAAGATCCA |
| | | | | | | GGGCCTGAACGAGCA |
| | | | | | | GATCAACCTGTACAGA |
| | | | | | | CAGCAGAACCCCGAGA |
| | | | | | | AGGCCAAGGGCTTCCC |
| | | | | | | CAGATTCATGCCTCTG |
| | | | | | | TTCAAGCAGATCCTGA |
| | | | | | | GCGACAGAGAGACAC |
| | | | | | | ACAGCTTTCTGCCCGA |
| | | | | | | CGCCTTCGAGAACGAC |
| | | | | | | AAAGAGCTGCTCCAGG |
| | | | | | | CTCTGAGAGACTACGT |
| | | | | | | GGACGCCGCCACATCT |
| | | | | | | GAGGAAGGCATGATCA |
| | | | | | | GCCAGCTGAACAAGGC |
| | | | | | | CATGAACCAGTTCGTG |
| | | | | | | ACCGCCGACCTGAAGA |
| | | | | | | GAGTGTACATCAAGAG |
| | | | | | | CGCCGCTCTGACCAGC |
| | | | | | | CTGAGCCAAGAGCTGT |
| | | | | | | TCCACTTCTTCGGCGT |
| | | | | | | GATCAGCGACGCTATC |
| | | | | | | GCTTGGTACGCCGAGA |
| | | | | | | AGAGACTGAGCCCCAA |
| | | | | | | GAAGGCCCAAGAGTCT |
| | | | | | | TTCCTGAAGCAAGAGG |
| | | | | | | TGTACGCCATCGAGGA |
| | | | | | | ACTGAACCAGGCTGTC |
| | | | | | | GTGGGCTACATCGACC |
| | | | | | | AGCTGGAAGATCAGAG |
| | | | | | | CGAGCTGCAGCAACTG |
| | | | | | | CTGGTGGACCTGCCAG |
| | | | | | | ATCCTCAGAAACCCGT |
| | | | | | | GTCCAGCTTCATCCTG |
| | | | | | | ACACACTGGCAGAAGT |
| | | | | | | CTCAAGAGCCCCTGCA |
| | | | | | | GGCAGTGATCGCCAAG |
| | | | | | | GTGGAACCTCTGTTCG |
| | | | | | | AACTGGAAGAACTGAG |
| | | | | | | CAAGAACAAGAGGGC |
| | | | | | | CCCAAAGCACGACAAG |
| | | | | | | GACCAAGGCGGCGAG |
| | | | | | | GGATTTCAGCAGGTCG |
| | | | | | | ACGCCATCAAGAACAT |
| | | | | | | GCTGGACGCCTTCATG |
| | | | | | | GAAGTGTCCCACGCTA |
| | | | | | | TCAAGCCCCTGTACCT |
| | | | | | | GGTCAAGGGAAGAAA |
| | | | | | | GGCCATCGACATGCCC |
| | | | | | | GACGTGGACACCGGCT |
| | | | | | | TCTACGCTGATTTCGC |
| | | | | | | CGAGGCCTACAGCGCC |
| | | | | | | TACGAGCAAGTGACAG |
| | | | | | | TGTCCCTGTACAACAA |
| | | | | | | GACCAGAAACCACCTG |
| | | | | | | TCCAAGAAGCCCTTCA |
| | | | | | | GCAAGGACAAGATCAA |
| | | | | | | GATCAACTTCGACGCC |
| | | | | | | CCTACACTGCTGAACG |
| | | | | | | GCTGGGACCTGAACAA |
| | | | | | | AGAGAGCGACAACAA |
| | | | | | | GTCCATCATCCTGCGG |
| | | | | | | AAGGACGGCAACTTCT |
| | | | | | | ACCTGGCAATCATGCA |
| | | | | | | CCCCAAGCACACCAAG |
| | | | | | | GTGTTCGACTGCTACT |
| | | | | | | CTGCCTCTGAGGCTGC |
| | | | | | | CGGCAAGTGCTACGAG |
| | | | | | | AAGATGAACTACAAGC |
| | | | | | | TGCTGAGCGGCGCCAA |
| | | | | | | CAAGATGCTGCCTAAG |
| | | | | | | GTGTTCTTTAGCAAGA |
| | | | | | | AGGGCATCGAGACATT |
| | | | | | | CAGCCCTCCACAAGAA |
| | | | | | | ATCCTGGACCTGTACA |
| | | | | | | AGAACAACGAGCATAA |
| | | | | | | GAAGGGCGCCACCTTC |
| | | | | | | AAGCTGGAATCCTGCC |
| | | | | | | ACAAGCTGATCGATTT |
| | | | | | | CTTCAAGCGGAACATC |
| | | | | | | CCCAAGTACAAGGTGC |
| | | | | | | ACCCTACCGACAACTT |
| | | | | | | TGGCTGGGACGTGTTC |
| | | | | | | GGCTTTCACTTCAGCC |
| | | | | | | CTACCAGCAGCTACGG |
| | | | | | | CGACCTGTCTGGCTTC |
| | | | | | | TACAGAGAGGTGGAA |
| | | | | | | GCCCAGGGATACAAGC |
| | | | | | | TGTGGTTCAGCGACGT |
| | | | | | | GTCCGAGGCTTACATC |
| | | | | | | AACAAATGCGTGGAAG |
| | | | | | | AGGGCAAGCTGTTCCT |
| | | | | | | GTTCCAAATCTACAAC |
| | | | | | | AAGGACTTCTCCCCTA |
| | | | | | | ACTCCACCGGCAAGCC |
| | | | | | | CAACCTGCACACCCTG |
| | | | | | | TATTGGAAGGGCCTGT |
| | | | | | | TCGAGCCCGAGAACCT |
| | | | | | | GAAAGACGTGGTGCTG |
| | | | | | | AAGCTGAATGGCGAG |
| | | | | | | GCCGAGATCTTCTACC |
| | | | | | | GGAAGCACAGCATCAA |
| | | | | | | GCACGAGGACAAGAC |
| | | | | | | CATCCACAGAGCTAAG |
| | | | | | | GACCCTATCGCTAACA |
| | | | | | | AGAACGCTGACAACCC |
| | | | | | | CAAGAAACAGAGCGTG |
| | | | | | | TTCGATTACGACATCA |
| | | | | | | TCAAGGATAAGCGGTA |
| | | | | | | TACCCAGGACAAGTTC |
| | | | | | | TTCTTCCACGTGCCAA |
| | | | | | | TCAGCCTGAACTTCAA |
| | | | | | | AAGCCAGGGCGTCGT |
| | | | | | | GCGGTTCAACGATAAG |
| | | | | | | ATCAACGGCCTGCTGG |
| | | | | | | CCGCTCAGGACGATGT |
| | | | | | | GCATGTGATCGGCATC |
| | | | | | | GACAGAGGCGAGAGA |
| | | | | | | CATCTGCTGTACTACA |
| | | | | | | CCGTGGTCAACGGCAA |
| | | | | | | GGGCGAAGTGGTGGA |
| | | | | | | ACAGGGCAGCCTGAAT |
| | | | | | | CAGGTGGCCACAGATC |
| | | | | | | AGGGCTACGTGGTGG |
| | | | | | | ATTACCAGCAGAAGCT |
| | | | | | | GCACGCCAAAGAGAAA |
| | | | | | | GAACGCGACCAGGCC |
| | | | | | | AGAAAGAACTGGTCCA |
| | | | | | | CCATCGAGAACATCAA |
| | | | | | | AGAACTGAAGGCCGG |
| | | | | | | CTACCTGAGCCAGGTG |
| | | | | | | GTGCATAAGCTGGCTC |
| | | | | | | AGCTGATCGTGAAGCA |
| | | | | | | CAACGCCATCGTGTGC |
| | | | | | | CTCGAGGACCTGAATT |
| | | | | | | TCGGCTTCAAGAGGGG |
| | | | | | | CAGATTCAAGGTCGAG |
| | | | | | | AAACAGGTGTACCAGA |
| | | | | | | AGTTCGAGAAGGCTCT |
| | | | | | | GATCGACAAGCTGAAC |
| | | | | | | TACCTCGTGTTCAAAG |
| | | | | | | AGAGAGGCGCCACAC |
| | | | | | | AGGCTGGCGGATACCT |
| | | | | | | GAATGCTTACCAGCTG |
| | | | | | | GCCGCACCTTTCGAGA |
| | | | | | | GCTTTGAGAAGCTGGG |
| | | | | | | CAAGCAGACCGGCATC |
| | | | | | | CTGTACTACGTGCGGA |
| | | | | | | GCGACTACACCAGCAA |
| | | | | | | GATCGACCCTGCTACC |
| | | | | | | GGCTTCGTGGACTTTC |
| | | | | | | TGAAGCCTAAGTACGA |
| | | | | | | GAGCATGGCCAAGAG |
| | | | | | | CAAAGTGTTCTTCGAG |
| | | | | | | TCCTTCGAGCGCATCC |
| | | | | | | AGTGGAACCAGGCCAA |
| | | | | | | AGGCTACTTCGAGTTC |
| | | | | | | GAGTTTGACTACAAGA |
| | | | | | | AGATGTGCCCCAGCAG |
| | | | | | | AAAGTTCGGCGACTAC |
| | | | | | | AGAACCAGATGGGTCG |
| | | | | | | TGTGCACCTTCGGCGA |
| | | | | | | CACCCGCTACCAGAAC |
| | | | | | | AGAAGAAACAAGAGCA |
| | | | | | | GCGGCCAGTGGGAGA |
| | | | | | | CAGAGACAATCGATGT |
| | | | | | | GACAGCCCAGCTGAAA |
| | | | | | | GCCCTGTTCGCCGCTT |
| | | | | | | ACGGCATCACATACAA |
| | | | | | | TCAAGAGGATAACATC |
| | | | | | | AAGGACGCCATTGCCG |
| | | | | | | CCGTGAAGTACACCAA |
| | | | | | | GTTCTACAAGCAGCTG |
| | | | | | | TACTGGCTGCTGAGAC |
| | | | | | | TGACCCTGAGCCTGAG |
| | | | | | | ACACAGCGTGACAGGC |
| | | | | | | ACCGACGAGGATTTCA |
| | | | | | | TCCTGTCTCCAGTGGC |
| | | | | | | CGACGAGAATGGCGT |
| | | | | | | GTTCTTTGACTCTAGG |
| | | | | | | AAGGCCACCGACAAGC |
| | | | | | | AGCCTAAGGACGCTGA |
| | | | | | | TGCTAACGGCGCCTAC |
| | | | | | | CATATCGCCCTGAAAG |
| | | | | | | GCCTGTGGAATCTCCA |
| | | | | | | GCAGATCAGACAGCAC |
| | | | | | | GACTGGAACGTGGAAA |
| | | | | | | AGCCCAAAAAGCTGAA |
| | | | | | | CCTCGCCATGAAGAAC |
| | | | | | | GAAGAGTGGTTCGGCT |
| | | | | | | TCGCTCAGAAGAAGAA |
| | | | | | | GTTTAGAGCCAGCGGC |
| | | | | | | GGCAAGAGGCCTGCC |
| | | | | | | GCTACAAAAAAAGCCG |
| | | | | | | GCCAGGCCAAGAAAAA |
| | | | | | | GAAGTGACCACACCCC |
| | | | | | | CATTCCCCCACTCCAG |
| | | | | | | ATAGAACTTCAGTTAT |
| | | | | | | ATCTCACGTGTCTGGA |
| | | | | | | GTT |
| MG55 | — | 6031 | MG55 sgRNA | Nucleotide | Unknown | AAATATTTCATTAAGT |
| active | | | | | | ACCGAATTTAAAAAAT |
| effector | | | | | | AGGATTGCAGAAAGTG |
| sgRNA | | | | | | CAATTAGGCTGGTTGT |
| | | | | | | GCAGCCTTAATCTGAG |
| | | | | | | GGATTAATCCACTCGG |
| | | | | | | AAAGTACCTTTATTGA |
| | | | | | | AAAATGAAAGGTATTC |
| | | | | | | ACAAC |
| MG55 | A6032 | — | MG55 PAM (5′) | Nucleotide | Unknown | YTn |
| active | | | | | | |
| effector | | | | | | |
| PAM | | | | | | |
| (5′) | | | | | | |
| MG91 | — | 6033 | MG91-15 sgRNA1 | Nucleotide | Unknown | UAGAGAAAAUUAUAUA |
| active | | | | | | UUAGGUUUUGUUAAGC |
| effector | | | | | | CUAACAAUCGUUAAGU |
| sgRNA | | | | | | GUUCUUUGGAAUAUUG |
| | | | | | | AUUGUAAAUCUAUUUU |
| | | | | | | GGGAAAUGAAAAGGC |
| | | | | | | AAAAAUUACAGUUAUC |
| | | | | | | AAUUAAUUGAGAAGAG |
| | | | | | | UAUAGAGUCAGUUUUA |
| | | | | | | UAGUACCAAAAUAUAC |
| | | | | | | CUUAAUUCUUUAAGAA |
| | | | | | | AUUAAAUUUAAGGUAA |
| | | | | | | UAACAAG |
| MG91 | — | 6034 | MG91-32 sgRNA1 | Nucleotide | Unknown | UGCACAUCGGGUAUG |
| active | | | | | | UGUGGGGUCGAGUAA |
| effector | | | | | | GGCCGACGUUGUCCG |
| sgRNA | | | | | | CUACAACUUAGCCGUC |
| | | | | | | GGGCGGUUGGGCAAC |
| | | | | | | CGAUCGGAAGCGGAA |
| | | | | | | CCUGGAAUAAGGCCA |
| | | | | | | GGCAGCGGCACUGCC |
| | | | | | | GUCAAGCGGGAAUGA |
| | | | | | | AGUCCAGUAGUACGUA |
| | | | | | | ACCAGUAACUUACAAA |
| | | | | | | GAAAUUUGUAAGGUAC |
| | | | | | | UUACAGG |
| MG91 | — | 6035 | MG91-87 sgRNA1 | Nucleotide | Unknown | GAAUUGAUGCUUCGU |
| active | | | | | | GCAUCUAAAAAUAUAC |
| effector | | | | | | UGGGAAUUGUAUUCCC |
| sgRNA | | | | | | GAAGUGAGCGUUAAU |
| | | | | | | UGGCACAGUGGUGUC |
| | | | | | | AUUGCUCAUCAAAAGA |
| | | | | | | AGAAUUGGAAAAACAG |
| | | | | | | CGAACUUCAUCUCGUU |
| | | | | | | UCUUCACCUUUGGUGC |
| | | | | | | AAGCAAAGGUAAUGAA |
| | | | | | | GUGAAGGCUUUUUAG |
| | | | | | | UACAAUCUCAUACCCC |
| | | | | | | UAACUGUGUGAUACUA |
| | | | | | | UGCCCUCGAAAGAGG |
| | | | | | | GGUAAAUACAGG |
| MG91 | — | 6036 | MG91-87 sgRNA2 | Nucleotide | Unknown | UGGGAAUUGUAUUCCC |
| active | | | | | | GAAGUGAGCGUUAAU |
| effector | | | | | | UGGCACAGUGGUGUC |
| sgRNA | | | | | | AUUGCUCAUCAAAAGA |
| | | | | | | AGAAUUGGAAAAACAG |
| | | | | | | CGAACUUCAUCUCGUU |
| | | | | | | UCUUCACCUUUGGUGC |
| | | | | | | AAGCAAAGGUAAUGAA |
| | | | | | | GUGAAGGCUUUUUAG |
| | | | | | | UACAAUCUCAUACCCC |
| | | | | | | UAACUGUGUGAUACUA |
| | | | | | | UGCCCUCGAAAGAGG |
| | | | | | | GGUAAAUACAGG |
| MG91 | A6037 | — | MG91-15 PAM | Nucleotide | Unknown | TtTYn |
| active | | | (5′) | | | |
| effector | | | | | | |
| PAM | | | | | | |
| (5′) | | | | | | |
| MG91 | A6038 | — | MG91-32 PAM | Nucleotide | Unknown | GnYYn |
| active | | | (5′) | | | |
| effector | | | | | | |
| PAM | | | | | | |
| (5′) | | | | | | |
| MG91 | A6039 | — | MG91-87 PAM | Nucleotide | Unknown | wCCC |
| active | | | (5′) | | | |
| effector | | | | | | |
| PAM | | | | | | |
| (5′) | | | | | | |
| MG91 | — | 6040 | MG91-2 IG2 | Nucleotide | Unknown | AAATAACATACAGAGG |
| intergenic | | | | | | TTTTGTTAAGCCTCAC |
| region | | | | | | AATCTTAATAAATAAG |
| potentially | | | | | | TGTTCTTTGAAAATAT |
| encoding | | | | | | TTAGTTGATTGTAAAT |
| tracrRNA | | | | | | CTATTTTGGGAAATAA |
| | | | | | | AAAAACAAAAATTACA |
| | | | | | | GTTATTAGTTAACTAA |
| | | | | | | GAAGAGTATAGAGTTA |
| | | | | | | GTTTTAAAGTACCAAA |
| | | | | | | ATATACCCTAAATTAT |
| | | | | | | TGTTTTTCAAAACTTT |
| | | | | | | ATAGAATATAT |
| MG91 | — | 6041 | MG91-10 IG1 | Nucleotide | Unknown | TATGGCGTGTAATCAC |
| intergenic | | | | | | CTGGGAATGAAATAAA |
| region | | | | | | AAGGCCATGATTTGCA |
| potentially | | | | | | TACTCGGAGACCTGCT |
| encoding | | | | | | CTATACTCCCATTCCC |
| tracrRNA | | | | | | GAAGGAACTGACTGTT |
| | | | | | | ATTTTTGCATTCTACC |
| | | | | | | ATTCTGCATAATCGTT |
| | | | | | | TGTCGCACCAGCCGCC |
| | | | | | | CACTGGCATTAGCTTA |
| | | | | | | ACGTACGCAAGGCCTG |
| | | | | | | ACAACACCTTTATGTC |
| | | | | | | GCAAATATACGAATTA |
| | | | | | | TTATTGAAAGTGCGTA |
| | | | | | | CAGAATTCAGAATGAA |
| | | | | | | AGTGCTATACTTTAAC |
| | | | | | | AGTATTTATCCAAAAC |
| | | | | | | GTTTAATATCTTACAC |
| | | | | | | ATCAATTCATGTTTGT |
| | | | | | | AAATCACATTTCATTT |
| | | | | | | ATTAATCAGACCTGTT |
| | | | | | | TAACGTAGTAACAAGA |
| | | | | | | ACGAAATTACTGACTT |
| | | | | | | TCAATCTGCCTTCTAT |
| | | | | | | ATGATAGCAGAAAAAT |
| | | | | | | TCTCTAGAGAATTTCT |
| | | | | | | TCCTGTATAACTAAGT |
| | | | | | | AGCAAATGCTATATCA |
| | | | | | | CTTAGTAAGGACAAAA |
| | | | | | | TTCTCTAGAGAATTTC |
| | | | | | | TTTACTACTCTACAGC |
| | | | | | | TAAGAAATGAGGAACA |
| | | | | | | ACAGACTGGGTTTTAC |
| | | | | | | TTTATAACCGATAGAG |
| | | | | | | ATGGAACGGGTGAGT |
| | | | | | | GTCGGAAGATGTTTAA |
| | | | | | | ATCAAGATTATCGAGA |
| | | | | | | AATAATTGGCATTCTC |
| | | | | | | AGGAGTATTTACTAAA |
| | | | | | | TTTGCACGAAAATACG |
| | | | | | | AAAAGCATT |
| MG91 | — | 6042 | MG91-52 IG1 | Nucleotide | Unknown | GATATAAAGAGGCATT |
| intergenic | | | | | | GTCAGGCCTCGCGGAC |
| region | | | | | | GTTAAGCTAATGCCGG |
| potentially | | | | | | TGGGCGGCTGGTCCG |
| encoding | | | | | | ACGAATTGGTGAGTGG |
| tracrRNA | | | | | | AAGAGGAATGCGAAAA |
| | | | | | | TGACAGTCACCCTCGT |
| | | | | | | AAGAGGGCTGAGTTAT |
| | | | | | | AGAGTATATCCGCGAG |
| | | | | | | TACGCAAGCCGTGACT |
| | | | | | | ACATACTGGCATTGAG |
| | | | | | | CCAGTTAGACATTATG |
| | | | | | | A |
| MG91 | — | 6043 | MG91-61 IG2 | Nucleotide | Unknown | TAATTAAGGTTGTGAT |
| intergenic | | | | | | CTTTATGATTGAGATT |
| region | | | | | | GCAACCTTTTTTTAAA |
| potentially | | | | | | AAAATATGCAACAAAA |
| encoding | | | | | | CGCCCCAAAACGCATC |
| tracrRNA | | | | | | ATTTAGGGGTGTTAGG |
| | | | | | | GTCTTGAATTTGTTAA |
| | | | | | | ATCAAGACTTTTATTT |
| | | | | | | TGAATATTTTGGCTCC |
| | | | | | | ACAAGGGAATTTTCGC |
| | | | | | | AATTTTGCACTGCACA |
| | | | | | | CCAGCAATGGCGTGTG |
| | | | | | | GGGGCTTGTAGGCCC |
| | | | | | | GACGCATCCTCGCTTT |
| | | | | | | AAAACTCAGCCATCGG |
| | | | | | | GCGGTTATGGGGAGCT |
| | | | | | | GAACGGAAACGGAAAT |
| | | | | | | GGGAATAAGACAATGC |
| | | | | | | AGCGCAAGCAGAGCG |
| | | | | | | TGGATGAAGTCTCAGA |
| | | | | | | GTACGCGACCATTGAC |
| | | | | | | TTGCAAAAAGTGATCT |
| | | | | | | TTGACCAACTGAAGGG |
| | | | | | | TGTAATACACACCGCT |
| | | | | | | GTAAGGCAAATACAGG |
| | | | | | | CTGCAGACTGGCCATC |
| | | | | | | CCAGAATACAATAA |
| MG91 | — | 6044 | MG91-69 IG2 | Nucleotide | Unknown | TAAAAAAAGATATTAG |
| intergenic | | | | | | GTTTTGTTAAGCCTAA |
| region | | | | | | CAATCGTTAAGTGTTC |
| potentially | | | | | | TTTGGAATATTGATTG |
| | | | | | | TAAATCTATTTTGGGA |
| encoding | | | | | | AATAAAAAAGCAAAAA |
| tracrRN | | | | | | TTACAGTTATCAGTTT |
| A | | | | | | ACTGAGAAGAGTATAG |
| | | | | | | AGTTAGTTTTAAAGTA |
| | | | | | | CCAAAATATACCCTAA |
| | | | | | | ATTATTGTTTTTCAAA |
| | | | | | | ACTTTATAGAATATAT |
| MG91 | — | 6045 | MG91-94 IG1 | Nucleotide | Unknown | CCGTAGTGCATAATCA |
| intergeni | | | | | | CCTGAGAATGAATGAA |
| c region | | | | | | AAAGGCCATGATATGC |
| potential | | | | | | ATACTTGGGGACTTGC |
| ly | | | | | | TCTATACTCCCATTCC |
| encoding | | | | | | CGAAGGAATTGACTGT |
| tracrRN | | | | | | TATTTTTGCATTCCAC |
| A | | | | | | CATTCTGCAAATCGTT |
| MG91 | — | 6046 | MG91-101 IG2 | Nucleotide | Unknown | TGTCGCACCAGCCGCC |
| intergenic | | | | | | CACTGGCATTAAGCTT |
| region | | | | | | AACGTGCGCAAGGCCT |
| potentially | | | | | | GACAACACCTTTATGG |
| encoding | | | | | | GTGCAAAGATACTAAA |
| tracrRN | | | | | | AGTTTTCAAAAGAAGA |
| A | | | | | | TAGGGAAAAGAGAAAA |
| | | | | | | AACTTCAAATCCATTT |
| | | | | | | TGGCGTTGCAGCGTTG |
| | | | | | | CAGTGTTGCAGTTCCA |
| | | | | | | AAATAGATTCTGCGAT |
| | | | | | | AGTCAAAAAATAACTC |
| | | | | | | TATATTTAATAAATAT |
| | | | | | | AGAAGTATT |
| | | | | | | TTCAGGAATTCAAAGA |
| | | | | | | TCACCTTTTTTGCAAG |
| | | | | | | TTACTGGTCACGTACT |
| | | | | | | ACTGGACTTCATTCCT |
| | | | | | | GCTTGACGGCAGTGCC |
| | | | | | | GCTGCATGGCCTTATT |
| | | | | | | CCAGGTTCCGCTTCCG |
| | | | | | | ATTGGCTGCCCAACCG |
| | | | | | | CCCGACGGCTAAGTTG |
| | | | | | | TAGCGGACAGCGTTGG |
| | | | | | | CCCTACAAGACCCCAC |
| | | | | | | ACATTCCCGATGTGCA |
| | | | | | | TTGCAAAGTTCGGGAA |
| | | | | | | TGATATCGAGAAAGGC |
| | | | | | | AAAATCTGGCAAAACT |
| | | | | | | TTGTCTTGATTTAACA |
| | | | | | | CATTTATGATTTTTCC |
| | | | | | | GGCGAAAAAATGGTCG |
| | | | | | | CGAAAAATGTCATCCA |
| | | | | | | GGATATATGAAGACTC |
| | | | | | | CAGCGGAAAAAGGTTT |
| | | | | | | AACGCCGTTGTAAACT |
| | | | | | | TAGTTTTCTTTGGAGT |
| | | | | | | AAACAGGGTAACCTCT |
| | | | | | | TGTGGAAATTCGGACA |
| | | | | | | GGATGAGTGTTGATTG |
| | | | | | | CTTTATCCGGATGTTA |
| | | | | | | TTTTGCTATAGTATTT |
| MG91 | — | 6047 | MG91-107 IG2 | Nucleotide | Unknown | GTATAAACACTATTGG |
| intergenic | | | | | | ACTGTGACAAATAAAG |
| region | | | | | | TTAGGATAGGATGTTC |
| potentially | | | | | | TTACTTTAAATAGTAT |
| | | | | | | TTGCTATCGTTCAAAA |
| encoding | | | | | | AGGCAAGATAGCCATT |
| tracrRNA | | | | | | TTTACATGATAACATT |
| | | | | | | CTGCTTTATTTCATCA |
| | | | | | | CATCTTTGTTTTAGCA |
| | | | | | | ATGGCAATTGTTTGCC |
| | | | | | | ATTAACGCTAAGATTG |
| | | | | | | GATTACAAATCCATAT |
| | | | | | | TTCT |
| MG91 | — | 6048 | MG91-155 IG1 | Nucleotide | Unknown | CCTATGGTTGGTAATC |
| intergenic | | | | | | ACCTAGGAATGAATAA |
| region | | | | | | AAAGACTATGATAAGC |
| potentially | | | | | | ATACTCGGGGACTTGC |
| encoding | | | | | | TCTATACTCCCGTTCT |
| tracrRNA | | | | | | CGAAGGAACTGACTGT |
| | | | | | | TATTTTTGCATTCCAC |
| | | | | | | CATTCTGCAAATCGTT |
| | | | | | | TGTCGGACCAGCCGCC |
| | | | | | | CACTGGCATTAGCTTG |
| | | | | | | ACGTCCGCAAGGCCTA |
| | | | | | | ACAACGCCTTTCTTTT |
| | | | | | | GCAAATATACGGATTT |
| | | | | | | ATATTTCTTTCACAAA |
| | | | | | | ATTAATGAGGAACTTT |
| | | | | | | TTCATATTCCTTTTGTC |
| | | | | | | CATCTGTTACTGCCAC |
| | | | | | | ATGATTTTTCGTAGGA |
| | | | | | | AAGACCTTGGAGGCG |
| | | | | | | GATGGATTGAAA |
| MG91 | — | 6049 | MG91-201 IG2 | Nucleotide | Unknown | ATATATTCTATAAAGT |
| intergenic | | | | | | TTTGAAAAACAATAAT |
| region | | | | | | TTAGGGTATATTTTGG |
| potentially | | | | | | TACTTTAAAACTAACT |
| encoding | | | | | | CTATACTCTTCTTAGT |
| tracrRNA | | | | | | TAACTAATAACTGTAA |
| | | | | | | TTTTTGTTTTTTTATTT |
| | | | | | | CCCAAAATAGATTTAC |
| | | | | | | AATCAACTAAATATTT |
| | | | | | | CAAAGAACACTTAATT |
| | | | | | | ATTAAGATTGTGAGGC |
| | | | | | | TTAACAAAACCTCTGT |
| | | | | | | ATGTTATTTTTT |
| MG91 | — | 6050 | MG91-2 Repeat | Nucleotide | Unknown | GGTAGATATACCTATT |
| CRISPR | | | | | | AAAGTTAGGGTACTAA |
| repeat | | | | | | CAAG |
| MG91 | — | 6051 | MG91-10 Repeat | Nucleotide | Unknown | GGTGTTAATCACCCGG |
| CRISPR | | | | | | AAATGTAGGCTATTGA |
| repeat | | | | | | CAGG |
| MG91 | — | 6052 | MG91-52 Repeat | Nucleotide | Unknown | GGTGTAAGACACCTGG |
| CRISPR | | | | | | AAATGTAAGGCATTGA |
| repeat | | | | | | CAGG |
| MG91 | — | 6053 | MG91-61 Repeat | Nucleotide | Unknown | CCTGTATTTGGCTTAC |
| CRISPR | | | | | | AAATTAGGATGATTAA |
| repeat | | | | | | CACC |
| MG91 | — | 6054 | MG91-69 Repeat | Nucleotide | Unknown | GGTGTATATACCTAAT |
| CRISPR | | | | | | AAAGTTAGGGTACTAA |
| repeat | | | | | | CAAG |
| MG91 | — | 6055 | MG91-94 Repeat | Nucleotide | Unknown | GGTGTTAATCACCCGA |
| CRISPR | | | | | | AAATGTAGGTCATTGA |
| repeat | | | | | | CAGGA |
| MG91 | — | 6056 | MG91-101 Repeat | Nucleotide | Unknown | GGGTGTTACACACCCG |
| CRISPR | | | | | | AATTTGCAAGGTACTT |
| repeat | | | | | | ACAGG |
| MG91 | — | 6057 | MG91-107 Repeat | Nucleotide | Unknown | CCTGTATGTGACTTTG |
| CRISPR | | | | | | AAATATAGGGTAGTTA |
| repeat | | | | | | CAAG |
| MG91 | — | 6058 | MG91-155 Repeat | Nucleotide | Unknown | GGTGTTAATCACCCAG |
| CRISPR | | | | | | AAATGTAGACTATTAA |
| repeat | | | | | | CAGG |
| MG91 | — | 6059 | MG91-201 Repeat | Nucleotide | Unknown | GCTGTATATGCCTAAT |
| CRISPR | | | | | | AAAGTTAGGGTACTAA |
| repeat | | | | | | CAAGAA |

mN: 2′-O methyl modified base N; fN: 2′-Fluoro modified base N; *: phosphorothioate linkage; N: standard ribonucleotide base

TABLE 47
Listing of PAM sequences
referred to herein

| Sequence Number | Sequence |
|---|---|
| A3863 | TA |
| A3864 | TA |
| A3865 | TR |
| A3866 | TTR |
| A3867 | TTA |
| A3872 | YYYN |
| A3873 | TTTN |
| A3874 | TTTR |
| A3876 | YTTM |
| A3879 | YN |
| A3880 | YYNW |
| A3881 | YYN |
| A3882 | YTTV |
| A3883 | TTN |
| A3884 | TTN |
| A3885 | YYN |
| A3886 | TTR |
| A3887 | TTR |
| A3888 | TTTN |
| A3889 | TTN |

[0646] While preferred embodiments of the present invention have been shown and described herein, it will be obvious to those skilled in the art that such embodiments are provided by way of example only. It is not intended that the invention be limited by the specific examples provided within the specification. While the invention has been described with reference to the aforementioned specification, the descriptions and illustrations of the embodiments herein are not meant to be construed in a limiting sense. Numerous variations, changes, and substitutions will now occur to those skilled in the art without departing from the invention. Furthermore, it shall be understood that all aspects of the invention are not limited to the specific depictions, configurations or relative proportions set forth herein which depend upon a variety of conditions and variables. It should be understood that various alternatives to the embodiments of the invention described herein may be employed in practicing the invention. It is therefore contemplated that the invention shall also cover any such alternatives, modifications, variations or equivalents. It is intended that the following claims define the scope of the invention and that methods and structures within the scope of these claims and their equivalents be covered thereby.

### Embodiments

[0647] The following embodiments are not intended to be limiting in any way.
[0648] 1. An engineered nuclease system comprising:
   [0649] (a) an endonuclease comprising a RuvC domain, wherein said endonuclease is derived from an uncultivated microorganism, and wherein said endonuclease is a Cas12a endonuclease; and
   [0650] (b) an engineered guide RNA, wherein said engineered guide RNA is configured to form a complex with said endonuclease and said engineered guide RNA comprises a spacer sequence configured to hybridize to a target nucleic acid sequence.
[0651] 2. An engineered nuclease system comprising:
   [0652] (a) an endonuclease having at least 75% sequence identity to any one of SEQ ID NOs: 1-3470 or a variant thereof; and
   [0653] (b) an engineered guide RNA, wherein said engineered guide RNA is configured to form a complex with said endonuclease and said engineered guide RNA comprises a spacer sequence configured to hybridize to a target nucleic acid sequence.
[0654] 3. An engineered nuclease system comprising:
   [0655] (a) an endonuclease configured to bind to a protospacer adjacent motif (PAM) sequence comprising any one of SEQ ID NOs: 3890-3913 or any one of Sequence Numbers: A3863-A3889, wherein said endonuclease is a class 2, type V Cas endonuclease; and
   [0656] (b) an engineered guide RNA, wherein said engineered guide RNA is configured to form a complex with said endonuclease and said engineered guide RNA comprises a spacer sequence configured to hybridize to a target nucleic acid sequence.
[0657] 4. The engineered nuclease system of any one of embodiments 1-3, wherein said endonuclease further comprises a zinc finger-like domain.
[0658] 5. The engineered nuclease system of any one of embodiments 1-4, wherein said guide RNA comprises a sequence with at least 80% sequence identity to the non-degenerate nucleotides of any one of SEQ ID NOs: 3471, 3551-3559, 3608-3609, 3612, 3636-3637, 3640-3641, 3644-3645, 3648-3649, 3652-3653, 3656-3657, 3660-3661, 3664-3667, 3671-3672, 3678, 3695-3696, 3729-3730, 3734-3735, and 3851-3857.
[0659] 6. An engineered nuclease system comprising:
   [0660] (a) an engineered guide RNA comprising a sequence with at least 80% sequence identity to the non-degenerate nucleotides of any one of SEQ ID NOs: 3471, 3551-3559, 3608-3609, 3612, 3636-3637, 3640-3641, 3644-3645, 3648-3649, 3652-3653, 3656-3657, 3660-3661, 3664-3667, 3671-3672, 3678, 3695-3696, 3729-3730, 3734-3735, and 3851-3857, and
   [0661] (b) a class 2, type V Cas endonuclease configured to bind to said engineered guide RNA.
[0662] 7. The engineered nuclease system of any of embodiments 1-6, wherein said endonuclease is configured to bind to a protospacer adjacent motif (PAM) sequence comprising any one of Sequence Numbers: A3863-A3889, or any one of SEQ ID NOs: 3890-3913.
[0663] 8. The engineered nuclease system of any one of embodiments 1-7, wherein said guide RNA comprises a sequence complementary to a eukaryotic, fungal, plant, mammalian, or human genomic polynucleotide sequence.
[0664] 9. The engineered nuclease system of any one of embodiments 1-8, wherein said guide RNA is 30-250 nucleotides in length.
[0665] 10. The engineered nuclease system of any one of embodiments 1-9, wherein said endonuclease comprises one or more nuclear localization sequences (NLSs) proximal to an N- or C-terminus of said endonuclease.
[0666] 11. The engineered nuclease system of any one of embodiments 1-10, wherein said NLS comprises a sequence at least 80% identical to a sequence from the group consisting of SEQ ID NO: 3938-3953.
[0667] 12. The engineered nuclease system of any one of embodiments 1-10, wherein said endonuclease comprises at least one of the following mutations: S168R, E172R, N577R, or Y170R when a sequence of said endonuclease is optimally aligned to SEQ ID NO: 215.
[0668] 13. The engineered nuclease system of any one of embodiments 1-10, wherein said endonuclease comprises the mutations S168R and E172R when a sequence of said endonuclease is optimally aligned to SEQ ID NO: 215.
[0669] 14. The engineered nuclease system of any one of embodiments 1-10, wherein said endonuclease comprises the mutations N577R or Y170R when a sequence of said endonuclease is optimally aligned to SEQ ID NO: 215.
[0670] 15. The engineered nuclease system of any one of embodiments 1-10, wherein said endonuclease comprises the mutation S168R when a sequence of said endonuclease is optimally aligned to SEQ ID NO: 215.
[0671] 16. The engineered nuclease system of embodiment 15, wherein said endonuclease does not comprise a mutation of E172, N577, or Y170.
[0672] 17. The engineered nuclease system of any one of embodiments 1-16, further comprising a single- or double-stranded DNA repair template comprising from 5′ to 3′: a first homology arm comprising a sequence of at least 20 nucleotides 5′ to said target deoxyribonucleic acid sequence, a synthetic DNA sequence of at least 10 nucleotides, and a second homology arm comprising a sequence of at least 20 nucleotides 3′ to said target sequence.
[0673] 18. The engineered nuclease system of embodiment 17, wherein said first or second homology arm comprises a sequence of at least 40, 80, 120, 150, 200, 300, 500, or 1,000 nucleotides.
[0674] 19. The engineered nuclease system of any one of embodiments 12-18, wherein said first and second homology arms are homologous to a genomic sequence of a prokaryote, bacteria, fungus, or eukaryote.
[0675] 20. The engineered nuclease system of embodiments 12-19, wherein said single- or double-stranded DNA repair template comprises a transgene donor.
[0676] 21. The engineered nuclease system of any one of embodiments 1-20, further comprising a DNA repair template comprising a double-stranded DNA segment flanked by one or two single-stranded DNA segments.
[0677] 22. The engineered nuclease system of embodiment 21, wherein single-stranded DNA segments are conjugated to the 5′ ends of said double-stranded DNA segment.
[0678] 23. The engineered nuclease system of embodiment 21, wherein said single stranded DNA segments are conjugated to the 3′ ends of said double-stranded DNA segment.
[0679] 24. The engineered nuclease system of any one of embodiments 21-23, wherein said single-stranded DNA segments have a length from 4 to 10 nucleotide bases.
[0680] 25. The engineered nuclease system of any one of embodiments 21-24, wherein said single-stranded DNA segments have a nucleotide sequence complementary to a sequence within said spacer sequence.
[0681] 26. The engineered nuclease system of any one of embodiments 21-25, wherein said double-stranded DNA sequence comprises a barcode, an open reading frame, an enhancer, a promoter, a protein-coding sequence, a miRNA coding sequence, an RNA coding sequence, or a transgene.
[0682] 27. The engineered nuclease system of any one of embodiments 21-25, wherein said double-stranded DNA sequence is flanked by a nuclease cut site.
[0683] 28. The engineered nuclease system of embodiment 27, wherein said nuclease cut site comprises a spacer and a PAM sequence.
[0684] 29. The engineered nuclease system of any one of embodiments 1-28, wherein said system further comprises a source of Mg²⁺.
[0685] 30. The engineered nuclease system of any one of embodiments 1-29, wherein said guide RNA comprises a hairpin comprising at least 8, at least 10, or at least 12 base-paired ribonucleotides.
[0686] 31. The engineered nuclease system of embodiment 30, wherein said hairpin comprises 10 base-paired ribonucleotides.
[0687] 32. The engineered nuclease system of any one of embodiments 1-31, wherein:
   [0688] a) said endonuclease comprises a sequence at least 75%, 80%, or 90% identical to any one of SEQ ID NOs: 141, 215, 229, 261, or 1711-1721 or a variant thereof; and
   [0689] b) said guide RNA structure comprises a sequence at least 80%, or 90% identical to the non-degenerate nucleotides of any one of SEQ ID NOs: 3608-3609, 3853, or 3851-3857.
[0690] 33. The engineered nuclease system of any one of embodiments 1-32, wherein said endonuclease is configured to bind to a PAM comprising any one of Sequence Numbers: A3863-A3889, or any one of SEQ ID NOs: 3890-3913.
[0691] 34. The engineered nuclease system of any one of embodiments 1-32, wherein said endonuclease is configured to bind to a PAM comprising a sequence of YYn.
[0692] 35. The engineered nuclease system of any one of embodiments 5-34, wherein said sequence identity is determined by a BLASTP, CLUSTALW, MUSCLE, MAFFT algorithm, or a CLUSTALW algorithm with the Smith-Waterman homology search algorithm parameters.
[0693] 36. The engineered nuclease system of embodiment 35, wherein said sequence identity is determined by said BLASTP homology search algorithm using parameters of a wordlength (W) of 3, an expectation (E) of 10, and a BLOSUM62 scoring matrix setting gap costs at existence of 11, extension of 1, and using a conditional compositional score matrix adjustment.
[0694] 37. An engineered guide RNA comprising:
   [0695] a) a DNA-targeting segment comprising a nucleotide sequence that is complementary to a target sequence in a target DNA molecule; and
   [0696] b) a protein-binding segment comprising two complementary stretches of nucleotides that hybridize to form a double-stranded RNA (dsRNA) duplex,
   [0697] wherein said two complementary stretches of nucleotides are covalently linked to one another with intervening nucleotides, and
   [0698] wherein said engineered guide ribonucleic acid polynucleotide is capable of forming a complex with an endonuclease having at least 75% sequence identity to any one of SEQ ID NOs: 1-3470, and targeting said complex to said target sequence of said target DNA molecule.
[0699] 38. The engineered guide ribonucleic acid polynucleotide of embodiment 37, wherein said DNA-targeting segment is positioned 3′ of both of said two complementary stretches of nucleotides.
[0700] 39. The engineered guide ribonucleic acid polynucleotide of embodiment 37-38, wherein said protein binding segment comprises a sequence having at least 70%, at least 80%, or at least 90% identity to the non-degenerate nucleotides of SEQ ID NO: 3608-3609.
[0701] 40. The engineered guide ribonucleic acid polynucleotide of any one of embodiments 37-39, wherein said double-stranded RNA (dsRNA) duplex comprises at least 5, at least 8, at least 10, or at least 12 ribonucleotides.
[0702] 41. A deoxyribonucleic acid polynucleotide encoding the engineered guide ribonucleic acid polynucleotide of any one of embodiments 1-40.
[0703] 42. A nucleic acid comprising an engineered nucleic acid sequence optimized for expression in an organism, wherein said nucleic acid encodes a class 2, type V Cas endonuclease, and wherein said endonuclease is derived from an uncultivated microorganism, wherein the organism is not said uncultivated organism.
[0704] 43. The nucleic acid of embodiment 42, wherein said endonuclease comprises a variant having at least 70% or at least 80% sequence identity to any one of SEQ ID NOs: 1-3470.
[0705] 44. The nucleic acid of embodiment 42 or 43, wherein said endonuclease comprises a sequence encoding one or more nuclear localization sequences (NLSs) proximal to an N- or C-terminus of said endonuclease.
[0706] 45. The nucleic acid of embodiment 44, wherein said NLS comprises a sequence selected from SEQ ID NOs: 3938-3953.
[0707] 46. The nucleic acid of embodiment 44 or 45, wherein said NLS comprises SEQ ID NO: 3939.
[0708] 47. The nucleic acid of embodiment 46, wherein said NLS is proximal to said N-terminus of said endonuclease.
[0709] 48. The nucleic acid of embodiment 44 or 45, wherein said NLS comprises SEQ ID NO: 3938.
[0710] 49. The nucleic acid of embodiment 48, wherein said NLS is proximal to said C-terminus of said endonuclease.
[0711] 50. The nucleic acid of any one of embodiments 42-49, wherein said organism is prokaryotic, bacterial, eukaryotic, fungal, plant, mammalian, rodent, or human.
[0712] 51. An engineered vector comprising a nucleic acid sequence encoding a class 2, type V Cas endonuclease, wherein said endonuclease is derived from an uncultivated microorganism.
[0713] 52. An engineered vector comprising the nucleic acid of any of embodiments 42-46.
[0714] 53. An engineered vector comprising the deoxyribonucleic acid polynucleotide of embodiment 41.
[0715] 54. The engineered vector of any of embodiments 51-53, wherein the vector is a plasmid, a minicircle, a CELiD, an adeno-associated virus (AAV) derived virion, a lentivirus, or an adenovirus.
[0716] 55. A cell comprising the vector of any of embodiments 51-54.
[0717] 56. A method of manufacturing an endonuclease, comprising cultivating said cell of embodiment 55.
[0718] 57. A method for binding, cleaving, marking, or modifying a double-stranded deoxyribonucleic acid polynucleotide, comprising:
   [0719] (a) contacting said double-stranded deoxyribonucleic acid polynucleotide with a class 2, type V Cas endonuclease in complex with an engineered guide RNA configured to bind to said endonuclease and said double-stranded deoxyribonucleic acid polynucleotide;
   [0720] wherein said double-stranded deoxyribonucleic acid polynucleotide comprises a protospacer adjacent motif (PAM); and
   [0721] wherein said PAM comprises a sequence comprising any one of Sequence Numbers: A3863-A3889, or any one of SEQ ID NOs: 3890-3913.
[0722] 58. The method of embodiment 57, wherein said double-stranded deoxyribonucleic acid polynucleotide comprises a first strand comprising a sequence complementary to a sequence of said engineered guide RNA and a second strand comprising said PAM.
[0723] 59. The method of embodiment 58, wherein said PAM is directly adjacent to the 5′ end of said sequence complementary to said sequence of said engineered guide RNA.
[0724] 60. The method of any one of embodiments 57-59, wherein said PAM comprises a sequence of YYn.
[0725] 61. The method of any one of embodiments 57-60, wherein said class 2, type V Cas endonuclease is derived from an uncultivated microorganism.
[0726] 62. The method of any one of embodiments 57-61, wherein said double-stranded deoxyribonucleic acid polynucleotide is a eukaryotic, plant, fungal, mammalian, rodent, or human double-stranded deoxyribonucleic acid polynucleotide.
[0727] 63. A method of modifying a target nucleic acid locus, said method comprising delivering to said target nucleic acid locus said engineered nuclease system of any one of embodiments 1-36, wherein said endonuclease is configured to form a complex with said engineered guide ribonucleic acid structure, and wherein said complex is configured such that upon binding of said complex to said target nucleic acid locus, said complex modifies said target nucleic acid locus.
[0728] 64. The method of embodiment 63, wherein modifying said target nucleic acid locus comprises binding, nicking, cleaving, or marking said target nucleic acid locus.
[0729] 65. The method of embodiment 63 or 64, wherein said target nucleic acid locus comprises deoxyribonucleic acid (DNA) or ribonucleic acid (RNA).
[0730] 66. The method of embodiment 63, wherein said target nucleic acid comprises genomic DNA, viral DNA, viral RNA, or bacterial DNA.
[0731] 67. The method of any one of embodiments 63-66, wherein said target nucleic acid locus is in vitro.
[0732] 68. The method of any one of embodiments 63-66, wherein said target nucleic acid locus is within a cell.
[0733] 69. The method of embodiment 68, wherein said cell is a prokaryotic cell, a bacterial cell, a eukaryotic cell, a fungal cell, a plant cell, an animal cell, a mammalian cell, a rodent cell, a primate cell, a human cell, or a primary cell.
[0734] 70. The method of embodiment 68 or 69, wherein said cell is a primary cell.
[0735] 71. The method of embodiment 70, wherein said primary cell is a T cell.
[0736] 72. The method of embodiment 70, wherein said primary cell is a hematopoietic stem cell (HSC).
[0737] 73. A method of any one of embodiments 63-72, wherein delivering said engineered nuclease system to said target nucleic acid locus comprises delivering the nucleic acid of any of embodiments 42-46 or the vector of any of embodiments 51-54.
[0738] 74. The method of any one of embodiments 63-73, wherein delivering said engineered nuclease system to said target nucleic acid locus comprises delivering a nucleic acid comprising an open reading frame encoding said endonuclease.
[0739] 75. The method of embodiment 74, wherein said nucleic acid comprises a promoter to which said open reading frame encoding said endonuclease is operably linked.
[0740] 76. The method of any one of embodiments 63-75, wherein delivering said engineered nuclease system to said target nucleic acid locus comprises delivering a capped mRNA containing said open reading frame encoding said endonuclease.
[0741] 77. The method of any one of embodiments 63-76, wherein delivering said engineered nuclease system to said target nucleic acid locus comprises delivering a translated polypeptide.
[0742] 78. The method of any one of embodiments 63-76, wherein delivering said engineered nuclease system to said target nucleic acid locus comprises delivering a deoxyribonucleic acid (DNA) encoding said engineered guide RNA operably linked to a ribonucleic acid (RNA) pol III promoter.
[0743] 79. The method of any one of embodiments 63-78, wherein said endonuclease induces a single-stranded break or a double-stranded break at or proximal to said target locus.
[0744] 80. The method of embodiment 79, wherein said endonuclease induces a staggered single stranded break within or 3′ to said target locus.
[0745] 81. A method of editing a TRAC locus in a cell, comprising contacting to said cell
   [0746] (a) an RNA-guided endonuclease; and
   [0747] (b) an engineered guide RNA, wherein said engineered guide RNA is configured to form a complex with said endonuclease and said engineered guide RNA comprises a spacer sequence configured to hybridize to a region of said TRAC locus,
      [0748] wherein said engineered guide RNA comprises a targeting sequence having at least 85% identity at least 18 consecutive nucleotides of any one of SEQ ID NOs: 4316-4369.
[0749] 82. The method of embodiment 81, wherein said RNA-guided nuclease is a Cas endonuclease.
[0750] 83. The method of embodiment 82, wherein said Cas endonuclease is a class 2, type V Cas endonuclease.
[0751] 84. The method of embodiment 83, wherein said class 2, type V Cas endonuclease comprises a RuvC domain comprising a RuvCI subdomain, a RuvCII subdomain, and a RuvCIII subdomain.
[0752] 85. The method of embodiment 83 or 84, wherein said class 2, type V Cas endonuclease comprises an endonuclease having at least 75% sequence identity to any one of SEQ ID NOs: 1-3470 or a variant thereof.
[0753] 86. The method of any one of embodiments 81-85, wherein said engineered guide RNA further comprises a sequence with at least 80% sequence identity to at least 19 of the non-degenerate nucleotides of any one of SEQ ID NOs: 3471, 3551-3559, 3608-3609, 3612, 3636-3637, 3640-3641, 3644-3645, 3648-3649, 3652-3653, 3656-3657, 3660-3661, 3664-3667, 3671-3672, 3678, 3695-3696, 3729-3730, 3734-3735, and 3851-3857.
[0754] 87. The method of any one of embodiments 81-85, wherein said endonuclease comprises a sequence at least 75%, 80%, or 90% identical to any one of SEQ ID NOs: 141, 215, 229, 261, or 1711-1721 or a variant thereof.
[0755] 88. The method of embodiment 87, wherein said guide RNA structure comprises a sequence at least 80%, or at least 90% identical to at least 19 of the non-degenerate nucleotides of any one of SEQ ID NOs: 3608-3609, 3853, or 3851-3857.
[0756] 89. The method of any one of embodiments 81-88, wherein said method further comprises contacting to said cell or introducing to said cell a donor nucleic acid comprising a cargo sequence flanked on a 3′ or 5′ end by sequence having at least 80% identity to any one of SEQ ID NOs: 4424 or 4425.
[0757] 90. The method of any one of embodiments 81-89, wherein said cell is a peripheral blood mononuclear cell (PBMC).
[0758] 91. The method of any one of embodiments 81-89, wherein said cell is a T-cell or a precursor thereof or a hematopoietic stem cell (HSC).
[0759] 92. The method of any one of embodiments 89-91, wherein said cargo sequence comprises a sequence encoding a T-cell receptor polypeptide, a CAR-T polypeptide, or a fragment or derivative thereof.
[0760] 93. The method of any one of embodiments 81-92, wherein said engineered guide RNA comprises a sequence having at least 80% identity to any one of SEQ ID NOs:4370-4423.
[0761] 94. The method of embodiment 93, wherein said engineered guide RNA is comprises the nucleotide sequence of sgRNAs 1-54 from Table 5A comprising the corresponding chemical modifications listed in Table 5A.
[0762] 95. The method of any one of embodiments 81-93, wherein said engineered guide RNA comprises a targeting sequence having at least 80% sequence identity to any one of SEQ ID NOs: 4334, 4350, or 4324.
[0763] 96. The method of any one of embodiments 81-93, wherein said engineered guide RNA comprises a sequence having at least 80% sequence identity to any one of SEQ ID NOs: 4388, 4404, or 4378.
[0764] 97. The method of embodiment 96, wherein said engineered guide RNA comprises the nucleotide sequence of sgRNAs 9, 35, or 19 from Table 5A.
[0765] 98. An engineered nuclease system comprising:
   [0766] (a) an RNA-guided endonuclease; and
   [0767] (b) an engineered guide RNA, wherein said engineered guide RNA is configured to form a complex with said endonuclease and said engineered guide RNA comprises a spacer sequence configured to hybridize to a target nucleic acid sequence,
   [0768] wherein said engineered guide RNA comprises at least one of the following modifications:
      [0769] (i) a 2′-O methyl or a 2′-fluoro base modification of at least one nucleotide within the first 4 bases of the 5′ end of said engineered guide RNA or the last 4 bases of a 3′ end of said engineered guide RNA;
      [0770] (ii) a thiophosphate (PS) linkage between at least 2 of the first five bases of a 5′ end of said engineered guide RNA, or a thiophosphate linkage between at least two of the last five bases of a 3′ end of said engineered guide RNA;
      [0771] (iii) a thiophosphate linkage within a 3′ stem or a 5′ stem of said engineered guide RNA;
      [0772] (iv) a 2′-O methyl or 2′base modification within a 3′ stem or a 5′ stem of said engineered guide RNA;
      [0773] (v) a 2′-fluoro base modification of at least 7 bases of a spacer region of said engineered guide RNA; and
      [0774] (vi) a thiophosphate linkage within a loop region of said engineered guide RNA.
[0775] 99. The system of embodiment 98, wherein said engineered guide RNA comprises a 2′-O methyl or a 2′-fluoro base modification of at least one nucleotide within the first 5 bases of a 5′ end of said engineered guide RNA or the last 5 bases of a 3′ end of said engineered guide RNA.
[0776] 100. The system of embodiment 98, wherein said engineered guide RNA comprises a 2′-O methyl or a 2′-fluoro base modification at a 5′ end of said engineered guide RNA or a 3′ end of said engineered guide RNA.
[0777] 101. The system of any one of embodiments 98-100, wherein said engineered guide RNA comprises a thiophosphate (PS) linkage between at least 2 of the first five bases of a 5′ end of said engineered guide RNA, or a thiophosphate linkage between at least two of the last five bases of a 3′ end of said engineered guide RNA.
[0778] 102. The system of any one of embodiments 98-101, wherein said engineered guide RNA comprises a thiophosphate linkage within a 3′ stem or a 5′ stem of said engineered guide RNA.
[0779] 103. The system of any one of embodiments 98-102, wherein said engineered guide RNA comprises a 2′-O methyl base modification within a 3′ stem or a 5′ stem of said engineered guide RNA.
[0780] 104. The system of any one of embodiments 98-103, wherein said engineered guide RNA comprises a 2′-fluoro base modification of at least 7 bases of a spacer region of said engineered guide RNA.
[0781] 105. The system of any one of embodiments 98-104, wherein said engineered guide RNA comprises a thiophosphate linkage within a loop region of said engineered guide RNA.
[0782] 106. The system of any one of embodiments 98-105, wherein said engineered guide RNA comprises at least three 2′-O methyl or 2′-fluoro bases at said 5′ end of said engineered guide RNA, two thiophosphate linkages between the first 3 bases of said 5′ end of said engineered guide RNA, at least 4 2′-O methyl or 2′-fluoro bases at said 4′ end of said engineered guide RNA, and three thiophosphate linkages between the last three bases of said 3′ end of said engineered guide RNA.
[0783] 107. The system of embodiment 98, wherein said engineered guide RNA comprises at least two 2′-O-methyl bases and at least two thiophosphate linkages at a 5′ end of said engineered guide RNA and at least one 2′-O-methyl bases and at least one thiophosphate linkage at a 3′ end of said engineered guide RNA.
[0784] 108. The system of embodiment 107, wherein said engineered guide RNA comprises at least one 2′-O-methyl base in both said 3′ stem or said 5′ stem region of said engineered guide RNA.
[0785] 109. The system of embodiment 107 or 108, wherein said engineered guide RNA comprises at least one to at least fourteen 2′-fluoro bases in said spacer region excluding a seed region of said engineered guide RNA.
[0786] 110. The system of embodiment 107, wherein said engineered guide RNA comprises at least one 2′-O-methyl base in said 5′ stem region of said engineered guide RNA and at least one to at least fourteen 2′-fluoro bases in said spacer region excluding a seed region of said guide RNA.
[0787] 111. The system of any one of embodiments 98-110, wherein said guide RNA comprises a spacer sequence targeting a VEGF-A gene.
[0788] 112. The system of embodiment 111, wherein said guide RNA comprises a spacer sequence having at least 80% identity to SEQ ID NO: 3985.
[0789] 113. The system of embodiment 111, wherein said guide RNA comprises the nucleotides of guide RNAs 1-7 from Table 7 comprising the chemical modifications listed in Table 7.
[0790] 114. The method of any one of embodiments 98-113, wherein said RNA-guided nuclease is a Cas endonuclease.
[0791] 115. The method of embodiment 114, wherein said Cas endonuclease is a class 2, type V Cas endonuclease.
[0792] 116. The method of embodiment 115, wherein said class 2, type V Cas endonuclease comprises a RuvC domain comprising a RuvCI subdomain, a RuvCII subdomain, and a RuvCIII subdomain.
[0793] 117. The method of any one of embodiments 115-116, wherein said class 2, type V Cas endonuclease comprises an endonuclease having at least 75% sequence identity to any one of SEQ ID NOs: 1-3470 or a variant thereof.
[0794] 118. The method of any one of embodiments 115-116, wherein said class 2, type V Cas endonuclease comprises an endonuclease having at least 75% sequence identity to any one of SEQ ID NOs: 141, 215, 229, 261, or 1711-1721 or a variant thereof.
[0795] 119. The method of any one of embodiments 114-118, wherein said engineered guide RNA comprises a sequence with at least 80% sequence identity to the non-degenerate nucleotides of any one of SEQ ID NOs: 3471, 3551-3559, 3608-3609, 3612, 3636-3637, 3640-3641, 3644-3645, 3648-3649, 3652-3653, 3656-3657, 3660-3661, 3664-3667, 3671-3672, 3678, 3695-3696, 3729-3730, 3734-3735, and 3851-3857.
[0796] 120. The method of any one of embodiments 111-118, wherein said engineered guide RNA comprises a sequence with at least 80% sequence identity to the non-degenerate nucleotides of any one of SEQ ID NOs: 3608-3609, 3853, or 3851-3857.
[0797] 121. A host cell comprising an open reading frame encoding a heterologous endonuclease having at least 75% sequence identity to any one of SEQ ID NOs: 1-3470 or a variant thereof.
[0798] 122. The host cell of embodiment 121, wherein said endonuclease has at least 75% sequence identity to any one of SEQ ID NOs: 141, 215, 229, 261, or 1711-1721, or a variant thereof.
[0799] 123. The host cell of any one of embodiments 121-122 wherein said host cell is an E. coli cell.
[0800] 124. The host cell of embodiment 123, wherein said E. coli cell is a DE3 lysogen or said E. coli cell is a BL21(DE3) strain.
[0801] 125. The host cell of any one of embodiments 109-110, wherein said E. coli cell has an ompT Ion genotype.
[0802] 126. The host cell of any one of embodiments 121-125, wherein said open reading frame is operably linked to a T7 promoter sequence, a T7-lac promoter sequence, a lac promoter sequence, a tac promoter sequence, a trc promoter sequence, a ParaBAD promoter sequence, a PrhaBAD promoter sequence, a T5 promoter sequence, a cspA promoter sequence, an αrαP_{BAD} promoter, a strong leftward promoter from phage lambda (μL promoter), or any combination thereof.
[0803] 127. The host cell of any one of embodiments 121-126, wherein said open reading frame comprises a sequence encoding an affinity tag linked in-frame to a sequence encoding said endonuclease.
[0804] 128. The method of embodiment 127, wherein said affinity tag is an immobilized metal affinity chromatography (IMAC) tag.
[0805] 129. The method of embodiment 128, wherein said IMAC tag is a polyhistidine tag.
[0806] 130. The method of embodiment 127, wherein said affinity tag is a myc tag, a human influenza hemagglutinin (HA) tag, a maltose binding protein (MBP) tag, a glutathione S-transferase (GST) tag, a streptavidin tag, a FLAG tag, or any combination thereof.
[0807] 131. The host cell of any one of embodiments 127-130, wherein said affinity tag is linked in-frame to said sequence encoding said endonuclease via a linker sequence encoding a protease cleavage site.
[0808] 132. The host cell of embodiment 131, wherein said protease cleavage site is a tobacco etch virus (TEV) protease cleavage site, a PreScission® protease cleavage site, a Thrombin cleavage site, a Factor Xa cleavage site, an enterokinase cleavage site, or any combination thereof.
[0809] 133. The host cell of any one of embodiments 121-132, wherein said open reading frame is codon-optimized for expression in said host cell.
[0810] 134. The host cell of any one of embodiments 121-133, wherein said open reading frame is provided on a vector.
[0811] 135. The host cell of any one of embodiments 121-133, wherein said open reading frame is integrated into a genome of said host cell.
[0812] 136. A culture comprising the host cell of any one of embodiments 121-135 in compatible liquid medium.
[0813] 137. A method of producing an endonuclease, comprising cultivating the host cell of any one of embodiments 121-135 in compatible growth medium.
[0814] 138. The method of embodiment 137, further comprising inducing expression of said endonuclease by addition of an additional chemical agent or an increased amount of a nutrient.
[0815] 139. The method of embodiment 138, wherein an additional chemical agent or an increased amount of a nutrient comprises Isopropyl β-D-1-thiogalactopyranoside (IPTG) or additional amounts of lactose.
[0816] 140. The method of any one of embodiments 137-139, further comprising isolating said host cell after said cultivation and lysing said host cell to produce a protein extract.
[0817] 141. The method of embodiment 140, further comprising subjecting said protein extract to IMAC, or ion-affinity chromatography.
[0818] 142. The method of embodiment 141, wherein said open reading frame comprises a sequence encoding an IMAC affinity tag linked in-frame to a sequence encoding said endonuclease.
[0819] 143. The method of embodiment 142, wherein said IMAC affinity tag is linked in-frame to said sequence encoding said endonuclease via a linker sequence encoding protease cleavage site.
[0820] 144. The method of embodiment 143, wherein said protease cleavage site comprises a tobacco etch virus (TEV) protease cleavage site, a PreScission® protease cleavage site, a Thrombin cleavage site, a Factor Xa cleavage site, an enterokinase cleavage site, or any combination thereof.
[0821] 145. The method of any one of embodiments 143-144, further comprising cleaving said IMAC affinity tag by contacting a protease corresponding to said protease cleavage site to said endonuclease.
[0822] 146. The method of embodiment 145, further comprising performing subtractive IMAC affinity chromatography to remove said affinity tag from a composition comprising said endonuclease.
[0823] 147. A system comprising
   [0824] (a) a class 2, Type V-A Cas endonuclease configured to bind a 3- or 4-nucleotide PAM sequence, wherein said endonuclease has increased cleavage activity relative to sMbCas12a; and
   [0825] (b) an engineered guide RNA, wherein said engineered guide RNA is configured to form a complex with said class 2, Type V-A Cas endonuclease and said engineered guide RNA comprises a spacer sequence configured to hybridize to a target nucleic acid comprising a target nucleic acid sequence.
[0826] 148. The system of embodiment 147, wherein said cleavage activity is measured in vitro by introducing said endonucleases alongside compatible guide RNAs to cells comprising said target nucleic acid and detecting cleavage of said target nucleic acid sequence in said cells.
[0827] 149. The system of any one of embodiments 147-148, wherein said class 2, Type V-A Cas endonuclease comprises a sequence having at least 75% identity to any one of 215-225 or a variant thereof.
[0828] 150. The system of embodiment 149, wherein said engineered guide RNA comprises a sequence having at least 80% identity to the non-degenerate nucleotides of SEQ ID NO: 3609.
[0829] 151. The system of any one of embodiments 149-150, wherein said target nucleic acid further comprises a YYN PAM sequence proximal to said target nucleic acid sequence.
[0830] 152. The system of any one of embodiments 147-151, wherein said class 2, Type V-A Cas endonuclease has at least about 5%, 10%, 20%, 30%, 40%, 50%, 60%, 70%, 80%, 90%, 100%, or 200%, or more increased activity relative to sMbCas12a.
[0831] 153. A system comprising:
   [0832] (a) a class 2, Type V-A′ Cas endonuclease; and
   [0833] (b) an engineered guide RNA, wherein said engineered guide RNA comprises a sequence having at least 80% identity to about 19 to about 25 or about 19 to about 31 consecutive nucleotides of a natural effector repeat sequence of a class 2, Type V Cas endonuclease.
[0834] 154. The system of embodiment 153, wherein said natural effector repeat sequence is any one of SEQ ID NOs: 3560-3572.
[0835] 155. The system of any one of embodiments 153-154, wherein said class 2, Type V-A′ Cas endonuclease has at least 75% identity to SEQ ID NO: 126.
[0836] 156. A method of disrupting the VEGF-A locus in a cell, comprising introducing to said cell:
   [0837] (b) a class 2, type V Cas endonuclease; and
   [0838] (b) an engineered guide RNA, wherein said engineered guide RNA is configured to form a complex with said endonuclease and said engineered guide RNA comprises a spacer sequence configured to hybridize to a region of said VEGF-A locus,
      [0839] wherein said engineered guide RNA comprises a targeting sequence having at least 80% identity to SEQ ID NO: 3985; or
      [0840] wherein said engineered guide RNA comprises the nucleotide sequence of any one of guide RNAs 1-7 from Table 7.
[0841] 157. The system of embodiment 156, wherein said class 2, type V Cas endonuclease comprises an endonuclease having at least 75% sequence identity to any one of SEQ ID NOs: 1-3470 or a variant thereof.
[0842] 158. The system of any one of embodiments 156-157, wherein said class 2, type V Cas endonuclease comprises an endonuclease having at least 75% sequence identity to any one of SEQ ID NOs: 141, 215, 229, 261, or 1711-1721 or a variant thereof.
[0843] 159. The system of any one of embodiments 156-158, wherein said engineered guide RNA comprises a sequence with at least 80% sequence identity to the non-degenerate nucleotides of any one of SEQ ID NOs: 3471, 3551-3559, 3608-3609, 3612, 3636-3637, 3640-3641, 3644-3645, 3648-3649, 3652-3653, 3656-3657, 3660-3661, 3664-3667, 3671-3672, 3678, 3695-3696, 3729-3730, 3734-3735, and 3851-3857.
[0844] 160. The system of any one of embodiments 156-158, wherein said engineered guide RNA comprises a sequence with at least 80% sequence identity to the non-degenerate nucleotides of any one of SEQ ID NOs: 3608-3609, 3853, or 3851-3857.
[0845] 161. A method of disrupting a locus in a cell, comprising contacting to said cell a composition comprising:
   [0846] (a) a class 2, type V Cas endonuclease having at least 75% identity to any one of SEQ ID NOs: 215-225 or a variant thereof; and
   [0847] (b) an engineered guide RNA, wherein said engineered guide RNA is configured to form a complex with said endonuclease and said engineered guide RNA comprises a spacer sequence configured to hybridize to a region of said locus,
   [0848] wherein said class 2, type V Cas endonuclease has at least equivalent cleavage activity to spCas9 in said cell.
[0849] 162. The method of embodiment 161, wherein said cleavage activity is measured in vitro by introducing said endonucleases alongside compatible guide RNAs to cells comprising said target nucleic acid and detecting cleavage of said target nucleic acid sequence in said cells.
[0850] 163. The method of any one of embodiments 161-162, wherein said composition comprises 20 pmoles or less of said class 2, type V Cas endonuclease.
[0851] 164. The method of embodiment 163, wherein said composition comprises 1 pmol or less of said class 2, type V Cas endonuclease.

1.-160. (canceled)

161. A method of disrupting a TRAC locus in a cell, said method comprising introducing to said cell:
(a) a class 2, type V Cas endonuclease or a polynucleotide encoding said endonuclease, wherein said endonuclease comprises an amino acid sequence comprising at least 80% sequence identity to SEQ ID NO: 215; and
(b) an engineered guide ribonucleic acid or a polynucleotide encoding said engineered guide ribonucleic acid, wherein said engineered guide ribonucleic acid is configured to form a complex with said endonuclease, wherein said engineered guide ribonucleic acid comprises a spacer sequence configured to hybridize to a region of said TRAC locus, wherein said engineered guide ribonucleic acid comprises a nucleotide sequence having at least 80% sequence identity to any one of SEQ ID NOs: 5681, 5683, or 5056-5125.

162. The method of claim 161, wherein said engineered guide ribonucleic acid comprises a nucleotide sequence having at least 90% sequence identity to any one of SEQ ID NOs: 5681, 5683, or 5056-5125.

163. The method of claim 162, wherein said engineered guide ribonucleic acid comprises a nucleotide sequence of SEQ ID NOs: 5681, 5683, or 5056-5125.

164. The method of claim 163, wherein said engineered guide ribonucleic acid comprises a nucleotide sequence of SEQ ID NO: 5681.

165. The method of claim 164, wherein said endonuclease comprises a sequence of SEQ ID NO: 215.

166. The method of claim 161, wherein said region of said TRAC locus comprises a sequence having at least 90% sequence identity to at least 20-22 consecutive nucleotides of any one of SEQ ID NOs: 5682, 5684, or 5126-5195.

167. The method of claim 166, wherein said region of said TRAC locus comprises a sequence having at least 20-22 consecutive nucleotides of any one of SEQ ID NOs: 5682, 5684, or 5126-5195.

168. The method of claim 161, wherein said endonuclease is configured to be selective for a protospacer adjacent motif (PAM) sequence comprising 5′-TTTN-3′ of 5′-TTTG-3′.

169. The method of claim 161, wherein said endonuclease comprises a WED II domain and a PAM-interacting region.

170. The method of claim 169, wherein said WED II domain comprises an amino acid sequence having at least 80% sequence identity to a WED II domain of SEQ ID NO: 215.

171. The method of claim 170, wherein said WED II domain comprises an amino acid sequence having at least 80% sequence identity to amino acid residues 561-632 of SEQ ID NO: 215.

172. The method of claim 169, wherein said PAM-interacting region comprises an amino acid sequence having at least 80% sequence identity to a PAM-interacting region of SEQ ID NO: 215.

173. The method of claim 172, wherein said PAM-interacting region comprises an amino acid sequence having at least 80% sequence identity to amino acid residues 633-730 of SEQ ID NO: 215.

174. The method of claim 161, wherein said endonuclease comprises a RuvC domain comprising an amino acid sequence having at least 80% sequence identity to RuvCI, RuvCII, and RuvCIII domains of SEQ ID NO: 215.

175. The method of claim 161, wherein said endonuclease comprises one or more catalytic residues corresponding to residues G578-W579, K583, K641, D886, E976, or D1229 of SEQ ID NO: 215.

176. The method of claim 161, wherein said endonuclease comprises at least one of the following mutations: S168R, E172R, N577R, or Y170R when an amino acid sequence of said endonuclease is aligned to SEQ ID NO: 215.

177. The method of claim 161, wherein said endonuclease comprises an amino acid sequence having at least 90% sequence identity to SEQ ID NO: 215.

178. The method of claim 177, wherein said endonuclease comprises a sequence of SEQ ID NO: 215.

179. The method of claim 161, further comprising contacting said TRAC locus with a single- or double-stranded deoxyribonucleic acid repair template.

180. The method of claim 161, wherein said cell is a eukaryotic cell, a T-cell, a hematopoietic stem cell, or a precursor thereof.

The application's sequence listing, which the Patent Office published only in electronic form, follows.

SEQUENCE LISTING (6059 sequences)

SEQ ID NO: 1 - protein, 1235 aa, unidentified
  REGION 1..1235: note = Description of Unknown: uncultivated organism sequence
  REGION 1..1235: note = Category: MG11 effectors
  REGION 1..1235: note = Description: MG11-1 effector
MLDKFASLYPVTKTLRFRLLPQGRTEENMQAAKVLENDLERSEAAAVVKGLIKKYHLQFISDTLSGSTLSWQALTETLDKFKADHTATAELDSALAAYRCKLAELFTKSPKYKVMATPVSIIKEILKTETDPENIAALNKLNGYTYIIFDYVSTRMLTYSADAKATSLAYRLVDENYLRFYQDISAAAEISAVLEEAGLDNAEVEAFIRTDYNTCLTSEGIASFNAAAGSINQFVNQLLQQNPVLQSEPALRRHLQPLYKMLLDEAESKIIKFEDYGQLRDAVENFRRNFQYLPQSLIDIFAGRYDYSKIYVGYKYLNEASSQIAGGYNWKLLENALEDFYSKPYLVNGKMPVKYKTVVNKKMNQLAYSFTELQEALDAGESGSSITDLFGKYAELHAAYAAADGNVFYKEYDRKSIASLKNYLDAVNAIARFIKIFAVPEVYVKDEGFYGIVDGAADKLRDFDLLYNMVRNYITKKPYKKSKVALTFNSSSFGRGWDENKIYDELTTIFTYNGKYYLGVINKNDKPDLAAAVSKDEGGYKRMVYKTFDIVKQLPRLSFTKAVKAHFEESDEDYIFDGPKFAKPLRVPKEIYLQSFTDNGDKLVDSAKKYTKAYLDMSGDYKGYYEAIVKRIDYTKEFLSAYKSTSIYDLAFLKPADQYEQWSNFTDDVQTALYKIRWDNIPAAAVDEMVESGKLYLFEIYSADLYKNPAEGRKIDTQAQIFKEIFSENGQKVIKLLGNCEVYFRPASLPAVVTHPKGSILVNKQLVNGKTLPDEVYREIYRYLNKKSENLSPLAKQLLDKELVKYRVAQEDIIKDKRFTENQYSFHLPVTLNYKVKQQFYINMEVMNMLRSRKDINILGINRGTRNLLYVTVINQQGEILYSRSLNEFNGVDYRDKLLVKERGIKDAAMNWQAADSIKNIKEGYLSRALGEIVRLMVKFNAICVVENLSSNFRNAGGGIFAYGNFYKGFETNLIKKLNCLIIKNAEKDKAGSVLRSLQMTRSFESFEKAGRQSGWLFMLDPAYISAVDPLTGFVNLFSFRNLKTIRQKAEFLQKFKSINYVPETKAFDFVFDYKDFGVAVCGPVSCWVATSDVERIVKTTENGKVKFESVLPSMQLAKLFTDKDIDFTDGHNLISEITADSRLVTETLSIFMNIMRLYNYDIDRNNDYVSSPVMGRFDTRYDKKLHNPDELAAYNMARKGLMIIKRAQASEKDSKVDLFIKNADWFSFLQTGNI

SEQ ID NO: 2 - protein, 1223 aa, unidentified
  REGION 1..1223: note = Description of Unknown: uncultivated organism sequence
  REGION 1..1223: note = Category: MG11 effectors
  REGION 1..1223: note = Description: MG11-2 effector
MSINSFISNTKVFTGQPVSKTITAKLVPVGKTRENIDKMNILEMDKQREEAFVQVKKYIDRIHKDFIEDCLTSQDMGLGIAIHSYEFNKLYELRVNLKNLTGKERKDVQKQIKLEENRLRVLISKYFEFNPKYKKLFNIELFKELLPAYCSEEEMKDVNLFDGYTSYFKRFNDTREMLYSSEEIHNAVAYRIINENYPVFVDNKLSLEYISTYFHELFDFSENGQKLFHEFADFCDSSYGMSSKYIAKYNSFISGTFDEEGKQITRGLNQLINEYIQKNKDAHVSYFKPLYKNIMSDKKPLFSVSCFESTAEIKDAVISYNESICKPHERFISYITKSFPADFWCVDKKNLNRLSHIICSNPFTLDNLVSASNKFSKKKPDIYCASDFKELLSENILEETEFHFDFLKYKDYLVQFNPNDFYSKIPFDKINDLQYDKKQSLELKEYLQAALDYYNMLRILHIDTEDERIISKEISYDEQYYAELSLILDAMEPIVKLYNKVRNFVTKSVKQEKKIKLNFNCSQFLGGWSESQEKVKNGLIFHDEEEDKYYLGIYNQNMKKPDINYTSDSSFKKMVLNTIPEPYKMLPKVFFSKKGLETYKPCEEIIEGYKNELHKKSNSNFDINFCHKLIDYYKVCIKQRKEWDCFTFDFKPTEEYQDTSGFFDDVSKGGYSLVMKGIDKENLMNAVEEGSIFLFEIYNKYLAKKGHGKDTYTQLLRTALCGKESNIQFCAGAQVYYRPALLEKEVTHEKGSVIVNKITREGFTINSEVYENIYSYFNYQTPLSSEAKTLLDSGSVIYKTADRDLIKDRRYTEESFSFHCPVIINWKGKEINPFTFNKKVLEVIRNDESLNILSVNRGENNLVYVVLMNRNGKVLLDKSFNLIQTGKQNINYKNKLIEKSKERANSRTNWQEINGIKDLKSGYLSFIVAEITRLMIDNNAVLVLESLSSDFKSGRQFIESNIYQQFEEALLTKLACVILKEREAGTPGSLEHPYQLVPKFESFEKIYLQFGFVFFVNPSYISKIDPANGVFNFFNFNVLTNNEKRTEFFKKFESITEENGKLVFEYCPGNFNKDFKEIDRTFRVVASGSRNVWNPKTKTFESIDLELEGHAVYENLYQVNYRNIAELFKDKCNASCLPHPAATERLLRVFIAAVSFRTFVLDDWKYVSPLGIDNEFTGKSMDYIAAYNLANKFRTILELSSDSEYLINIKTAEYVNKINSANP

SEQ ID NO: 3 - protein, 1264 aa, unidentified
  REGION 1..1264: note = Description of Unknown: uncultivated organism sequence
  REGION 1..1264: note = Category: MG11 effectors
  REGION 1..1264: note = Description: MG11-3 effector
MEQFTNLYQLQKTLRFDIIPTEETLEILKEKGVKKSDKKLLEADKKRDSDFHDAQKVIDRYHRYFINSTLDAIKNDSEIIDKLRNCSNERGKDELRKIISDYFQKDSQFNRLFGKELFAKKNEKKDVEDSPLFTYAKTKNEKNALESFVNFTVFFKRYNENRKNMYVDKKQTTAIAYRIANVNLPKFEENNNCFLEIKKTKLMEILNKNRQLKKLLKGKKCEEVFRLDYYINVWKQTEIDEYNEIVGIINTNIKQYNDTLSGKKKSELPLMKKLHKQILGFKEEDKNKWEYRGFDSDKEMLTAVREFYSTYELKIKEKLRQLLETINDFDLSGIHVHQKSLRTISSFMFDDGYAIARFLIPQKSDETYEDYKDRIKKGNKSFTIKGINKKANTDLCQYFSKHSFIKVNEDDEKREEKEIFETINIAYENAKEIIDNANNYTEKNLAGSGDEQKLRTLLDNLKALQHFVQPLLGKGDEKKRDCSFYNKFMELWEDLLPLNILYDKVRSHMTKKPFSKEKIKVIFDVKKDFLNGWTDNMTKSDNGTQYGGFLFRKKNSIGEYDYFLGICKKAWILRKREGVSGDYERLDYYQINSRTFYKYYYYGENGFEEDKNSLMKAIKAYLEITAQDEDDRDLLEDVKAKDTPIAMITIIQERSQSKLSELLNDKCFADINKTVIENLRKSILSLSRIPEAQDYKDKEYYLFSDIQQDIEELCRTKRIFDYFYVCNEEIRDAQNNKESPLLLFKISNKDLSYADTSSEGKRKSRGTENLHTMYFKALMEGKQNVFDLGSGQIFFRESSLKRKVTHPAGIPIDNKNELVCKQRPTRILNYDLIKDKRYTIDKYLFHLSVKINYPQKELPKPENKKSVNDFIADFNKKTIEYLRQNKQDINIIGIDRGERNLIYVSLINAKGEHVTSDFPRSYNLINNFDYQKKLKQVAKNRDEERKNWTIPEKITDIKKGYLSQVVHEIASLAVRHHAIIVMENLSRGFKHGRFPIEHQVYQLFENMLIEKLSYFAFKKDWPSKEYGNIKNGVQLAVPMNKEDWVNQNGWLFYVPAGFTSKIDPATGFVNLFNMSKPLDNLKEFFGAFDEIAFRNGLFYFKFNYSKETFHKIRKDFTNEWTLTSHGERIEKKRPEDLTSKFKSFFAKTDVNIPLENVSVESVCSLSEDNLKELWGLFKLMLKMRNSSDDQDFIISPVASETPFVTGPENYMQIANADANGAYNIALKGLYWLYYNFPTDEKGYLKYIKDEDWFRFIQTKPYCNK

SEQ ID NO: 4 - protein, 1275 aa, unidentified
  REGION 1..1275: note = Description of Unknown: uncultivated organism sequence
  REGION 1..1275: note = Category: MG11 effectors
  REGION 1..1275: note = Description: MG11-4 effector
MKDLKQFIGRYGVEKTLRFELEPVGKTEEWMNLANDKERADKYAFVKELIDRYHKVCIRESLAECDFDWRPLAECLETCRKSRNKDNLDALNNAQKELRSKIAQKFHLFKDFAQLTASTPDKLLKNILPNCVRSKSQPEFSDIESIDNAIKSMSMFDGFASYFEGYQNSRKNLYAANIISSSVAHRVVHENFPKFLSNIKVFENIRVVCPEVIERCAAELGQYLNGLQLDEVFSVDYYNKVLTQGGIDLYNTIIGGVSEKEGESKHQGINELVNLFLQSHEMGGSQKNALTMVPLFKQILSDKKSYSYITEEIKEENELISVIQGYHSHISSFYFNGKAINILEELQHLLDNLCSYNLEGIYVENKKLNTISNKLYGNWSELRFRLTDHLTSQGMKKATIEKFFKKETFSLAELNLSSRDILKLFADLKQCTKGINRFWKDFEERNKKSMPKKYKESNKGIEIVRMLLESYKKFISICSLLDVENEGDSDTNFYGIFTPLITEMQDIDTLYNKARNFLSQKPSDKSKYLLKFDNCICANGWDAPQTKSVLIFRRQGMFLLGVVDNNHRSCLNGISHHQPVSVDDQIEYLVYRQGGHMDQNLQTLMVRDGKTVMVKGKRDENGENQELERQLKELLPPDIYRIRKSQSYINNSDNFCKEDLTLFIDYYKQRAKEYYAQFEFEFKESCDYASFKEFAEEINSKAYRIAFLPTSYKSLASLVNAGELYLFTIKNKDYEPGAHGKKNLHTLYWEQLFNQENLHNLVIKLNAKSTLFCRPQVIKAPTSHKKGSMLLNRKDKDGMPIPEPIYQQLYKYVNGKIREDGLSDDAKAYLDKIIAKEAQYTIIKDKRYTKQKYFIHISTTLNANATNATGINEDVWDYLRDNPDVNIIGIDRGERNLLYLTLINQKGEILLQKSLNVINGFDYHAKLEQREKERDEARKSWQTVGNITDLKEGYLSAAIHEITTMMIENNAIIVLEDLNRKGFMPKRFKFEKQVYQLFEKKLIEKLNYLCSKDIAPTESGGVLRGYQLTEKFVSFEKMTKQNGFLFYVRPDYTSAIDPVTGFVSHFGFKDIRNTKSRKDFFEKMESIIFTNGHVEFVFDYSAFKPKEKDYQNRWTISSVGRRIVWDKQSKLYSDYYPTNIIVGAFADRGIALEEGTDIKALLAGIDDSAHNAEFYNILFEAFKRTVQLRNSNSETGEDYILSPALHDGKQYSSLEERKKWDEGAEMSQLPIDADANGAYHIALKGLYLIMNPQEKKVDNEKWFRFVVEKPFMDKF

SEQ ID NO: 5 - protein, 1284 aa, unidentified
  REGION 1..1284: note = Description of Unknown: uncultivated organism sequence
  REGION 1..1284: note = Category: MG11 effectors
  REGION 1..1284: note = Description: MG11-5 effector
MKDLNKFIGKYKVEKTLRFRLEPIGKTEAWMESKGVIANDKRRADNYAIVKNLIDRYHKVCIRESLTGCNLNWTKLSEAVETYRRCQDTESRKALQKCQDEYRKKIAENFLSFRGFAELTAPSPSVLIKDTLPYNITSKVHPEFSDIGDVDSAKQALLLFEGFAMYFESYQKNRSNLYTAKNIASSVAHRIVHDNFSKFLANIKVFENLRVIYPEILEQCSTELKQHLKGKQLEEVFCVEFFNNVLTQEGIDFYNTVIGGVSGQEGERKCQGINELVNLSLQKENQGRGKRTALTMVPLFKQILSDRNSYSYIPERINDEEELISAIRAFHAHIESFYLNGREVNVMEELLKIVENINCFDPNGIFIDAEKLNGVSKKLYNDLFELRARMTSHLEEQNLTKKNIEKFFQKDAFSITDLCLDKKHSLAKYFSGLKGVNKAIDQKWKQFETRNNKDGQKKYKDSHAGIELVRILLDGYKEFFAVCSILDVDSDNNLDNNFYGVYTPLFTELRGIIPLYNQVRNFLSQKPSDDKKYLLKFDNSKCSNGWDSPQTKSLLIFRRQDRFLLGVVDSENRSCLNDLTTYTPVSPDDRIDFLDYSQGGHMGQNLLTLVVRDGKTVMVKGHKENGENPELERQLKDLLPPDIYRIRKSQSYKNESPNFSKEDLLLFVGYYKQRAKEYYSHFNFTFKDSCDYASFTELVEDIDEKAYQIKFVPTSYKTLQRLINEGKLYLFDIKSKDYEPGAHGKKNLHTLYWEQLFSQENIENLAIKLNAKSTLFCRPQVVTNPMTHKKGSMLLNRKDKNGQPIPEPIYQQLYKYVNGKMAESKLSDEAKGYLGKIVAKEAQYAITKDNRYTKQKYFIHFSTTLNANAPKTADINEDVLNYINDNPDVNIIGIDRGERNLLYVTLINQKGEILDQKSLNVINGFDYHTKLEQREKERDDARKSWQTVGNITDLKEGYLSAAIHEITTMMIENNAIIVLEDLNRKGFMPKRFKFEKQVYQSFEKKLIEKLNYLCSKDIKPTANGGVLRGYQLTEKFVSFEKMTKQNGFLFYVRPDYTSAIDPVTGFVSHFNFKDITNTQGRKDFFEKMESIIVRNGHIEFSFDYRKYKPKDKDFKNIWTVCSSGKRILWNRDSKEYADYNPTAAIIEAFASKGVTLEEGTDIKSLLSEIDGSTANAEFYRIMIEAFKRTVQLRNSNSVTGEDYILSPVIHDGKQYSSLDVLKEWKNAGGHSIPSLPKDADANGAYHIALKGLYLMMNPQTKQIGNEKWFKFVVEKPFKEEKSIG

SEQ ID NO: 6 - protein, 1282 aa, unidentified
  REGION 1..1282: note = Description of Unknown: uncultivated organism sequence
  REGION 1..1282: note = Category: MG11 effectors
  REGION 1..1282: note = Description: MG11-6 effector
MKDLNQFIGKYKVEKTLRFELAPIGKTEAWMESKGVIANDKRRADNYTIVKSLIDRYHKVCIRESLTGCDLNWTRLSEAVETYRRCQDTESRKALLKCQDEYRTEIAKRFLSFEDFAELTAPSPSVLIKEILPYHVTNKVHSEFSGIDDVDNAKQALSLFEGFAMYFESYQKNRSNLYTAKNIASSVAHRIVHDNFSKFLANIKVFENLRVIYPEIIEQCTNELRQLLKGEQLEEVFRVESFNNVLTEEGIDFYNTIIGGVSVQEGEKKFQGINELVNITLHKENQGRGKRTALTMVPLFKQILSDRNTYSYIPERINDEEELISVLRAFHSHLASFYLNGKEVNVMEELLKIVENINHFDPNGIFVDAKKLNGISQKLYDDLFELRAKLTSRLEEQKQTKKNIEKFFQKDAFSITELSLDKKHSLVKYFTGLKDVLKAIDQKWKQFETRNNKDGQKKYKDCHTGIELVRILLDGYKEFFAVCSVLDVDGENDLDNNFYGIFTPLLTELRGIIPIYNQVRNFLSQKPSDEKKYLLKFDNSKCSDGWDAPQTKSVRIFRGQGKFLLGVVDSENRSCLNDLSSYTPISSDDQIDFLDYSQGGHMGQNILTLVVRDGKTVMVKGRKENGKNSGLERQLKELLPPDIYRIRKSQSYKNESPNFSKEDLLLFVDYYKQRAKEYYSHFSFTFKDSCDYASFTELVEDIDEKAYQIKFVPTSYKNLLRLVNEGKLYLFDIKNKDYEPGAHGKKNLHTLYWEQLFCQENLENLTIKLNAKSTLFCRPQVVANPKTHKKGSMLLNRKDKNGQPIPESIYQQLYKYVNGKIAEAKMSDEAKGYLDKIAVKEAQYAITKDKRYTKQKYFIHFSATLNANAPKTADINKDVLDYIKDNPDVNIIGIDRGERNLLYVTLINQKGEILDQKSLNIINGFDYHAKLEQREKERDEAQRSWQTIGNITDLKEGYLSAAIHEITTMMIENNAIIVLEDLNRGFKRGRFKFEKQVYQMFEKKLIEKLNYLCSKDYSPTADGGVLRGYQLTEKFVSFEKMTKQNGILFYVRPDYTSAIDPVTGFVSHFNFRDITNTKGRKDFFEKMESITYKNGYFEFTFDYRKYKPKVKDFKNIWTVCSSGKRVLWSKETKEYTDYYPTTAISGAFASRGITLDEGADVKALLSGIDDSISNADFYRILFEAFKRIVQLRNTNSNTGEDYIHSPAIQDGKQYCSLDELKKWKDNGESSIPSLPIDADANGAYHIALKGLYLMLNPQAKQIENEKWFRFVVEKPFKEEKVM

SEQ ID NO: 7 - protein, 1320 aa, unidentified
  REGION 1..1320: note = Description of Unknown: uncultivated organism sequence
  REGION 1..1320: note = Category: MG11 effectors
  REGION 1..1320: note = Description: MG11-7 effector
MKNLKQFTEIYPVDRTLRFELKPELLEGQTIDDFWSNYLDENKKDSFYNKDKKRNDDYPIVKLILDQFHKNFISLALSSFLPESAPKCPTWNDLFDAYCKDRKSKDFANLQDKMRESISNHFKKHEWWQYISSYSKLIGSLLKQLVENDDDFVESIQERDSSLTREKMLEALETFNRFSVYFGNYADNRSNMYKKEAQGTSIANRIVNENLPKFFDNISVYRKLKATCPIDLESIQDNLKDTLKGMSLDEIFTPCYFNECLTQDGIEKYNWILGGNPNEDVLGINSVGNEYLQHHPESKLKLKDLVMTQLYKQILSDRVQPSFLPQQYKSEEDLMDSVFSFLSAVEKQGLLESVKRIMETLYDNDTDLSKVYVLGSNLTKLSHLLYGDWNLLGEKLREKLVTSNTKKAQQERDKEIEKWLDNKCFSLLQIKEIEDELLEQTQHPLSTEELFTTLNIWKKENETSLWQKVSLIEQCKTAYIVQFATLRKSFKDGKSISTDESKQILKEVLDKYMELYHIVELLRLGNKSAYLEKDSFYVDYERLFESSDEDTLSLSYIIPLYNKVRSFLTRKLSNEGKMLLKFDSPTLADGWDANKEDANNATILKHSDKYYLMLINPLNKPRLEDGICENGSYRKIVYHQIADASKDLPNLMMIDGKTVRKTGRKSQDGFNHILEDLKNKYLPDEINRIRKCGSYLKTSDSFNKEDSQAYLKYYMQRLLDYKKDEMVFHFKEPNEYESYADFLNDVAMQKYSISFVSFSKDKIDEWRKENKVMLFQVSNKDFKEGACGTENIHTLYWKELFSSRNMDNTIFKLNGGAELFYRSKLSSKPFMHKKGSILVNKTLSDGTPISDEMYKHFVDHFNGKGIVLTDEEVRLLPQVRTNRAKLDIIKDKRYYEHKFFMHVPITINFKAPKITQQQFNERTLELLRQNKKQLNIIGIDRGERNLIYVSVINQRGENIIPPKHFNLIETKTYDEVTRKYNYLEKLKQTEQNRDEARKNWTTIERIKDLKSGYLSQVVHEIAKMVVKYNAIVVLEDLNFGFKRGRFNVERQVYQNFEKMLIQKLNYLAFKKDAPSPDYGNVWNGLQLTAPFTSFKDLGKQSGWLFYVPAGYTSKIDPATGFVNLFNMNKPAKDFKTFFGSFTQICYKDDMFYFTFDYSNEKFNTVRTDYTNVWTLSTHGERIVREKDELREIQLIQKFKKFFSDDGVNIPLSEVSVERIKLLEEVKLKELFGLFKLLLKMRNTNGQEDYIISPVAGENPFKTGSNNYMGLTDADANGAYNIALKGLYWVHNGFPVEDKYLKYIKDTDWFEFIQTKPYLND

SEQ ID NO: 8 - protein, 1169 aa, unidentified
  REGION 1..1169: note = Description of Unknown: uncultivated organism sequence
  REGION 1..1169: note = Category: MG11 effectors
  REGION 1..1169: note = Description: MG11-8 effector
MKVTEKYAGKELSYPVSKTLTFQLVPVGKTRQFIEEKNILESDLDKLEKSKKVKGYLDRIHRSFIQDILAKNILDVTELERLFTELQKETDAAKKAGIRKLIRTEEDKKRNEISSWFHKEKDFKELFGAAVFKNKIKDFTTENELKDVEVFNRFTQYFVSYNEGREHIYSKDDTHDTIAFRIVNENFRIYFENLHKLNDAVPGTDALRSFPLTDAQIADYNQVISGNPAEGRKGYNQTANELEEKIPLLKKLYKNILSESTPLFSVEKFASTNDVIESIKDFVVSVKETFVEFELLARYKKNPDGIYVSRKRLANFSLLTTGKPLLLSQVVKTELKEVPEYVSVGKLKEMFFKQLEENPKFEGEEFNPEKYFAMTALVEKTRETLSALDFGKITDLQHDKAQVLPLKVFLDSALELYHHVLTVHVDEEEFTDKKDEGFYNILGSIEEYLSPVTIIYNKTRNFVTKKLSKEEKIPLNFDSPTLLSGWDINKESTSNSMLFHDESEDKYYLAVMDVKDRPKIIEKSDSSFKKMYYKLLPQPNKMLPHVFFSKSGIETYCPSEEILNGYKEGKHIKGENFDIGFCHKLIDFFKDCIARYDGWKVFDFRFSPTSSYEDISGFYREVSEQGYKIQLRGVDKDDVFRMAESGRIYLFLITNRHLSGKSKSFCTMTESLKKALSENSKIQLNGGANIYYRPKLIEAKVTHPKGSWLVNKITKSGFAVPKELYKNIYAHLNFQEKLSPESELLFKSGEVVYKKADFDLIKDRRYSKEDFKFHVTVKHNYKSRDCMLKAFNMSVLEDFRNNEDMNILSVTRGEKNLLYCVLINKKGEVLFEKNFNIMHSANAEINFKHKLEEIEKIRMRERKEWQEIDKIRDAKDGFLGLALHEICDLMIKYNAVLVTENLDSVFKDSRMKIESNVYKVFESNLAKKLSCLILKNNVEAGSVDCPYQLVPSLDLLKKSGTQFGWMFFVNPYCISKISPDNGCVTSFNFSEITNFEGRKKFLSKFSCISFTDETLVLEYECSDFSKNFSGKKRMFITGKRTLWNKVEKKYSEYDLDSVVKAAFAMLGIDGSFSGDIRKNIGELKFSLANNNALELLIECIRAASEMKTLSGDSYVFINPSDPHDRYNGKDIDFISCLNLAKKALLMIESGEEGIRQVKADEYVASLSKV

SEQ ID NO: 9 - protein, 1235 aa, unidentified
  REGION 1..1235: note = Description of Unknown: uncultivated organism sequence
  REGION 1..1235: note = Category: MG11 effectors
  REGION 1..1235: note = Description: MG11-9 effector
MLDKFASLYPVTKTLRFRLLPQGRTEENMQAAKVLENDLERSEAAAVVKGLIKKYHLQFISDTLSGSTLSWQALTETLDKFKADHTATAELDGALAAYRCKLAELFTKSPKYKVMATPVSIIKEILKTETDPENIAALNKLNGYTYIIFDYVSTRMLTYSANAKATSLAYRLVDENYLRFYQDISAAAEISAVLEEAGFDNAEVEAFIRTDYNTCLTSEGIASFNAAAGSINQFVNVLLQQNPVLQSEPALRRHLQPLYKMLLDEAESKIIKFEDYGQLRDAVENFRRNFQDLPQSLIDIFAGRYDYSKIYVGYKYLNEASSQIAGGYNWKLLENALEDFYSKPYLVNGKMPVKYKTVVNKKMNQLAYSFTELQEALDAGESGSSITDLFGKYAELHAAYAAADSNIFYKEYDRKSIASLKNYLDAVNAIARFIKIFAVPEVYVKDEGFYGIVDGAADKLRDFDLLYNMVRNYITKKPYKKSKVALTFNSSSFGRGWDENKIYDELTTIFTYNGKYYLGVINKNDKPDLAAAVSKDEGGYKRMVYKTFDIVKQLPRLSFTKAVKAHFEESDEDYIFDGPKFAKPLRVPKEIYLQSFTDNGDKLADSAKKYTKAYLDMSGDYKGYYEAIVKRIDYTKEFLSAYKSTSIYDLAFLKPADQYEQWSNFTDDVQTALYKIRWDNIPAAAIDEMVESGKLYLFEIYSADLYKNPAEGRKIDTQAQIFKEIFSENGQKVIKLLGNCEVYFRPASLPAVVTHPKGSILVNKQLVNGKTLPDEVYREIYRYLNKKSENLSPLAKQLLDKELVKYRVAQEDIIKDKRFTENQYSFHLPVTLNYKVKQQFYINMEVMNMLRSRKDINILGINRGTRNLLYVTVINQQGEILYSRSLNEFNGVDYRDKLLVKERGIKDAAMNWQAADSIKNIKEGYLSRALGEIVRLMVKFNAICVVENLSSNFRNAGGGIFAYGNFYKGFETNLIKKLNCLIIKDAEKDKAGSVLRSLQMTRSFESFEKAGRQSGWLFMLDPAYISAVDPLTGFVNLFSFRNLKTIRQKAEFLQKFKSINYVPETKAFDFVFDYKDFGLTACGPVSCWVVTSDVERIVKTTENGKVKFESVLPSMQLAKLFTDKDIDFTDGHNLISEITADSRLVTETLSIFMNIMRLYNYDIDRNNDYVSSPVMGRFDTRYDKKLHNPDELAAYNMARKGLMIIKRAQASEKDSKVDLFIKNADWFSFLQTGSI

SEQ ID NO: 10 - protein, 1235 aa, unidentified
  REGION 1..1235: note = Description of Unknown: uncultivated organism sequence
  REGION 1..1235: note = Category: MG11 effectors
  REGION 1..1235: note = Description: MG11-10 effector
MLDKFASLYPVTKTLRFRLLPQGRTEENMQAAKVLENDLERSEAAAVVKGLIKKYHLQFISDTLSGSTLSWQALTETLDKFKADHTATAELDSALAAYRCKLAELFTKSPKYKVMATPVSIIKEILKTETDPENIAALNKLNGYTYIIFDYVSTRMLTYSADAKATSLAYRLVDENYLRFYQDISAAAEISAVLEEAGFDNAEVEAFIRTDYNTCLTSEGIASFNAAAGSINQFVNVLLQQNPVLQSEPALRRHLQPLYKMLLDEAESKIIKFEDYGQLRDAVENFRRNFQDLPQSLIDIFAGRYDYSKIYVGYKYLNEASSQIAGGYNWKLLENALEDFYSKPYLVNGKLPVKYKTVVNKKMNQLAYSFTELQEALDAGDSGSSITDLFGKYAELHAAYAAADGNVFYKEYDRKSIASLKNYLDAVNAIARFIKIFAVPEVYVKDEGFYGIVDGAADKLRDFDLLYNMVRNYITKKPYKKSKVALTFNSSSFGRGWDENKIYDELTTIFTYNGKYYLGVINKNDKPDLAAAVSKDEGGYKRMVYKTFDIVKQLPRLSFTKAVKAHFAESDEDFIFDGPKFAKPLRVPKEIYLQSFTDNGDKLPDSAKKYTKAYLDMSGDYKGYYEAIVKRIDYTKEFLSAYKSTSIYDLAFLKPADQYEQWSNFTDDVQTALYKIRWDNIPAAAVDEMVESGKLYLFEIYSADLYKNPAEGRKIDTQAQIFKEIFSENGQKVIKLLGNCEVYFRPASLPAVVTHPKGSILVNKQLVNGKTLPDEVYREIYRYLNKKSENLSPLAKQLLDKELVKYRVAQEDIIKDKRFTENQYSFHLPVTLNYKVKQQFYINMEVMNMLRSRKDINILGINRGTRNLLYVTVINQQGEILYSRSLNEFNGVDYRDKLLVKERGIKDAAMNWQAADSIKNIKEGYLSRALGEIVRLMVKFNAICVVENLSSNFRNAGGGIFAYGNFYKGFETNLIKKLNCLIIKDAEKDKAGSVLRSLQMTRSFESFEKAGRQSGWLFMLDPAYISAVDPLTGFVNLFSFRNLKTIRQKAEFLQKFKSINYVPETKAFDFVFDYKDFGVTACGPVSCWVATSDVERIVKTTENGKVKFESVLPSMQLAKLFTDKDIDFTDGHNLISEITADSRLVTETLSIFMNIMRLYNYDIDRNNDYVSSPVMGRFDTRYDKKLHNPDELAAYNMARKGLMIIKRAQASEKDSKVDLFIKNADWFSFLQTGSI

SEQ ID NO: 11 - protein, 1235 aa, unidentified
  REGION 1..1235: note = Description of Unknown: uncultivated organism sequence
  REGION 1..1235: note = Category: MG11 effectors
  REGION 1..1235: note = Description: MG11-11 effector
MLDKFASLYPVTKTLRFRLLPQGRTEENMQAAKVLENDLERSEAAAVVKGLIKKYHLQFISDTLSGSTLSWQALTETLDKFKADHTATAELDSALAAYRCKLAELFTKSPKYKVMATPVSIIKEILKTETDPENIAALNKLNGYTYIIFDYVSTRMLTYSADAKATSLAYRLVDENYLRFYQDISAAAEISAVLEEAGFDNAEVEAFIRTDYNTCLTSEGIASFNAAAGSINQFVNVLLQQNPVLQSEPALRRHLQPLYKMLLDEAESKIIKFEDYGQLRDAVENFRRNFQDLPQSLIDIFAGRYDYSKIYVGYKYLNEASSQIAGGYNWKLLENALEDFYSKPYLVNGKLPVKYKTVVNKKMNQLAYSFTELQEALDAGDSGSSITDLFGKYAELHAAYAVADSNVFYKEYDRKSIASLKNYLDAVNAIARFIKIFAVPEVYVKDEGFYGIVDGAADKLRDFDLLYNMVRNYITKKPYKKSKVALTFNSSSFGRGWDENKIYDELTTIFTYNGKYYLGVINKNDKPDLAAAVSKDEGGYKRMVYKTFDIVKQLPRLSFTKAVKAHFAESDEDFIFDGPKFAKPLRVPKEIYLQSFTDNGDKLPDSAKKYTKAYLDMSGDYKGYYEAIVKRIDYTKEFLSAYKSTSIYDLAFLKPADQYEQWSNFTDDVQTALYKIRWDTIPVAAIDEMVESGKLYLFEIYSADLYKNPAEGRKIDTQAQIFKEIFSENGQKVIKLLGNCEVYFRPASLPAVVTHPKGSILVNKQLVNGKTLPDEVYREIYRYLNKKSENLSPLAKQLLDKELVKYRVAQEDIIKDKRFTENQYSFHLPVTLNYKVKQQFYINMEVMNMLRSRKDINILGINRGTRNLLYVTVINQQGEILYSRSLNEFNGVDYRDKLLVKERGIKDAAMNWQAADSIKNIKEGYLSRALGEIVRLMVKFNAICVVENLSSNFRNAGGGIFAYGNFYKGFETNLIKKLNCLIIKDAEKDKAGSVLRSLQMTRSFESFEKAGRQSGWLFMLDPAYISAVDPLTGFVNLFSFRNLKTIRQKAEFLQKFKSINYVPETKAFDFVFDYKDFGVAVCGPVSCWVATSDVERIVKTTENGKVKFESVLPSMQLAKLFSDKDIDFTDGHNLISEITADSRLVTETLSIFMNIMRLYNYDIDRNNDYVSSPVMGRFDTRYDKKLHNPDELAAYNMARKGLMIIKRAQASEKDSKVDLFIKNADWFSFLQTGSI

SEQ ID NO: 12 - protein, 1235 aa, unidentified
  REGION 1..1235: note = Description of Unknown: uncultivated organism sequence
  REGION 1..1235: note = Category: MG11 effectors
  REGION 1..1235: note = Description: MG11-12 effector
MLDKFASLYPVTKTLRFRLLPQGRTEENMQAAKVLENDLERSEAAAVVKGLIKKYHLQFISDTLSGSTLSWQALTETLDKFKADHTATAELDSTLAAYRCKLAELFTKSPKYKVMATPVSIIKEILKTETDPENIAALNKLNGYTYIIFDYVSTRMLTYSADAKATSLAYRLVDENYLRFYQDISAAAEISAVLEEAGLDNAEVEAFIRTDYNTCLTSEGIASFNAAAGSINQFVNVLLQQNPVLQSEPALRRHLQPLYKMLLDEAESKIIKFEDYGQLRDAVENFRRNFQDLPQSLIDIFAGRYDYSKIYVGYKYLNEASSQIAGGYNWKLLENALEDFYSKPYLVNGKMPVKYKTVVNKKMNQLAYSFTELQEALDAGESGSSITDLFGKYAELHAAYAAADGNVFYKEYDRKSIASLKNYLDAVNAIARFIKIFAVPEVYAKDEGFYGIVDGAADKLRDFDLLYNMVRNYITKKPYKKTKVALTFNSSSFGRGWDENKIYDELTTIFTYNGKYYLGVINKNDKPDLAAAVSKDEGGYKRMVYKTFDIVKQLPRLSFTKAVKAHFAESDEDFIFDGPKFAKPLRVPKEIYLQSFTDNGDKLPDSAKKYTKAYLDMSGDYKGYYEAIVKRIDYTKEFLSAYKSTSIYDLAFLKPADQYEQWSNFTDDVQTALYKIRWDNIPAAAIDEMVESGKLYLFEIYSADLYKNPAEGRKIDTQAQIFKEIFSENGQKVIKLLGNCEVYFRPASLPAVVTHPKGSILVNKQLVNGKTLPDEVYREIYRYLNKKSENLSPLAKQLLDKELVKYRVAQEDIIKDKRFTENQYSFHLPVTLNYKVKQQFYINMEVMNMLRSRKDINILGINRGTRNLLYVTVINQQGEILYSRSLNEFNGVDYRDKLLVKERGIKDAAMNWQAADSIKNIKEGYLSRALGEIVRLMVKFNAICVVENLSSNFRNAGGGIFAYGNFYKGFETNLIKKLNCLIIKDAEKDKAGSVLRSLQMTRSFESFEKAGRQSGWLFMLDPAYISAVDPLTGFVNLFSFRNLKTIRQKAEFLQKFKSINYVPETKAFDFVFDYKDFGVTACGPVSCWVATSDVERIVKTTENGKVKFESVLPSMQLAKLFTDKDIDFTDGHNLISEITADSRLVTETLSIFMNIMRLYNYDIDRNNDYVSSPVMGRFDTRYDKKLHNPDELAAYNMARKGLMIIKRAQASEKDSKVDLFIKNADWFSFLQTGSI

SEQ ID NO: 13 - protein, 1309 aa, unidentified
  REGION 1..1309: note = Description of Unknown: uncultivated organism sequence
  REGION 1..1309: note = Category: MG11 effectors
  REGION 1..1309: note = Description: MG11-13 effector
MNNLKQFTGIFPVSKTLRFELNPVLLEGQTLNDFWQVYLDGPEGNDLHKLYKNDKERNVNYPIMKAILDQFHKKFIASALEQFVVGDTGVTWESLALAYQEDKKSKAYQKLQGEMRGKMRKAFMGHNWWPYISSYSQLISTLMKKMVEEDDDFVESIQESNPKMNLDRNKMLEAIKAFNNFSVYFGNYQDNRDNMYSEKDQTTSVANRIVNENYPKFLDNIVVYHRLKETCPDELKAIEENLAAVLNGLMLDDIFTPRYYNKCLTQDGIEKYNWLLGGNPNEGVLGINSVGNEYLHQHPDSQLKLRSLEMAQLHKQILSDRVRISFLPEQFNSDEELMQSVSAFFEGFDSFNLFEHIQETMNILKDSTTDLNRVYVQGKNLSRLSTLLYGKWDVLGEKLRSVMVTGNAKKAQKEKDKEIEAWLENKCFSLAQIQSVENELMELSAHPLSLIELLTDLTMWKYDSENKIWSKKSLLKLCMDARITEFSVLMNKYKQGMSIKTDTAKEILKSVLDQYMELLHVLELLRLGTKAQYIEKDDFYNSYELLFESTDDAVSVSHIVPLYMKVQSYLTRKLADKGKMLLKFDSPTLADGWDANKESANNATILLRDGKFFLMIVNPYNKPNISEGICEKGSYLKIVYHQIADASTDIPNLMVENGVTVRKTGRKDPDGINRRLEAEKDRLLPLDINMIRKKGSYLKSSSTFNTADSQTYLAYYMQRIIEYKGREIDFHFKRPDEYECYQDFIDDVSKQKYSLSLVPFSEYMLETWRQQGKAFLFEITNKDFREKSSGMANLHTLYWKELFSAQNLKDSVFKLNGEAELFFREKADSVSFIHKKGSVLVNKTFSNGTPIDTVFYKKLLRHFNGLDVDLTPEEVSLLPLVKTKNAQFDLVKDKRYHEHKFFLHVPITINYKVSGTTQKQFNERTLDIFRNNKKELNIIGIDRGERNLIYVAVINQKGENLIPPRHYNLIGNYDYLAKLKQTEKNRDEARKNWTTQERIKDLKSGYLSQVVHEIAKLVVRYNAVIVLEDLSFGFKRGRFNVERQVYQNFEKMLIQKLNYLAFKRDAPSLEFGTIRTGLQLTAPFTSFKELGKQSGWLFYVPAGYTSKIDPSTGFVNLFNMTKPASSLREFFGAFNEISYRNGLFYFTFDYSKEKFNTVKTDYTNRWTLASHGLRIVGKEKELKNLTSEFANFFEKAKLALGEVSVKTVSALDEGMLKELWGLFKILLKMRNSNDDKDFIISPVASDTPFLTGPDNSMQIADADANGAYNIALKGLFWLYYNFPTDEKGYLKYIKDEEWFRFIQTKPYRD

SEQ ID NO: 14 - protein, 1309 aa, unidentified
  REGION 1..1309: note = Description of Unknown: uncultivated organism sequence
  REGION 1..1309: note = Category: MG11 effectors
  REGION 1..1309: note = Description: MG11-14 effector
MNNLKQFTGIFPVSKTLRFELNPVLLEGQTLNDFWQVYLDGPEGNDLHKLYKNDKERNVNYPIMKAILDQFHKKFIASALEQFVVGDTGVTWESLALAYQEDKKSKAYQKLQGEMRGKMRKAFMGHNWWPYISSYSQLISTLMKKMVEEDDDFVESIQESNPKMNLDRNKMLEAIKAFNNFSVYFGNYQDNRDNMYSEKDQTTSVANRIVNENYPKFLDNIVVYHRLKETCPDELKAIEENLAAVLNGLMLDDIFTPRYYNKCLTQDGIEKYNWLLGGNPNEGVLGINSVGNEYLHQHPDSQLKLRSLEMAQLHKQILSDRVRISFLPEQFNSDEELMQSVSAFFEGFDSFNLFEHIQETMNILKDSTTDLNRVYVQGKNLSRLSTLLYGKWDVLGEKLRSVMVTGNAKKAQKEKDKEIEAWLENKCFSLAQIQSVENELMELSAHPLSLIELLTDLTMWKYDSENKIWSKKSLLKLCMDARITEFSVLMNKYKQGMSIKTDTAKEILKSVLDQYMELLHVLELLRLGTKAQYIEKDDFYNSYELLFESTDDAVSVSHIVPLYMKVQSYLTRKLADKGKMLLKFDSPTLADGWDANKESANNATILLRDGKFFLMIVNPYNKPNISEGICEKGSYLKIVYHQIADASTDIPNLMVENGVTVRKTGRKDPDGINRRLEAEKDRLLPLDINMIRKKGSYLKSSSTFNTADSQTYLAYYMQRIIEYKGREIDFHFKRPDEYECYQDFIDDVSKQKYSLSLVPFSEYMLETWRQQGKAFLFEITNKDFREKSSGMANLHTLYWKELFSAQNLKDSVFKLNGEAELFFREKADSVSFIHKKGSVLVNKTFSNGTPIDTVFYKKLLRHFNGLDVDLTPEEVSLLPLVKTKKAQFDLVKDKRYHEHKFFLHVPITINYKASGTTQKQFNERTLDIFRNNKKELNIIGIDRGERNLIYVAVINQKGENLIPPRHYNLIGNYDYLAKLKQTEKNRDEARKNWTTQERIKDLKSGYLSQVVHEIAKLVVRYNAVIVLEDLSFGFKRGRFNVERQVYQNFEKMLIQKLNYLAFKRDAPSLEFGTIRTGLQLTAPFTSFKELGKQSGWLFYVPAGYTSKIDPSTGFVNLFNMTKPASSLREFFGAFNEISYRNGLFYFTFDYSKEKFNTVKTDYTNRWTLASHGLRIVGKEKELKNLTSEFANFFEKAKLALGEVSVKTVSALDEGMLKELWGLFKILLKMRNSNDDKDFIISPVASDTPFLTGPDNSMQIADADANGAYNIALKGLFWLYYNFPTDEKGYLKYIKDEEWFRFIQTKPYRD

SEQ ID NO: 15 - protein, 1314 aa, unidentified
  REGION 1..1314: note = Description of Unknown: uncultivated organism sequence
  REGION 1..1314: note = Category: MG11 effectors
  REGION 1..1314: note = Description: MG11-15 effector
MNNLKQFTGIYPVSKTLRFELKPVLLEGQTINDFWNIYLNGSNDNVLHKLYLHDKKRNDNYPIMKVILDQFHKKFIASALEQFEVGDKGVTWESLALSYQEDKKSKTFQKLQEEMRGKIHKAFTEHKWWPYISSYSKLIGTLMRQMVEDDDDFVESIQESNPKMSLDRNKMLQAIETFNKFSVYFGNYQDNRDNMYSEKDQATSVANRIVNENYPKFLDNIVVYNRLKDTCNNELKAIEGNLNAVLNGLSLDDVFTPKYYNRCLTQNGIETYNWMLGGSPNEGVLGINSVGNEYLHHHPDSQLKLRSLKMTQLHKQILSDRVRISFLPEQFNSDEELMQNVSAFFEEFESSNLFVRIQETLSILKDSDTDLNKIYVLGKNLSRLSTLLYGKWDVLGEKLRSVMVTGNTKKAQKDKDQEIEAWLENKCFSLAQIKAVENELMELSSRPLSLMELLTDLTLWKYDSENRTWSKNSLLKLCKDARITEFNALTDEYRQGKLTIKTDAAKEVLKSVLDLYMELFHVIELLRLGKKSPFLEKDDFYISYEQLFESTDNTVLVSHIVPLYMKVQSYLTRKLADQGKMLLKFDSPTRANGWNDCSIAIKDGKYYLLLYLESLTNEEIAALYSGDSADLVIYQQQKTDYRNAPRLFINSKGDNQAPAVSKYHLPIEMVESLYKERKALKTQSAKREFDERHPDYLEKLINYYKIGFLRHEDFQPFQRTFENMWKDSLEYNSVQEFFEHTQELCYLLTFKPIDFDSLLNLQKSKKLLLFSITNKDYKEKAKGTPNMHTLYWEELFSKDNLSNVVYKLSGQGIEIFHREAISPELSFVHKKGSILVNKTFSDGTPIDAELYKKLLRHFNGLDVDLKPEEVNLLPLVRTKKAQFDLMKDKRYYEHKFFLHVPITINFKASAISQKQFNERTLNILRNNKESLNIIGIDRGERNLIYVSVINQRGENLIAPRHFNLIETKTFDGKERKFDYLTKLKQTEKNRDEARKNWTTQERIKDLKSGYLSQVVHEIAKLVVQYNAVIVLEDLNFGFKRGRFNVERQVYQNFEKMLIQKLNYLAFKKDAPSEEYGTIQSGLQLTAPFTSFKELGKQSGWLFYVPAGYTSKIDPSTGFINLFNMNKPANSLREFFEAFDDITYRDGLFYFTFDYSKDVFNKVKRDYTNHWTLASHGSRIVGKGKELKDLTAEFVKFFEKEAKIPLEKVSVKSISVLDESKLQTLWGLFKLLLKMRNSNDDIDYVISPVAGDSPFITGEGNSMQIVDADANGAYNIALKGLYWLYNDFPMEQGYLKYIKDEDWFRFIQTKPYRQD

SEQ ID NO: 16 - protein, 1314 aa, unidentified
  REGION 1..1314: note = Description of Unknown: uncultivated organism sequence
  REGION 1..1314: note = Category: MG11 effectors
  REGION 1..1314: note = Description: MG11-16 effector
MNNLKQFTGMYPVSKTLRFELKPVLLEGQTVNDFWNIYLNGSIDNDLHKLYLHDKERNDYYPIMKAILDQFHKKFIALSLEQFEVGDKGVTWESLALAYQEDKKSKTFQKLQGEMRGKIRKAFTEHGWWLYIASYSQLIGSFTKKMVEDDDDFVKSIQESNPKMGLDRDMMIQAIETFKNFSVYFGNYKANRDNMYSEKDQTTSVANRIVNENYPKFLDNIVVYNRLKDTCYSELNAIEDNLSAILNGLSLDDVFTPKYYNKCLTQDGIEKYNWVLGGNPNEGVLGINSVGNEYLHQHPESRLNLRSLKMTQLHKQILSDRVRISFLPEQFDSDEELMQSVSAFIEGFESSNLFAHIKDTLNILKDSDTDLDKVYVQGKNLSRLSTLLYGKWDVLGEKLRSVMVTGNTKKAQKDKEKEIEAWLENKCFSLAQIKAVENELMELSAHPLSLMELLTDLTVWKYDSENKTWSKKSLQKLCKDASITEFNVLMDKYKQGEFSIKTDAAKEVLKSVLESYMELFHVIELLRLGKKSPYLEKDNFYIPYELLFESTDDDVLVPHIVPLYMKVQSYLTRKLANQGKMLLKFDSPTRANGWKDCSIAIKDGKYYLLLYLENLTNEEITALYSRDSADLVIYQQQKTDFRNAPRLFINSKGDNQAPAVSKYHLPIEMVESLYKERKSLKTQSAKREFDERHPDYIERLIDYYKIGFLRHEDFRPFQYTFESMWKDSSEYSSVQEFFDHTKEMCYMLTFRPIDFDFLYNLQKGKKLVLFSITNKDYKKEAKGTPNMHTLYWEELFSQDNLANIVYKLSGQGIELFHREAISPKLAFVHKKGSILVNKTFSDGTPIDAEFYKKLIRHFNGVKVELTPEEVNLLPLVRTKKAQFDLMKDKRYHEHKFFLHVPITINFKASGTSQKQFNERTLNILRDNKEGLNIIGIDRGERNLIYVSVINQKGENLIAPRHFNLIETETYNGIVRKFDYLTKLKQTEKNRDEARKNWTTQEKIKDLKSGYLSQVVHEIAKLVVRYNAIIVLEDLNFGFKRGRFNVERQVYQNFEKMLIQKLNYLVFKKDAPSKEYGTIQSGLQLTAPFTSFKELGKQSGWLFYVPAGYTSKIDPVTGFVNLFNMNKPANSLREFFGAFDDITYRDGLFYFTFNYSKDVFNKVKADYTNHWTLASHGLRIVGKDKEPKDLTKEFELFFKEAYLPLDEVSVQTISSLDESKLQKLWGVFKLLLKMRNSNDEQDYIISPVASNKPFITGPDNPMQIADADANGAYNIALKGLYWLYYDFPTDENGYLKYIKDENWFRFIQTKPYLND

SEQ ID NO: 17 - protein, 1226 aa, unidentified
  REGION 1..1226: note = Description of Unknown: uncultivated organism sequence
  REGION 1..1226: note = Category: MG11 effectors
  REGION 1..1226: note = Description: MG11-17 effector
MRAIDNFISNTKEFAGLPVSKTITAKLVPVGKTRDNIDKMNILESDKQREEAFVRVKKYIDRVHKYFIEECLKQQDSGKGVYVPENEFNKLYTLRVNLKNLTGKERKNAQKEIQAEENKLRKLISEIFKAHPNYKNLSGVNLFTELLPSYCNEEEMKDVNLFKGFYSYFTKFNKLREQLYVSDDIHTAVAHRIINDNYPVYIDNKLILERIRSEYKELYDLSENGRQLFHELNQTYTMAYGMSSSYISMYNSTISGTFDEDGNQTCRGLNQLINEYRQKNKECRIPYFKPLYKNLMSDKKPLFSVSYFESTAEIKDAVITFNESIRKPYERFISYITKSFPVDSWCVEKKNLNRLSHIICSNPFTLDNLVSASKKFSKNQPDIYSASDFKELLSENILEETEFHFDFLKYKDYLLQFRPQDFFSKIPFDKITDIQYDKKQALELKEYLQSVLDYYNMLRILVIDPEDERIVSSEITYDEEYYTELELIIDALNPIVKLYNKVRNFVTKSLKQEKEIKLNFDCSSLLDGWAESQEKVKNGLIFHDESEDKYYLGIYNQNMKKPDFEYVSDSTFKKMVLNTIPEPYKMLPKVFFSKKGLETYKPSEEIIEGYKNELHKKSSGKFDLSFCHKLIDYYKDSIGQRDEWKCFNFNFRPTEEYQDTFEFFKEVSEGGYSLEMVGINKDILMKAVDEGSIFLFEIYNKYLANKAHGKDTYTQIIRSALSGKKSNVQFCGGAQIYYRPALIKEEATHKKGSVIVNKISKEGFTINSDVYKNICSHFNHNTALSSEAKTLLDSGSVIYKTADRDLYKDRRYMYESFSFHCPVKINWQAKDINPLTFNKAVLDAIRSDDDVKILSVNRGENNLVYAVLMDKKGKVLLDKSFNLIQSGKQNVNYKNKLIEKSKDRANSRTNWQEIDKIKDLKSGYLSFVIAEITRLIIENNAVLVLESLSNDFKSGRQFIESNIYQQFEMALVTKLSCIILKENEYGTPGSLEHPYQLVPKFTSFDNIFLQFGFVFFINPAYISKIDPESGIINFFNFNALTNNEKRTEFFKNFDNITVENDKLVFLYHPGNFNKDFKSIDLFKVIAAGKRNIWNPKTKKFEIIDLELEGKAVYENLLSYDYTNIAELFKDKCCNGVLPHPAATERLLRIFMAAVSSRTFVLDDWQYISPMGNENEFTGKSFDFIAAYNLANKFKTILERSKDGEYLSNIKTVEYVSSLIWNRVANL

SEQ ID NO: 18 - protein, 1235 aa, unidentified; identical to SEQ ID NO: 12
  REGION 1..1235: note = Description of Unknown: uncultivated organism sequence
  REGION 1..1235: note = Category: MG11 effectors
  REGION 1..1235: note = Description: MG11-20 effector

SEQ ID NO: 19 - protein, 1226 aa, unidentified
  REGION 1..1226: note = Description of Unknown: uncultivated organism sequence
  REGION 1..1226: note = Category: MG11 effectors
  REGION 1..1226: note = Description: MG11-21 effector
MKEHTFNQFVKAGPITKAFNFEIIPEGKTRETIENLGLLDDDAHFRECTKAATPYIDAVVRNIADKALSKLDYDFNKLAIVKDDKKKREKEEIVLEKAIARCVKENLPTDMKSTKDIMSAAFLSTVLPAEVKKVPTLTTEEKDKAGVLFEELKGKTQLLTKFLQTRVIALNTWLPQRVIENFYRYTDNFDTINNIISEKLPVENIEELPSMLLPSYYSQFVTQEGINAYNLHISGIYTEDKVVMQGLNEIINIHNQVAKKNGKTQIAKMKPLYKQILMPSEKSFTIEALNSDKDCVDVVRRALAQVDNAESLVNHIAKARTESMVVRGSRLHGLSYIGLGSHAELPNSILEIKTEEFLAEHKKLTKKGERELNGIAAKVRSSTYSLDYIEKVAPGITASYKEEVSDTMKLLKELAVSTERVISDPSNISTSKTALKTIKDFFDTFTELRTMIGIVGRSDNKMGENDFYNRYDELNACLTVTWKAENLFRNYVTRKPVDAHAKTETVLGTALRKTSLWWKKGDLLKVPSQLMTCEDGKYYYYLPLPVSIGGRNIDPQGKDDNCMLMSQIKVQDAVKWIPAQTFTKAKKYFSENQSKDTYTIEEKVHEPVTITREVSEIYERKLHTKGALQNGEETEEEYRKNLLAVLNVIDTFARNYVLYDSFEIKTKPIEEYEDAKQYYDELNLCLTPVIEWVTGNKRLLDEGVANGSLLKFLIHSRNLYAPAEYTEARKTSYTKMLSFILSPANKGQITLNSRPVLMYRPAVISEERIVKHKKGSILVSKNTTRGEHIPDEIYNELKLYFNQNKPLSDEGAQYFNAHKNEISHHKAETTIIKDKRYTMEKFFLNMSYKKNADTIESKTLSYDLNKKMKAYAAAGCNVLSVIRSRNDLVYVSVVDQNNNVLEERSLNVIDGVDFAGRIKEAAQIKQKDKAENWKYDRKIKDLKTGFISRAISEIVSLAVKYEAVICIEYLSQNFKDKYSALDDTVYKSFETALVSRLSDLWFKNIDEGKAGSMSNPLQLATNNGNSFQDGILFYTGQKYIKKTDPETGYADLFDTRFITTITNKKSFFSKFSSIRYNAETKKIDMEFDYGNFRTFALTSKTKWKISIGGEGTIYQREQKCNVYEPQVSKILVLAMEQSGVALTSDLSDLARNGELPNNVTNALWDVFTVTRTGIVKAHNNKSAVFISPVTGKKYLASHVAALNLAKKFRIELSEGRKEEWIDYVQV

SEQ ID NO: 20 - protein, 1211 aa, unidentified
  REGION 1..1211: note = Description of Unknown: uncultivated organism sequence
  REGION 1..1211: note = Category: MG11 effectors
  REGION 1..1211: note = Description: MG11-22 effector
MNGLNLKELTKRNKVVKSCTFELVPQGATSKTIEQSKFLNTDADWKQLISEIAPYIDAFIRNIVSCALSRVELDCSKDEMDEVKLASEINLAINSALNEKYGIYVKQIKSAKFINSVLPDFVDTLDLDENESIAVHNVLEELRGKTELVNEFLTSRVTALNTSVARRVCENFERYQENVKVFEKLQASSLWDTIVALYPNAGDFANVDSYNECITQEQIDTYNDMINGISDENGIIVKGIRGLINEYRMLEKNEKLPSPKELYKQILIPGKKAFSIICIDNDDELYDVISEASEHAVAAGKRFCDLIDNASAYDIVVQYKNLHTISHIVTGEHRTIPDAVKDVMYAAINQQIEAATTAKKRLALQKKVDDIEKALKKCDWTMDELEKISNLGIFSAYKTSAKNAYLLASGTVGTIPALTKDIRNNDAQREELKSIFNVWTEFRDLVRLVKRQTLDKGYHAFYDALDEIIFELSYMAKAETLTIAYVTRKPKDVSKKALASMGYQARMGAAWLQPDKKLSICDMTILKRDGKYYLYMLAPGVKPVNITTDKSDEYVFVQKKGQDASKALPKVTFYTASKFFEENPDAEEFVITNNVTEPVTISRELFDMKENGLFKTDAVKKGLITQEEYEKNLFEILSFYRHFMDVYTEYSKFDVQTKSDLHDYKDSGEFFTDVNAANVSSEWLPADTKKMDEMVDKGEALMFLITNRNMYSQFGKKTAYAELFLTAMSDSNMGVFLNSSPKMYFRAKSITKPIVHKKGSILVHKHDTNGNKIPKAIYDEIYKYYNNKLFATDLSQEARDYIDRGLVGKKKADTDIVKDNRYTEDKWMIQFSYTKNRTVIPASTKLNDIIRQNAANMNVLSIIRSETDLAYYMVTAPDGTVLEKQSLNIIDGRDYWSELSTISAKRKDEKSQSWNYSRQVKDQRDPYIVRAISVIARKVIEYNAIVVIERIRPEIKNRFDAMDNTVFKKFEGMLISRLADLYFSDVPAGEPGSVMNPYQLCENSGNDYQDGIVFFVSNAYTGNVDNQTGFVNIFDLGNVGTVSAKRLFLSKFDSIVYDPAQNRFVFDFDYDNFVTKTCMKKTKWSILAGGEALIFNRKFKYNTYYPETASMITKIMAEKNVSLSDNLAKLAATGELPGDVTTALFDAFRRAISGVISKHEDMPKRYISPVTGEAVIYNDNAAENLTRRFRFNMAELEKDKTAREEWIDNIA

SEQ ID NO: 21 - protein, 1250 aa, unidentified
  REGION 1..1250: note = Description of Unknown: uncultivated organism sequence
  REGION 1..1250: note = Category: MG11 effectors
  REGION 1..1250: note = Description: MG11-23 effector
MAQNRTDAFGAMRNLYPVSKTVALRGIPIAETLKYMTEREIMQKGNTLSENRKLVKQAGDRYIKDFINMSLMHASLKIHSDGSKDSIEELNALLKEKPSKKGDNDERRSKEKEIQAIATKLKNQLAASFKDTAFLKKLGSEAFFKEVLAGADLNEKEAKALEAIKKNTTYMADYQKRRLSLFDPKFTGYSIMTRSIDDNLPIHLRNCEVFRKVAPIIREDLAPIFKEVRLNTSAESLDEVFTPAMFNVLLAQCDIETYNTIIGGKTLSERKMIHGVNACIERYNKTAAQDQKLPSMKKLKKQILSDREPVSWLPEEFKNDNEVVEAVDMLIKNFHMLCKDTPVEAAVREPDTDGIFVNAKNLNSFSNIAYGRFFLAKNAVIDELKHQFPKRPRKSIEKYEKEIEAKFKKQDHFSVAFLDRCIAAYNPTLGRSSADAFGDIIKNKADVETKIADYLQERGTEEVEKIDEALKQKIRLLLNEMMKFHHSVERFLLKDMPTAYDVTFYELVEENEANAESLIKTFNMIRNRMTKKPYNTSKVRLYFDNPTLGAGWAVTKEYTNRILLFKDMENGEDKIYFGIVPTECKNLTRNSKGELKEDILAGDGKQLEKVEITIIPDAAKMLSAMFFSANWARTGSVKASDYVLEIHDKVKASGSAKDLSPEEKVAMIDYYKKCIATVEHWKRFNLKYRPSDEYESVKEFCDSVTEQAVNVSSRPVSEEKVFAAVARGDLYLFQLDNQDMHKKHHGTVGNPTVWLREAISCDPAAAVRLCGNVAVYYRKASLNRKVTHPAGVPMENKNPDNPRKTRTLTYDLIKDKRYTEDNFSFHIPLEVNFRADNRNNKSIVINDLVNRAVKANPDMPVLGINRGERHLIAYAVTAPDGKILEQGNFNVINGYNYRELLATRERERSTNKQNWENIKDIANLKDGYLSLVIGEIARLVQKYNCVVAIENLDDDFINTRQKFERNVYSRFETALEQKFTLLTDKTTSRRSSESLQLAATNKSGSFEVQNGILFRTMPWMISRTDPSTGFISFLKLFHKNNESSQKYLSSFDSFRYNQKEDLFELSFDYKALRVDLQAGERTKWTVCTYGERTECHLDKEHMKLMVTDVHDLTKEMKTLLDGQGIKYASGKDILKDVAEAKNGGFYRDFFTIISRTVCGSSWYEDKKEYRFIGCTRNSEGRFYDTRTCRPDQPCDVDTLAAWNLSRRVHRILDNIRSFDPENPPLDEDGKKLKSPKKGLSRAEWLKIAQK

SEQ ID NO: 22 - protein, 1166 aa, unidentified
  REGION 1..1166: note = Description of Unknown: uncultivated organism sequence
  REGION 1..1166: note = Category: MG11 effectors
  REGION 1..1166: note = Description: MG11-24 effector
MKSIDKYCGEKFGYSVNKTFMFELKPVRETLEYIKQRKIIENDKVRTDKAVLVKDYIDRLHRKFIQNVLTAHCTELKTDDLGKLYSMLQNENSDKSKIKKSIKEIEAAKRKQVSEWFKKDDGYKKLFGKTLFDELIATAETEEERNSINHFKGYLQYFLNYNQVREYVYSDEEKHNTIPFRIINENLKIYFENLNKLEDIGIDTSILYHFPVTDDQIACYNLVIGGNSKEIKGYNQLVNEKKLEVPYLTQLYKNILSETKPLFTTESFKTTEEVKETCKELFESVAGLKNDFRRITSGGDESKIYIHRKNISKFSLIVSGDPLLVKNVLANENIIVTDYVSVGQIKQAFINQKKAGYYENFELNVSKYYTMESVFSDILKNISECDLTKITDLQTDKIQVLPLKDALDKILELFQQVKIVFLDEDFVGKYDAEFYNVLNKVYNALKPVVSVYNKTRNFVTKKLGEQKKLPLNFESSTLLGGWDVNKESASNSVIFYDEKEGKYYLGIFNVENRPSFTAKPGTGFKKMYYKYLPQPNKMIPHVVFSKKGLDTFSPSNEIIEGYKKGLHLKGENFDINFCHKIIDFFKNCIYQYESWKVFDFKFSNTTEYNDLSDFYNEINQQGYNVKLSDVDRDEVYSSVSDGKLYLFEITNRFMSGKSHKRHIPSEIFKSIFDKDSTVQLNGGAEIFYRPEMLKPKITHKKGSFLVNKYTTTGFSVSAEDYKSIYEHLNYNKPLTSSARTLLDTGTVVYKKADYDLIKDRRYSSDKFEFHVPVTINYKYKSSCSVKEFNKSVLNELRENHDINILSVTRGENNLVYAVLQSQEGKILLEKSFNIIGEKTKVNYKDKLHKVELSRNEARKNWQNVQQIKDLKEGFMGNVLNEIVRIMIENNAVLVTEDLSGAFKDSRMKIESNVYKIFETSLVNKLSCLILKNAENEGSIKNPYQLTPPLEGFSKAGSQYGWVFFINPAYISKIVPASTFINIFGLNSVNTFDQKKTFFLKFDSIEYTGDSIFLSYNNGVFVPKFKGKNVIEIKGSRTLWNKETKKYENYNTKDYISEAVVNLGIEEKGNIKPLLEKLQFNIRNNKGLEKLIQAVKIVCEMKTFAVDNYHFVSPTQDDNYDGKDIDFIACVNLAEKFKLAVRNTAEESFVKQPKTEELINTKAQEFK

SEQ ID NO: 23 - protein, 1315 aa, unidentified
  REGION 1..1315: note = Description of Unknown: uncultivated organism sequence
  REGION 1..1315: note = Category: MG11 effectors
  REGION 1..1315: note = Description: MG11-25 effector
MSVFENFVGLYPVSKTLRFELKPELLDGQTIDDFWSVYLNGSEEDDLHKLYMHDDERSKQYPVVKAILDQFHKMFIASALEHFEEGDKGVTWLSLASAYRQDKRSKEFQKLQDEMRKKLRISFEKHEWWSYMKSYSKLIGELIMRMVANNDKFVEAVQESNPELASNPEIRLDRDGMIKALKTFERFSVYFGNYATNRDNMYSEKAQTSSIANRVVNENLPKFLDNIVVYERLKELCPDELKAIEENLSSTLDGFKLDDIFVPDYFNNCLAQVGIEKYNRLLGGNPNEGVLGINSVGNQYLQHHPETSVKLRSLQMTQLFKQILSDRVRLSFLPEQFKSDEELMQSVSDFLEGLESCEVFARIQRTFEILKDESTDLTRIYIQGSNLTKLSTLLYGKWDVLGERLRSTIETGNSKKVRRELDKEIEAWLENKCFSIAQIQAVESELIERSSHSLSVNELFSSLSPWKYDTETHEWSRKPLLKICDDARIVNFKELMRKFKEGCSIRTDAAKEELKYVLDQYIDLFHVVELLRLGNKSAYLEKDDFYVTYEQLFISDDEVILSHIVPLYMKVQSYLTRQLKDEGKILLKFDSPTLADGWDANKEDANNATILLKEGKYYLMIMNPNKKPNLSDGLCDKGDYHKIVYHQIADASKDIQNLMVEKGVTVRKTGRKDSDNINRRLEAEKERLLPKIINEIRIKRSYLRSSEQFNKEDSQTYLAYYMERIVEYKRGEIDFHFKKPEEYECYQDFVDDVSRQKYSLSLVPFSGVIVELWRRQKRIFLFQISNKDFSEKSSGTANLHTLYWNEVFSELNLSDSIFKLNGEAEIFYRKKSDADSFTHKKGSILVNKTFSDGKPIEDKLYGRLLKFFNGTHVELSEEERKLLPMVITKEAKFDIVKDKRYHEHKFFLHVPITINFKASTKSAKQFNEWTLQTLRENRKELNIIGIDRGERNLVYVSVINQRGENLIPPRHFNLIGNYDYLAKLKQTERNRDDARKNWTAMARIKDLKSGYLSQVVHEIAKLAVQYRAIVVLEDLNFGFKRGRFNVERQVYQNFEKMLIQKLNYLAFKTETPSPNCGNIRSGLQLTAPFTSFREMGKQCGWLFYVPAGYTSKIDPATGFVNLFNMNKPAESLRKFFGAFTEISYKDGLFYFTFDYSNEVFNTVKSDYTNRWKLSSHGARIIGKEKELKDLTKEFINFFEKKARIPLDKVSVQTISSLDDANLQQLWGLFKLLLKMRNSNDQFDFIISPVAGEKPFLTGEDNPMQILDADANGAYNIALKGLYWVMNDFPIEDGYLKYIRDTKWFEFVQTKPYLNE

SEQ ID NO: 24 - protein, 998 aa, unidentified
  REGION 1..998: note = Description of Unknown: uncultivated organism sequence
  REGION 1..998: note = Category: MG11 effectors
  REGION 1..998: note = Description: MG11-26 effector
MSIFSGFTRRNNLIKTLQFKLTPMYGTAEQMEKLGVLYSDKERSRCWKILLDVLRRVDAAFIANALCAENSLDWQPLAEALAEGKKERIARQQAAMRKAVAKLLTKHSDYKNLVNPTKAIKLAAAATENAAEADAVTKYARFTTVLVDYFNLKKVFFSSEEKQTTIAYRIAHVNFSLYWQNLSLLKKYRDAGLDFQDKFSFPYTEINGYNQCLVQSQIDAYNRAVGKINMELQTLYRQHKLPQALKGVAVKLRMLHKQVMSGGSDKKVPFDLYTEMQNAVISLQNSLKEIFSLLDEAFGADLELADTYQKLRQQIVDSAKNLLFCEHDEQSIISIKNFLTAVVALRRFIKKTLRDYEQNFESDQEEIFLACSNVWSLLEEVPQLYIRVRGFLTRKPYKTDKIRMFFDCAAFGKGWDVNKESAYLLTLFRREELYYLGIRRQGAKINFADMLANTAEACYEKMVYKSFDFVKGFPGVVFAKSVLQKFVEGAERVVLDGDLYSCPLVVIREDFEQKYFVENGVLHEKEAGEVKYLKEYYAQTGDLAGYKQAVRQRIKLAKQFIAAYKNFAFFDMSQLKSASEYESWTDFLVHVNEFTYGLRWQRISAAAIEKLVAAGDLFFFRLDNQDFALADSKNRAEDEQTLFLREIFSERNARERVLKLLGDVEVYYRPASLAAEVTHRKGSVLVNKKDVHNNLLPRQLHQNICQYLNGEDEKLLPEAEELLAKGMVRYKRADTDIIKDKRFTEAQLSVHFPVSINYRCPNKDYSFNKDFRSMLKNNAAVNILGVHLGGKNLAEAVLIDQKGQILLRKEFNEFNQYNFYQALVLRAEERRQAQQNWLQMEKIKNIRSGFLSALVSEVSKLALAYNAVIVLENFENSRVKKDRGAAFAHTQFAMSLLHKLNYLVLKKREYLEPGGVLNGYQLAPKAESLAGFANQIGCVFLVLPDYDGGEDEKAAYNLALKGLLLLRRIHEAENVDKVDLLITKKNWLEFLREYGSRS

SEQ ID NO: 25 - protein, 1309 aa, unidentified
  REGION 1..1309: note = Description of Unknown: uncultivated organism sequence
  REGION 1..1309: note = Category: MG11 effectors
  REGION 1..1309: note = Description: MG11-27 effector
MKQFTNLYPVSKTLRFELKPELLEGQTIDDFWNSYLNGSGNSELHKLYMHDKERNESYPIMKAILDEFHKRFVASVLDGFELREDCSLTWNELLKEYQNDKKSKIYQKLQGNVRKAIHKAFLEHEWWPYLSSYSKLIGSLMRKLVGEDDDFVESVIENFRDMPLNREKMLKAIDVFDRFSVYFVKYQSNRDNVYSDKAQNTSIANRIVNDNFPKFVDNLIVYQRLKDCCPDELEAIEDNLQDKLKGLALDDVFEISYYNQCLTQNGIEKYNWILGGNPNENVFGLNSVGNQYLQHHPESNLKLRNLQMTPLYKQILSDRVRLSFLPEQFKSDDELMRSVSDFLNGLESQDCFAQIEKTMNSLKERETDLNKIFVQGANLTKLSTLLYGNWSLLGEKLRSTLITGNTKKDKEARNKEIEAWLENKCFSLSQIIAVEEELMEQVAHPLSVIELFTNMTIWKYDVERHEWVKKSLLKQCHDARITEFNTLMNRYKKGMPIKSDAAKETLKSVLDNYMELLHVVELLRLGNKTAYLEKDDFYLPYENLFETDNDNTSILSIVPLYMKVQTYLTRKLKKSEKLLLKFDSPTRANGWNDCSIAIKNGKYYLVLYLQKLLDEEVSKLYSGDSAEIVIYHQQKADFRNAPRLFINSKGDRRSPSVSKYHLPIEMIESLYKEQKGLKTQTEKKLFEERHPDYNEKLIDYYKIGFMHHEDFAAYRHTFESMWKKSSDYDSVQEFFEHTQEMCYMLTLKSIDYDYLYRLQNTGKLLLFRISNKDFNEQAKGTPNMHTLYWNELFSKENLTDVIYKLSSQGIEFFYRNAVSQQSFIHEKGSILVNKTFSDGAPIEDELYRKFLLHFNGKQVELSDDEVVLLPKVVTKKAKFNIVKDKRYHEHKFFLHIPITINFKESGISQKQFNERTLDILRDNKDGLNIIGIDRGERNLIYVSVINQKGENLITPRHFNLIESSTFEGLVRKFDYLAKLKQTEKNRDSARKNWTTMDRIKDLKSGYLSQVVHEIAKLVVQYKAIVVLEDLNFGFKRGRFNVERQVYQNFEKMLIQKLNYLVFKRDAPSSEYGNIRSGLQLTAPFTSFKDLGKQSGWIFYVPAGYTSKIDPVTGFVNLFNMNKPASSLKQFFGAFKNIKYEKGLFYFTFDYSNKDFNTVKIDYKNQWTLSSHGTRIVGKEKEFKDLTTEFVEFFRKVNLPLQQVSVQSILTLDDIQLQKLWGLFKLLLKMRNSNDKTDFIISPVSGECPFITGSDNLLGIEDADANGAYNIALKGLYWVYYGFPKDGDFLKYISDSEWFKFIQTKPYLTD

SEQ ID NO: 26 - protein, 1314 aa, unidentified
  REGION 1..1314: note = Description of Unknown: uncultivated organism sequence
  REGION 1..1314: note = Category: MG11 effectors
  REGION 1..1314: note = Description: MG11-28 effector
MNNLRQFTGIYPVSKTLRFELKPVLLDGQTVNDFWDIYLNGSTDNDLHKLYLHDKRRNDYYPIMKVILDQFHKKFIALALEQFEVGDKGVTWESLALAYQEDKKSKTFQRLQEEMRGKIRKAFTEHEWWSYISSYSKLIGSLIKQKVEDDDDFVESIQESNPKMSLDRDKMLQAIETFNNFSVYFGNYRDNRNNMYSDKDQATSVANRIVNENYPKFLDNIVVYNRLKDTCNNELKAIESNLSKVLNGISLDDVFTPKYYNRCLTQNGIETYNWVLGGSPNEGVLGINSVGNEYLHHHPDSQLKLRSLKMTQLHKQILSDRVRISFLPEQFNSDEELMQNVSAFFEAFESSKLFVHIQETLNILKDSDTDLNKIYVLGKNLSRLSTLLYGKWDVLGEKLRSVMVTGNTQKAQKDKDKEIEAWLENKCFSLAQIKAVENELMELSTRPLSLMELLTNLTIWKYDSENKIWSKKSLPKLCMDARITEFNVLMDKYKQGKLTIKTDAAKEVLKSVLELYMELFHVIELLRLGNKSPYLEKDDFYIPYEHLFESTDDTVLVSHIVPLYMKVQSYLTRKLADQGKMLLKFDSPTRANGWNDCSIAIKDGKYYLLLYLESLTNEEIAALYSGDSADLVIYQQQKTDYRNAPRLFINSKGDNQAPAVSKYHLPIEMVESLYKERKALKTQSAKREFDERHPDYLEKLINYYKIGFLRHEDFQPFQRTFENMWKDSLEYNSVQEFFEHTQELCYLLTFKPIDFDSLLNLQKSKKLLLFSITNKDYKEKAKGTPNMHTLYWEELFSKDNLSNVVYKLSGQGIEIFHREAISPELSFVHKKGSILVNKTFSDGTPIDTELYKKLLRHFNGLDVDLKPEEVNLLPMVRTKKAQFDLMKDKRYYEHKFFLHVPITINFKASATSQKQFNERTLNILRDSKEGLNIIGIDRGERNLIYVSVINQRGENLIAPRHFNLIETRTYDGKERKFDYLTKLKQTEKNRDEARKNWTTQEKIKDLKSGYLSQVVHEIAKLVVRYNAVIVLEDLNFGFKRGRFNVERQVYQNFEKMLIQKLNYLAFKKDAPSMDYGTIQSGLQLTAPFTSFKELGKQSGWLFYVPAGYTSKIDPSTGFVNLFNMNKPADSLREFFGAFDEITYRDGLFYFSFDYSKDVFFKVRTDFKNKWTLASHGERIVGKEKERKDLTAQFVKFFEEEANVPLEKVSVQTVSSLDESQLKTLWGLFKLLLKMRNSNDDTDFIISPVASDHPFITGKDNSMQIADADANGAYCIALKGLYWLYNDFPAEQGYLKYIKDEDWFRFIQTKPYRQD

SEQ ID NO: 27 - protein, 1235 aa, unidentified
  REGION 1..1235: note = Description of Unknown: uncultivated organism sequence
  REGION 1..1235: note = Category: MG11 effectors
  REGION 1..1235: note = Description: MG11-29 effector
MLDKFASLYPVTKTLRFRLLPQGRTEENMQAAKVLENDLERSEAAAVVKGLIKKYHLQFISDTLSGSTLSWQALTETLDKFKADHTATAELDSALAAYRCKLAELFTKSPKYKVMATPVSIIKEILKTETDPENIAALNKLNGYTYIIFDYVSTRMLTYSADAKATSLAYRLVDENYLRFYQDISAAAEISAVLEEAGFDNAEVEAFIRTDYNTCLTSEGIASFNAAAGSINQFVNVLLQQNPVLQSEPALRRHLQPLYKMLLDEAESKIIKFEDYGQLRDAVENFRRNFQDLPQSLIDIFAGRYDYSKIYVGYKYLNEASSQIAGGYNWKLLENALEDFYSKPYLVNGKMPVKYKTVVNKKMNQLAYSFTELQEALDAGDSGSSITDLFGKYAELHAAYAAADGNVFYKEYDRKSIASLKNYLDAVNAIARFIKIFAVPEVYVKDEGFYGIVDGAADKLRDFDLLYNMVRNYITKKPYKKTKVALTFNSSSFGRGWDENKIYDELTTIFTYNGKYYLGVINKNDKPDLAAAVSKDEGGYKRMVYKTFDIVKQLPRLSFTKAVKTHFAESDEDFIFDGPKFAKPLRVPKEIYLQSFTDNGDKLPDSAKKYTKAYLDMSGDYKGYYEAIVKRIDYTKKFLSAYKSTSIYDLAFLKPADQYEQWSNFTDDVQTALYKIRWDNIPAAAIDEMVESGKLYLFEIYSADLYKNPAEGRKIDTQAQIFKEIFSENGQKVIKLLGNCEVYFRPASLPAVVTHPKGSILVHKQLVNGKTLPDEVYREIYRYLNKKSENLSPLAKQLLDKELVKYRVAQEDIIKDKRFTENQYSFHLPVTLNYKVKQQFYINMEVMNMLRSRKDINILGINRGTRNLLYVTVINQQGEILYSRSLNEFNGVDYRDKLLVKERGIKDAAMNWQAADSIKNIKEGYLSRALGEIVRLMVKFNAICVVENLSSNFRNAGGGIFAYGNFYKGFETNLIKKLNCLIIKDAEKDKAGSVLRSLQMTRSFESFEKAGRQSGWLFMLDPAYISAVDPLTGFVNLFSFRNLKTIRQKAEFLQKFKSINYVPETKAFDFVFDYKDFGVTACGPVSCWVATSDVERIVKTTENGKVKFESVLPSMQLAKLFTDKDIDFTDGHNLISEITADSRLVTETLSIFMNIMRLYNYDIDRNNDYVSSPVMGRFDTRYDKKLHNPDELAAYNMARKGLMIIKRAQASEKDSKVDLFIKNADWFSFLQTGSI

SEQ ID NO: 28 - protein, 167 aa, unidentified
  REGION 1..167: note = Description of Unknown: uncultivated organism sequence
  REGION 1..167: note = Category: MG11 effectors
  REGION 1..167: note = Description: MG11-30 effector
MPLNKFVLTSKGKKWINVNNNGQWETIPTEPTKDLLKLFENRIDINGDIRAQITENKMSSEFYYDLTHIFKNVVQLRNSKIGDASVDYILSPYLLEDGTTFNSLDIQEQVQNGKNVMLPIDADANGAYHIALKGLMALETITEDGKIKISNKNTDWFEFIQKKKYRN

SEQ ID NO: 29 - protein, 496 aa, unidentified
  REGION 1..496: note = Description of Unknown: uncultivated organism sequence
  REGION 1..496: note = Category: MG11 effectors
  REGION 1..496: note = Description: MG11-31 effector
MKNNQFNENFREFTNQYSLTKTIRMELVPYNNDAKKLIHDYKSGCENGISKGKKFANNYVIVKKILDDYYRSQINEKLSVINLNDDKKIENAFDLFVNNKNDKNNKQFENSLKSLRIIIASALKPIKEIKYEKLINLYEVKGEKTCELIEFIKQNETLSEPDKEKYINAVSLFNSFVGYFSGYKENRNNMFSEKAEITAISNRLINENMLLYFENCLKLEKIKNNAEELHDELCEILKEFVLPKNYSMLLTQDKIEEYNKLIGHDASDKFAKGCNQLINEYRLKYPEKKKVIPFLNQLYNQILFRDIKTQNGIEKISTDKELFEIINVYIQNTLDDYLKTADNLFYDKTLFSDIYFLSNKFSSLSTILFESKNKSYSILKRKLAESNFDISKPVKINDIENNFKIDVYKILKCKYDQMNLEIKKNIERIKPILMLEKLNDDKSVPKIDNGNDKGGIGFQQIAIIQSLFNSIIELNRFMQLFSLELNGQKIEIENKN

SEQ ID NO: 30 - protein, 1282 aa, unidentified
  REGION 1..1282: note = Description of Unknown: uncultivated organism sequence
  REGION 1..1282: note = Category: MG11 effectors
  REGION 1..1282: note = Description: MG11-32 effector
MKDLNQFIGKYKVEKTLRFELAPIGKTEAWMESKGVIANDKRRADNYTIVKSLIDRYHKVCIRESLTGCNLNWTRLSEAVETYRRCQDTESRKALLKCQDEYRTEIAKKFLSFEDFAELTAPSPSALIKDTLPHHVTNKVHPEFSDIDDVDNAKQALSLFEGFAMYFESYQKNRSNLYTAKNIASSVAHRIVNDNFSKFLANIKVFENLRVIYPEIIEQCTNELRQLLKGKQLEEVFRVESFNNVLTQEGIDFYNTIIGGVSVQEGEKKFQGINELVNLTLHKEDQGRGKRTALTMVPLFKQILSDRNTYSYIPERINDEEELISVLRAFHAHLASFYLNGKEVNVMEELLKIVENINHFDPNGIFVDAKKLNGISKKLYDGLFELRTKMTSHLEEQKQTKKNIEKFFQKDAFSITELSLDKKHSLVKYFTGLKDVLKAIDQKWEQFETRNNKDGQKKYKDCHTGIELIKNLLDGYKEFFAVCSVLDVDSENALDNNFYGIFTPLLTELRGIIPLYNQVRNFLSQKPSDEKKYLLKFDNSKCSDGWDAPQTKSVRIFRGQGKFLLGVTDSENRSCLNDLSSYTPISPDDQIVFLDYSQGGHMGQNLLTLVVREGKTVMVKGRKENGENLGLERQLKELLPPDIYRIRKSQSYKNESPNFSKEDLLLFVDYYKQRAKEYYSHFSFTFKDSCYYASFTELVEDIDEKAYQIKFVPTSYKNLLRLVNEGKLYLFDIKNKDYEPGAHGKKNLHTLYWEQLFCQENLENLTIKLNAKSTLFCRPQIVANPKTHKKGSMLLNRKDKNGQPIPESIYQQLYKYVNGKIAEAKMSDEAKGYLDKIAVKEAQYAITKDKRYTKQKYFIHFSTTLNANAPKTTDINKEVLDYIKDNPDVNIIGIDRGERNLLYVTLINQKGEILDQKSLNIINGFDYHAKLEQREKERDEAQRSWQSVGNITDLKEGYLSAAIHEITTMMIENNAIIVLEDLNRGFKRGRFKFEKQVYQMFEKKLIEKLNYLCSKDIKPTANGSVLRGYQLTEKFVSFEKMTKQNGILFYVRPDYTSAIDPVTGFVTHFNFKDITNTKGRKDFFENMESITYKNGYFEFTFDYRKYKPKVKDFKNIWTVCSSGKRVLWSKETKEYTDYYPTTAISGAFASRGITLDEGADVKALLSGIDDSISNADFYRILFEAFKRIVQLRNTNSNTGEDYIHSPAIQDGKQYCSLDELRKWKDNGESSIPSLPIDADANGAYHIALKGLYLMLNLQAKQIENEKWFRFVVEKPFKEEKVM

SEQ ID NO: 31 - protein, 1308 aa, unidentified
  REGION 1..1308: note = Description of Unknown: uncultivated organism sequence
  REGION 1..1308: note = Category: MG11 effectors
  REGION 1..1308: note = Description: MG11-33 effector
MKDLNQFIGLYPVSKTLRFELKPVLQEGQTIDDFWNVYLNGPEKDVLHTLYTHDKERNDNYPIMKALLDQFHKNFIASALEDFEDGNGNVTWQKLEMEYQKNKKSKDYQDLQKKMRNKIREAFKKHELWPCISSYSTLISKQLKQMVKENEDGFVEAVQESHPKMELDRDKMLKAIETFNRFSVYFGNYQDNRNNMYSEEAQSTSIANRIVNENLPKFLDNIIVYQRLKDNCPNELKEIETNLSTTLNGLSLDDIFVPEYYNNCLTQNGIEKYNWILGGNPNEGVLGINSIGNDYLQHNPDSNLKLRNLEMTKLYKQILSDRERIAFLPEQFANDDELMQSINDFLDAFDSMNIFSCIQETMKILKDSNTNLEKIYVQGSKLTKLSTLLYGKWDVLGEKLRSTTVTGNTKKAQKEREEEIEKWLESKCFSLAEIKAVEDELMAQSAHPLSLMELLTDLTLWKYDQENNIWSKKSLIKLCEDSRITEFNVLMNDYQQGSISIKKDEAKEILKSVLDHYMELLHVLELLRLGKKSEYVEKDDFYTPYESLFEADDDKITISHIIPLYMKVQGYLTRKLTDQGKILLKFDSPTLANGWDDCSIVIKDNKYYLMMYLERLDDKETRALYAGNSADLVIYQQQKTDFRNAPRLFINSKGENRSPAVSKYNLPIEMVESLYKERKSLSSQAAKKAFDEQHPDYNTKLIDYYKIGFLRHDDFAPFRHTFESMWKSSSEYGSIQEFFEHTQEMCYMLSFKPIAFDYLCHLQKDGKVLLFNITNKDFNDGAKGTPNIHTLYWKELFSKDNLSNIVYKLSSQGIEFFYRKAIEKETAFVHKKGSVLVNKTFSDGTPIAGELYKKFVKHFNGSEVNLTQEEIVLLPMVKTKTAKFNITKDKRYYEHKFFLHVPITINFKASETTQKQFNERTLDIFRRNKQDLNIIGIDRGERNLVYVSVINQRGENLIPPRSYNLIGNYNYLAKLKQTEKNRDEARKNWTTIERIKDLKTGYLSQVVHEIAKLMVQYNAIVVLEDLNIGFKRGRFNVERQVYQNFEKMLIQKLNYLAFKKEMPSQECGNIRSGLQLTAPFTSFKDLGKQCGWLFYVPAGYTSKIDPSTGFVNLFNMNKPSTSLQEFFGAFDEIAYRNGLFYFTFDYSKEEFNTVKTDYTNRWTLSSHGNRIIGKEKELKDLTTKFREFFEKEVNMPLAEVSVQKVSSLEENKLQELWGLFKLLLKMRNSNDEYDYIISPVASETPFITGKDNRMQITDADANGAYNIALKGLYWLWNDFPTAEKGYLSYIKDEEWFRFIQTKPYLRDA

SEQ ID NO: 32 - protein, 1298 aa, unidentified
  REGION 1..1298: note = Description of Unknown: uncultivated organism sequence
  REGION 1..1298: note = Category: MG11 effectors
  REGION 1..1298: note = Description: MG11-34 effector
MRFSTNLDPNFSKMFEVKKTIRMELVPYNEDAKHLIHDYKSGLKNGISKGKKFADNYLLVKKVLDEWYRREINKKLLNINLNDDKKIENAFDLFVNNKIEKNEKQLEKALKTLRREIALLLKPIKDEKYDKLINLHNDGDSKTCELIKVIKKNENFSDVEKENYINAVKLFDAFAGYFSGYKENRNNMFSEKAEITAISNRLINENMILYFENCLKIEKIKNNAEELYDELCKILKEFVLPMNYSMLLTQDKIEKYNKLIGHEASDKFAKGCNQLINEYRLKYPEKKKVIPFLNQLYNQILFRDIETQNGIEKISTDKELFEIINVYIQNTLDDYLKTADNLFYDKTLFSDIYFLSNKFSSLSTILFEPENKSYSILKRKLAESNFDISKPVNINDIENNFKIDVYKILKCKYDQINLEIKKNVERIKPILLLEKLNDDKSVPKIDNGNDKGGIGFQQIAIIQNLFNSIIELNRFMQLFSLELNGQKIEIENKNLDFYYQYEKICELNKDFTIYLKTKDYLTKKPYSNDKIRLFFDNNSYFLNGFVESKTDTSDHGTQYGGYLFRKRNSFGEYDYFLGCSKNTKLFREHLASSISEEDRSEFERFYYYQLKTQTIYNNYKNQNGESYEIDKQKLKDAILDATKECGLPFSYEREDTPTNYLKKIEDENPSLFKLVISNENVMQLQLSIIKNLKTVFGKYVSKVPALKDVIDREYKLLKDFNDDIQTVSSNKIIYYAPVNQKELEDLQNQKEHLKKDAKFYLFKIENKDLRDKSKRINKIGTDNLHTMYFKALMSENQYTFDIGAGMVFFREQNYTGKKIIHEKNKPIKNKTYRYTKKESVFEYDIIKDKRYFEDKFFLHLSLSINYTKSSLKISDLNSKVNKFLYKNRNEITIMGIDRGERNLIYLTIIDLKGNIILQKSMNELIYNVKTDGTEFQVQKNYHTMLNNRVKERDLAKKSWGVIDSIKELKEGYLSQVVHEIILLMMRYNSIIVMEDLNPNFKHSRISIDSQIYQKFEKALIDKLGYLVLKRDEVIDGEIIEKGNVLNGFQLACPVPAIKDMKNQNGFIFYVWPQYTSKIDPISGFVSMFDTSEKNIDGYIAFFKKFSAIKYNGQDFEFYIDDYQLFFDKKNKMPLNKFVLTSKGTRWVNVKNNGKWESIPTEPTKDLLKLFENRIDINGDIRTQITENKMSSEFYYDLTLIFKNVVQLRNSKTGDASVDYILSPYLLENGTTFNSLEIQEQVQNGKNVMLPIDADANGAYHIALKGLMALETITEDGKIKISNKNTDWFEFIQKKKYKN

SEQ ID NO: 33 - protein, 1304 aa, unidentified
  REGION 1..1304: note = Description of Unknown: uncultivated organism sequence
  REGION 1..1304: note = Category: MG11 effectors
  REGION 1..1304: note = Description: MG11-35 effector
MARIIDEFCGQENFNDFVGLFSLTKTIRMELVPYNENAKHLVCDIQTDSDNAIERARTFANNYVIVKKILDNYYRQEINNKLLNYNLNVDNKIGKAFDLFLANKTTKETKLFDTILKDLRGQVVNELKSIKEIKYDNLINLHDVNGEKTCLLIELIKKDKSLSESEKEKKINAIKTFDKFAGFFSGYKENRNNMFSDKTEMTAIANRLINENMIFYFENCFKLEKIKNYALDLYNALCEILHDFVCPTNYGKLITQDAIEGYNTLIGHSFADKYSKGCNQIINEYRINHPDLKKHIPFLNRIYNQILFRDKKIENNSNEIITDKELFERIDSYTRYSLSDYLQSVDSLFNDRDLFSEIYFLPNKLNILSQILFEKERNSFSILKKKLAEKNIDSSIPVTLENISLVCSLDVYEILKCKYDQISSAIKTNLEHLKPILLLDKLNDDRSVPKLGAEYDKGGLGFQQIGIIQHFFNSVIELNRFVQLFSLELNGKEVEIENKNFDFYHRYCLINEFKDDFSIYLKVKDYLTRKPYSNDKVRVYFENNSYFLNGFVESRTEKSDHGTQYGGYLFRKLNSSGDYDYFLGCSKNAKLFREHLASSVSENDKSTYERFYYYQLKTQTIYYNYRNEQGETYEIEKQKLKDVILQATKENGRLFEYDDKDTPTNYLNKIERENQSLYKAIIENENVKQLQLSIIKNLKFAFEKYVSKVPALKDILDKDYQFLKDFNDDIQEVSNNKIIYYAPVSQQEWESVLNFTEDSSDKGKFYLFKIQNKDLKDKSNRKNKSGIDNLHTLYFKTLMSEHQHTFDIGAGMVFFREKNYRGKKIIHQRNKPIQNKTPNYSKLESLFEYDIVKDKRYFENKFFLHLSMMINYSKSSLRMADLNTKVNKFIYNNKDSINIMGIDRGERNLIYITIIDQKGNILLQKTMNNLTYMVKNAEADFFVNKDYHKLLSNRVKERDVAKKNWGTIDSIKELKEGYLSQVVHEIVLLMMRYNAIIVMEDLNPNFKRSRINIESQIYQKFEKALTDKLNYLVLKKDEVIDGKKIVKGDVQNGLQLTCPVPAIKDMKNQNGFIFYVWPQYTSQIDPITGFVSLFDTRAKNIEGYLSFFKKFSAIRFNGEDFEFTVDNYQQFCNQKDVMPFNSFVITSRGVRLIKVKKGSRWETITVEPTKQLYQLFENKIDIYGDIRAQITDVNMSSDFYYELMLIFKSIVQLRSSKSGDSSIDYILSPILLDDGTTFDSYQQKILEENGERALLPIDADANGAYHIALKGLMALDTITSDGKIKISNKNSDWFMFIQKKDYKK

SEQ ID NO: 34 - protein, 1302 aa, unidentified
  REGION 1..1302: note = Description of Unknown: uncultivated organism sequence
  REGION 1..1302: note = Category: MG11 effectors
  REGION 1..1302: note = Description: MG11-36 effector
MRNVENFTGLYQISKTLRFELKPMLKSGETTEDFWNRYINGNEDDRLHKLYMSDDGRHEKYPLMKAMLDQWHKIFISRVLSQFSETVVTWQQIAEAYINKSDDYKTLQEEMRKSIRKSFESHVWWKYMSAEFKNLISEQIRYMVENNENNFIETVQNSNPKMNATREDMLEAIDSFANFSAFFDIYKDNRMNMYSHEDKTTSIANRVVNENFPKFLDNIKVYEKLKEICPDELKIAENSLQAQLNGKTLDDVFKPEYYNNCISQQGIEVYNWIIGGNPNENVIGINSIGNEYIQSHPDTNYKLRNLKMTQLFKQILSDRVRLSFIPEQFGSDDELMQSISSFLDEVESSKLMTRIKETMGSLLDGTVNLEKVYIQGTNLTKLSAMMYGGSNWNALGEKLRAMTVNSKTKKGQAEIDEKIDSWLAKKCFSVAQTQKASYEISKEIQSSVTLLDVLGRLVAHKCDSETKTWSDKSYIDICNNARIIQFKELMNGYKSGNVSIKDDSAKEIIKTVLDNYIELFNVVNLLRLNKKMDSLDKDDFYVAYNALFESEDELTITQIIPLYNKVRNYLTRKLSNGGKIELKFDSPTRANGWNDCSIIIKDGKYYLAMYIDKISNVDTERLYAGNTASLVESKQQKTDFKNLSRLFFYSKGTKLAPAVTEYNLPIETISDMYNEKRGISGAAKLKEFNKKYPDFTRKMIDYLKVGLSKHSSFSMFSENFRSLWKDSSEYKSIKEFCDHTQTICYAVSLRPISFEYLYTLQNENKMLLFNITNKDFNSGSYGTPNLHTLYWKELFSEENMKNPVYKLSSQGVKFFFREAITEEKPYKHRKGSTLVNKTFADGTPIEGTLYKRLMLFLNGADIQLTDKEKELLPKLKTRKAKHEIVKNRRYYENKFFFHVPIVINYNVAAETPSLYQFNKSVLDNFRANKRDINIIGIDRGENNLIYVSVIDQHGKNIITPRSYNLIGNYNYMEKMKQVEKNRDEARKNWTTIEKIKDLKNGYLSQVVHEISSLIFRYNAIVIMENLDSEFKRGRYKIERQVYQNFEKMLMDKLNYLVFKRNANETCGTVRDGLQLTAPANFNELGKQNGWIFYVPAAYTSMMDPSTGFVNLFNMKKPAESLQKFFGSFNEITYKNSMFYFTFDYRNFKTIRNDYTNVWTLSSHGMRNYGKNKRLEVLTGLFCNFFDKVGIQYTDVSVKTVSELDESKLVELWNIFKCMLKMRNYNGDNVGFDISPVASENPFITGTNNSMGIMDADANDAYNIAIKGLYWLHNDFPVNDKGYLEYIKDEDWFKFVQSKPYSK

SEQ ID NO: 35 - protein, 1235 aa, unidentified
  REGION 1..1235: note = Description of Unknown: uncultivated organism sequence
  REGION 1..1235: note = Category: MG11 effectors
  REGION 1..1235: note = Description: MG11-37 effector
MLDKFASLYPVTKTLRFRLLPQGRTEENMQAAKVLENDLERSEAAAVVKGLIKKYHLQFISDTLSGSTLSWQALTETLDKFKADHTATAELDSALAAYRCKLAELFTKSPKYKVMATPVSIIKEILKTETDPENIAALNKLNGYTYIIFDYVSTRMLTYSADAKATSLAYRLVDENYLRFYQDISAAAEISAVLEEAGLDNAEVEAFIRTDYNTCLTSEGIASFNAAAGSINQFVNQLLQQNPVLQSEPSLRRHLQPLYKMLLDEAESKIIKFEDYGQLRDAVENFRRNFQDLPQSLIDIFAGRYDYSKIYVGYKYLNEASSQIAGGYNWKLLENALEDFYSKPYLVNGKLPVKYKTVVNKKMNQLAYSFTELQEALDAGESGSSITDLFGKYAELHAAYAAADGNVFYKEYDRKSIASLKNYLDAVNAIARFIKIFAVPEVYVKDEGFYGIVDGAADKLRDFDLLYNMVRNYITKKPYKKSKVALTFNSSSFGRGWDENKIYDELTTIFTYNGKYYLGVINKNDKPDLAAAVSKDEGGYKRMVYKTFDIVKQLPRLSFTKAVKAHFEESDEDYIFDGPKFAKPLRVPKEIYLQSFTDNGDKLADSTKKYTKAYLDMSGDYKGYYEAIVKRIDYTKEFLSAYKSTSIYDLAFLKPADQYEQWSNFTDDVQTALYKIRWDTIPAAAIDEMVESGKLYLFEIYSADLYKNPAEGRKIDTQAQIFKEIFSENGQKVIKLLGNCEVYFRPASLPAVVTHPKGSILVNKQLVNGKTLPDEVYREIYRYLNKKSENLSPLAKQLLDKELVKYRVAQEDIIKDKRFTENQYSFHLPVTLNYKVKQQFYINMEVMNMLRSRKDINILGINRGTRNLLYVTVINQQGEILYSRSLNEFNGVDYRDKLLVKERGIKDAAMNWQAADSIKNIKEGYLSRALGEIVRLMVKFNAICVVENLSSNFRNAGGGIFAYGNFYKGFETNLIKKLNCLIIKDAEKDKAGSVLRSLQMTRSFESFEKAGRQSGWLFMLDPAYISAVDPLTGFVNLFSFRNLKTIRQKAEFLQKFKSINYVPETKAFDFVFDYKDFGVTACGPVSCWVATSDVERIVKTTENGKVKFESVLPSMQLAKLFTDKDIDFTDGHNLISEITADSRLVTETLSIFMNIMRLYNYDIDRNNDYVSSPVMGRFDTRYDKKLHNPDELAAYNMARKGLMIIKRAQASEKDSKVDLFIKNADWFSFLQTGSI

SEQ ID NO: 36 - protein, 844 aa, unidentified
  REGION 1..844: note = Description of Unknown: uncultivated organism sequence
  REGION 1..844: note = Category: MG11 effectors
  REGION 1..844: note = Description: MG11-38 effector
KYAELHAAYAAADSNIFYKEYDRKSIASLKNYLDAVNAIARFIKIFAVPEVYVKDEGFYGIVDGAADKLRDFDLLYNMVRNYITKKPYKKSKVALTFNSSSFGRGWDENKIYDELTTIFTYNGKYYLGVINKNDKPDLAAAVSKDEGGYKRMVYKTFDIVKQLPRLSFTKAVKAHFEESDEDYIFDGPKFAKPLRVPKEIYLQSFTDNGDKLADSAKKYTKAYLDMSGDYKGYYEAIVKRIDYTKEFLSAYKSTSIYDLAFLKPADQYEQWSNFTDDVQTALYKIRWDNIPAAAIDEMVESGKLYLFEIYSADLYKNPAEGRKIDTQAQIFKEIFSENGQKVIKLLGNCEVYFRPASLPAVVTHPKGSILVNKQLVNGKTLPDEVYREIYRYLNKKSENLSPLAKQLLDKELVKYRVAQEDIIKDKRFTENQYSFHLPVTLNYKVKQQFYINMEVMNMLRSRKDINILGINRGTRNLLYVTVINQQGEILYSRSLNEFNGVDYRDKLLVKERGIKDAAMNWQAADSIKNIKEGYLSRALGEIVRLMVKFNAICVVENLSSNFRNAGGGIFAYGNFYKGFETNLIKKLNCLIIKDAEKDKAGSVLRSLQMTRSFESFEKAGRQSGWLFMLDPAYISAVDPLTGFVNLFSFRNLKTIRQKAEFLQKFKSINYVPETKAFDFVFDYKDFGLTACGPVSCWVVTSDVERIVKTTENGKVKFESVLPSMQLAKLFTDKDIDFTDGHNLISEITADSRLVTETLSIFMNIMRLYNYDIDRNNDYVSSPVMGRFDTRYDKKLHNPDELAAYNMARKGLMIIKRAQASEKDSKVDLFIKNADWFSFLQTGSI

SEQ ID NO: 37 - protein, 391 aa, unidentified
  REGION 1..391: note = Description of Unknown: uncultivated organism sequence
  REGION 1..391: note = Category: MG11 effectors
  REGION 1..391: note = Description: MG11-39 effector
MLDKFASLYPVTKTLRFRLLPQGRTEENMQAAKVLENDLERSEAAAVVKGLIKKYHLQFISDTLSGSTLSWQALTETLDKFKADHTATAELDGALAAYRCKLAELFTKSPKYKVMATPVSIIKEILKTETDPENIAALNKLNGYTYIIFDYVSTRMLTYSANAKATSLAYRLVDENYLRFYQDISAAAEISAVLEEAGFDNAEVEAFIRTDYNTCLTSEGIASFNAAAGSINQFVNVLLQQNPVLQSEPALRRHLQPLYKMLLDEAESKIIKFEDYGQLRDAVENFRRNFQDLPQSLIDIFAGRYDYSKIYVGYKYLNEASSQIAGGYNWKLLENALEDFYSKPYLVNGKMPVKYKTVVNKKMNQLAYSFTELQEALDAGESGSSITDLFG

SEQ ID NO: 38 - protein, 798 aa, unidentified
  REGION 1..798: note = Description of Unknown: uncultivated organism sequence
  REGION 1..798: note = Category: MG13 effectors
  REGION 1..798: note = Description: MG13-2 effector
FESDEDVLVAIEKAYVELYERVLCNERSLKELLCHLSDYDLNNIYVCNDLQLTDISQRLFGGWEVIQKAMIEELKRTVPRKSKSEKDEAYEERIQKMYKTFKSISIAQINHCLTSCKENDVQTIEGYFSNLGAIHTDTIQRENLFVRIENAYTDVKELLNTPYPKEKLLAQDKYNVEKIKTLLDSIKDLQHFVKPLLGKGDEAEKDEKFYGELVALWEELDKITPLYNMVRNYVTKKPYSIKKIKLNFENSTLMNGWDVNKERDNTTVILRKDGLYYLAIMNKKYNRVFDVDVMEMHGDCYEKMEYKLLPGANKMLPKVFFSKSRIDEFQPSEVLLENYKKETHKKGENFKLSDCHALIDFFKSSIEKHEDWNKFGFKFSDTCTYQDLSGFYREVEQQGYKISFRNVSVDYINSLVDEGKIYLFQIYNKDFSPYSKGTPNLHTLYWKMLFDERNLTDVVYKLNGEAEVFYRESSIHVEKPTHPANQSIKNKNELNEKKHSVFPYDLIKHRRYTVDKFQFHVPITMNFKGMGQENINHSVNEYIRESEDLHIIGIDRGERHLLYLTLIDMKGNIKEQYSLNEIVNEYKGNTYRVDYHDLLEKREKERMEARQSWQTIENIKELKEGYLSQVIHKISQLMVKYHAIVVLEDLNTGFMRGRQKIEKQVYQKFEKMLIDKLNYLADKQKSPEELGGILNAYQLTSKFVSFQKLGKQSGFLFYTPAWNTSKIDPVTGFVNLFDTRYETREKSRAFFGKFDFICYNADKDWFEFTFDYGKFTSKAEGTRTRWTLCTQGMRIETY

SEQ ID NO: 39 - protein, 1256 aa, unidentified
  REGION 1..1256: note = Description of Unknown: uncultivated organism sequence
  REGION 1..1256: note = Category: MG13 effectors
  REGION 1..1256: note = Description: MG13-3 effector
MEFKDFTNQYKMNKTLRFELKPVGHTLELIRQNAIISSDEGLAEAYQKVKKIIDEYHRYYIETQLANLQLQCEEQTDAKGKGKCNSLAEYYALRGDESDSGKKNFKKVKELLRKQVSDCLQKSAEYKTIFKKELIQVDLINFVNGLDISEEEKSKRRKLIEAFNNFTSYFVGFHQNRENMYTFEEKSTSIAYRLINENLPKFIDNISVFVKISEVPELKDKISQLTEDFSSYLGGVSVENVFKLEYFNKVVTQRQIEVYNALIGGRSEGDTKIQGLNEYINLYNQKHPEAKLPRFKVLYKQILSDREPISWLPEQFKRDGDLLDAVREYHEEMQLVAENIMVLLSDIKNYNLDGIFVSNDTQLTSISKALDENGNWGRIQRDFIEYFKSQNKKKKNEGDEKYYERMKDLYDANKSFSISEINSVAGLNVEEYFANMEVRDYTDDTARKKINVFDAISDAYSDVEYLLTSEYPKEKHLISEENDIESIKCLLDTWKSLQHFVKPLLGTGDEPAKDNAFYGEFNEYWDKLNKLNALYNKVRNYLTRKPYSDEKIKLNFRSAQLLGGWDQNKETDCLSVLFMKDGKYYLGIMNKRVKEDLDYNENKGNNKIFATKLSSTGDCYQKMVYKLLPGANKMLPKVFFSESRINEFAPSAKILHIREIGSYKSGDTFNLDDCHALIDFYKESLQKHEDWSKFNFEFPDTSEYSNINEFFEDVERQGYKVEFQPISVKVIDKFVNEGKLYLFEIYNKDFSEHSKGTPNLHTIYWKMLFDERNLKDVVYQLNGQAEVFFRKKSLDNKFPTHPAGTPIKNKNKQNPKKESVFEIDLIKNKRYTEDKFLFHVPITMNFKSGKIGSLNSKVLEYIKEADDLHIIGIDRGERNLLYVVVIDKNGNICEQVSLNQIGNVNYHNLIDEREGNRQKQRENWKTIEGIKDLKQGYLSQAVRIIADLMVKYKAIVVLENLNLGFMRGRQKVEKSVYQQFEKMLIEKLNYLVDKKAAPNLPGGALKAYQLANKFESFRAIGRQCGFLFYIPAWNTSKIDPATGFVNMLNPRYESIEKSKDYIGKFDAIRYNADKDYFEFDIDYSEFTVRAEGTKLKWPLCSYGTRIENYVDSQSGKWASRTVILTDEFKRAFKDLDINGDLKGQILSQSEKSFFEDLFRVLRLLVQLRNSEIQEHGESVKEPEDYILSPVANSEGVFFDSRKADDSMPKDADANGAYNIARKGLMIVNQVKQEKDLDKFKSDLTNKNWLNFAQEGK

SEQ ID NO: 40 - protein, 1256 aa, unidentified
  REGION 1..1256: note = Description of Unknown: uncultivated organism sequence
  REGION 1..1256: note = Category: MG13 effectors
  REGION 1..1256: note = Description: MG13-4 effector
MEFKDFTNQYKMNKTLRFELKPVGHTLELIRQNAIISSDEGLAEAYQKVKKIIDEYHRYYIETQLANLQLQCEEQTDAKGKGKCNSLAEYYALRGDESDSGKKNFKKVKELLRKQVSDCLQKSAEYKTIFKKELIQVDLINFVNGLDISEEEKSKRRKLIEAFNNFTSYFVGFHQNRENMYTFEEKSTSIAYRLINENLPKFIDNISVFVKISEVPELKDKISQLTEDFSSYLGGVSVENVFKLEYFNKVVTQRQIEVYNALIGGRSEGDTKIQGLNEYINLYNQKHPEAKLPRFKVLYKQILSDREPISWLPEQFKRDGDLLDAVREYHEEMQLVAENIMVLLSDIKNYNLDGIFVSNDTQLTSISKALDENGNWGRIQRDFIEYFKSQNKKKKNEGDEKYYERMKDLYDANKSFSISEINSVAGLNVEEYFANMEVRDYTDDTARKKINVFDAISDAYSDVEYLLTSEYPKEKHLISEENDIESIKCLLDTWKSLQHFVKPLLGTGDEPAKDNAFYGEFNEYWDKLNKLNALYNKVRNYLTRKPYSDEKIKLNFRSAQLLGGWDQNKETDCLSVLFMKDGKYYLGIMNKRVKEDLDYNENKGNNKIFATKLSSTGDCYQKMVYKLLPGANKMLPKVFFSESRINEFAPSAKILHIREIGSYKSGDTFNLDDCHALIDFYKESLQKHEDWSKFNFEFPDTSEYSNINEFFEDVERQGYKVEFQPISVKVIDKFVNEGKLYLFEIYNKDFSEHSKGTPNLHTIYWKMLFDERNLKDVVYQLNGQAEVFFRKKSLDNKFPTHPAGTPIKNKNKQNPKKESVFEIDLIKNKRYTEDKFLFHVPITMNFKSGKIGSLNSKVLEYIKEADDLHIIGIDRGERNLLYVVVIDKNGNICEQVSLNQIGNVNYHNLIDEREGNRQKQRENWKTIEGIKDLKQGYLSQAVRIIADLMVKYKAIVVLENLNLGFMRGRQKVEKSVYQQFEKMLIEKLNYLVDKKAAPNLPGGALKAYQLANKFESFRAIGRQCGFLFYIPAWNTSKIDPATGFVNMLNPRYESIEKSKDYIGKFDAIRYNADKDYFEFDIDYSEFTVRAEGTKLKWTLCSYGTRIENYVDSQSGKWASRTVILTDEFKRAFKDLDINGDLKGQILSQSEKSFFEDLFRVLRLLVQLRNSEIQEHGESVKEPEDYILSPVANSEGVFFDSRKADDSMPKDADANGAYNIARKGLMIVNQVKQEKDLDKFKSDLTNKNWLNFAQEGK

SEQ ID NO: 41 - protein, 1255 aa, unidentified
  REGION 1..1255: note = Description of Unknown: uncultivated organism sequence
  REGION 1..1255: note = Category: MG13 effectors
  REGION 1..1255: note = Description: MG13-6 effector
MNDFIRLYPLSKTLRFKLIPLRKTLEYIVSNGLLEQDRHRAESYVRVKDIIDNYHKAFIERVLSTFKLQYADRQSKDSLEEYYTYYMVGNKTEEQLKVFSEIQEKLRKQIAGCLVSDPVFKRIDKKELIKEDLVDFVSTEEERQLIAEFKDYTTYFTGFHENRRNMYSSEAQSTAIAYRLIHENLPKFIDNLQVFSKMAATSVAEKLPQLYADFEEYLNVAEINDMFRLDYFNVLLTQTQIDVYNAIIGGKALEDGTRIQGLNEYINLYNQQQKDKHVRLPKFKLLYKQILSDRNAISWLPDEFVSDNETLEAIERCYEDLESQILNRKVEGEHSLKTLLEGLEEYDLAKIYVRNDLQLTDISQKIFGDWSVVQRTYIDTFKNENPLTKKETMDKYEERIEKYWKGLKMLSIADIDARLILSGKDKTQTFACYFRRLGKDVKNDVEQNVFERIEIAYLNVKDLLNTPYPAHKNLAQDKESVEKIKLFLDAVKDLQYFVKPLLEKGLEVEKDERFYGEFIPLWEELDKITPLYNKVRNYLTRKPYSTQKIKLNFENSTLMDGWDENKERDNCTVILRKDGLYYLAIMNRNHRKIFDKKIMPSSGECYEKMVYKLLPGANKMLPKVFFSKSRIGEFNPSVRVREIYEKGTFKKGNDFNLEDCYAMIDFFKESINKHEDWSKFGFHFSKTEDYKDLSDFYKEVEQQGYKVSFVNVSQSYVDQLVDEGKLYLFQIYSKDFSPYTKGTPNMHTLYWKMLFDEQNLADVVYKLNGQAEVFYRKASIKSDRPTHPANVPIANKRKGTEKKESVFAYDLIKDKRYTVDHFQFHVPITLNFKSRGADNINQLVNEYIKQTGDELKIIGIDRGERHLLYLTLIDTKGRIVSGMQFSLNQVDQTDYHQLLTQREEERLKARQSWRTIENIKELKEGYLSQVVHTIATLMVEHNAIVVLEDLNMGFMRGRQKVEKQVYQKFERMLIDKLNYLVDKKKESSEAGGLLKAYQLTSKFESFQKLSKQSGFLFYVPAWNTSKIDPVTGFVNLFDIRYESVDKSKIFLAKFDDIRYNAGKDWFEFSFDYSHFTSKAQDTRQNWTVCSYGERIETYRNPTKNMNWDNREVLLTDEFKNLFQTYGIDYSAGSLKEQILNQTEKSFFCNEKLDKKTPIGLLQLLKLTLQMRNSITGTEVDYLVSPVVDEKGQFYDSRTCGDDLPQNADANGAYNIARKGLWVVQQIRQSTDLKKLKLTISNKEWLRFVQQKLYLE

SEQ ID NO: 42 - protein, 1298 aa, unidentified
  REGION 1..1298: note = Description of Unknown: uncultivated organism sequence
  REGION 1..1298: note = Category: MG13 effectors
  REGION 1..1298: note = Description: MG13-7 effector
MNDNRTDFNQFSNLYSQSKTLRFSLEPEPKEKTLENLGFIKKENVWVLDEKNSLLGQDKERADDYKKVKGLIDDYIKDFIEKSLSHLELNKEDLENFEKLYKKKGKNEEERICFDEIKAKLRGQIADYLKNDPCYPSILKESKGKGKGKGKKVVDHSSNASTNPSVPEVNKKKEKGKSKKEDNETFFFEHLYNFVEEDDRRYIDKFKKFTTYFRGFNENRKNLFTEEAQATAIAYRLVHDNLPKFIDNMQCFEAFKDAGLADKLPELYASLGAEPGVGTIDEMFRLDYYSRLLTQSHIDIYNAVIGGKTTDKEKIQGLNELVNLYNQQQTDRSMRLPLFKPLFKQILSDRGSLSWLPEQFGSDNEVLESIEACYKELEYTFSSLKQLLEELGNYDLHKVYVYYAMLPPISLAVYDDWSAIYRALDAAFMRENPRKKNEKDEKYEERRQKYFKNKSACSIAEVEEALVVQDADSPHALAGYFSRLDAGREDGEASADLFARIAALHKEAEPLLTASYPKEKNLARDKEGVGKLKNLLDAVKALQHFVAPLAATAEQPDKDERFYGQLMPLWHSLGQVTPLYNQVRDYLTRKPYSVEKIKLNFENSTLMDGWDVNKIRDNTTVILRKDGAYFLAIMDKKHNKTFDAKNIQTDGVCYEKMDYKLIPGPNKMLPKVFFSQKGKSEFNPSSQIMEIYEERGSFKKGDSFRIEDCRALIDFYKDAISRHPDWKNFGFQFSETQSYNDISDFYHEVEMQGYSISFSPVSENYINSMVDGGKLYLFKIYSKDFSSKSKGRPNLHTIYWRMLFDPRNLADVSFRLNGGGEVFYRKASLPNEPEKPTHPAGRPIANKRAGAKKKESCFNYDLIKDERFTERHFELHVPITLNFKSRQIKDINQMVKEYIHDAADLHVIGIDRGERNLLYLSLIDMQGRIVKQESLNRVDRTDYHALLEKREVERQKARRSWQTIESIKELKEGYLSQVVRVVANWMVEYHAIVALENLNFGFKRGRQKVEKQVYQKFEKMLTDKLCYLVDKTKDADEPGGALRAYQLAKPLEKSANMGFQNGFLFYVPAWNTSKIDPVTGFVNLFDTRYESKDKAKDFFKKFDAIRYNEATGLFEFVFQYSEFPTKAEGTRDGWTLCSHGERIEAFKDKAGHWDTCTVNLTEELKKLFAHYGIALDGDLRAAISRQTDKKFFQNDKREGDCPRGLMQLFRLMVQMRNSEPGTNTDYLISPVADAQGRFFDSREVGDDLPKDADANGAYNIARKGLWLVRKIKEGASPEELKLTNQEWLSFAQEKPYEE

SEQ ID NO: 43 - protein, 1231 aa, unidentified
  REGION 1..1231: note = Description of Unknown: uncultivated organism sequence
  REGION 1..1231: note = Category: MG13 effectors
  REGION 1..1231: note = Description: MG13-9 effector
MKFQDFTNLYPLNKTLRFELQPIGKTKENIERKGFLFNDKQRAGDYKKVKRIIDEYHKKLIDESLASFTLQYENKGKKDSLLEYYESLKSARTSNNETFAKIRTNLRQQISKCLRRSEEYKRIYKKELFSQDLPQFVAEENLDLIKKFNGFATYFSGFHQNRQNMYSDDAKSTAIAFRMIHENLPKFIDNIDIFNKIKHIPEIAENLAQLYKDFEQYINVGKIDEVFELPYFNYTLTQSQIEIYNAIIGGKSEGDIKIKGLNEYINIYNQTHKESRLPKFKVLYKQILSDREHISWLPEQFNDDNELLQAIKEYYDSIYNHLANLRVILETLDTYDLCGVFVRNDQQLTNISKRVSNDWSKIQSAITEDLKQVRRQKKKEDSETYEEELRKLYKKQGSFSIDYIYKVADLQINSYFTNLDAINTEDLQQENIFARITNAYTEIRSLLEEPYPANKKLIQDKNDVVTIKVFLDTLLELLHFVKPLLGTGEESDKDNRFYSEFIPIWEKLNLLTPLYNKVRNYVTRKPYSVEKYKLNFGSPQLLGGWDKNKEKDCLSVLLRKDGKYFLGVMNKHNNKIFEQFPCDGDCYEKVVYKLLPGANKMLPKVFFSKSRIGEFMPSEEVLDIYDSGSFKKGANFNLQDCHKLIEFYKGAIAKHEDWSKFEFDFSNTESYDDISGFYREVEEQGYKLTYQLISVSYIDTLVEEGKLYLFQIYNKDFSKHSKGTPNMHTLYWKMLFDERNLADVVYQLNGGAELFYRERSIEYDKPTHPAKIPIKNKNTHNPKNESCFRYDLIKNRRYTIDKFQFHVPITLNFKSPGRDNINSLVCDYLHSTENTHIIGIDRGERNLLYLVVINPKGEICEQISLNEICNYHNGNLHKTDYHNLLDKREKDRHNERQSWQTIEGIKELKEGYLSQVIHKISELMVKYNAIVVLEDLNSEFMRGRQKVEKSVYQKFEKMLIDKLNYLVDKKADPAIPGGLLRAYQLTNKFDSFTKLGKQSGFLFYVPAWNTSKIDPATGFVNLLDLRYESEDKAKLLLSKFDSIRYNNDKDRFEFKIDYNKFTTKAAGTRTKWTICTYGTRIETFRNPAKNSQWDSREVNLTAEFKDLFEGMDICGNLKEIIMQQNGKQFFERLLHLLRLTLQIRNSITGTDVDYIISPVANDRGEFFDSRNSDTTMPQDADANGAYNIARKGLMIIEQIKNSDTPQSIKFDLSNKRWLQFAQQEDKDVVYL

SEQ ID NO: 44 - protein, 1254 aa, unidentified
  REGION 1..1254: note = Description of Unknown: uncultivated organism sequence
  REGION 1..1254: note = Category: MG13 effectors
  REGION 1..1254: note = Description: MG13-10 effector
MKNILEQFVGLYPLSKTLRFELKPLGKTLEHIEKKGLIAQDEQRAEEYKLVKDIIDRYHKAFIHMCLKHFKLKMYSEQGYDSLEEYRKLASISKRNEKEEQQFDKVKENLRKQIVDAFKNGGSYDDLFKKELIQKHLPRFIEGEGEEEKRIVDNFNKFTTYFTGFHENRKNMYSDEKESTAIAYRLIHENLPLFLDNMKSFAKIAESEVAARFTEIETAYRTYLNVEHISELFTLDYFSTVLTQEQIEVYNNVIGGRVDDDNVKIQGLNEYVNLYNQQQKDRSKRLPLLKSLYKMILSDRIAISWLPEEFKSDEEMIEAINNMHDDLKDILAGDNEDSLKSLLQHIGQYDLSKIYIANNPGLTDISQQMFGCYDVFTNGIKQELRNSITPTKKEKADNEIYEERINKMFKSEKSFSIAYLNSLPHPKTDAPQKNVEDYFALLGTCNQNDEQQINLFAQIEMARLVASDILAGRHVNLNQSENDIKLIKDLLDAYKALQHFVKPLLGSGDEAEKDNEFDARLRAAWNALDIVTPLYNKVRNWLTRKPYSTEKIKLNFENAQLLGGWDQNKEPDCTSVLLRKDGMYYLAIMDKKANHAFDCDCLPSDGACFEKIDYKLLPGANKMLPKVFFSKSRIKEFSPSESIIAAYKKGTHKKGPNFSLSDCHRLIDFFKASIDKHEDWSKFRFRFSDTKTYEDISGFYREVEQQGYMLGFRKVSETFVNKLVDEGKLYLFHIWNKDFSKHSKGTPNLHTIYWKMLFDEKNLTDVVYKLNGQAEVFYRKKSLDLNKTTTHKAHAPITNKNTQNAKKGSVFDYDIIKNRRYTVDKFQFHVPITLNFKATGRNYINEHTQEAIRNNGIEHIIGIDRGERHLLYLSLIDLKGNIVKQMTLNDIVNEYNGRTYATNYKDLLATREGERTDARRNWQKIENIKEIKEGYLSQVVHILSKMMVDYKAIVVLEDLNTGFMRSRQKIERQVYEKFEKMLIDKLNCYVDKQKDADETGGALHPLQLTNKFESFRKLGKQSGWLFYIPAWNTSKIDPVTGFVNMLDTRYENADKARCFFSKFDSIRYNADKDWFEFAMDYSKFTDKAKDTHTWWTLCSYGTRIKTFRNPAKNNLWDNEEVVLTDEFKKVFAAAGIDVHENLKEAICALTDKKYLEPLMRLMTLLVQMRNSATNSETDYLLSPVADESGMFYDSREGKETLPKDADANGAYNIARKGLWTIRRIQATNSEEKVNLVLSNREWLQFAQQKPYLND

SEQ ID NO: 45 - protein, 1249 aa, unidentified
  REGION 1..1249: note = Description of Unknown: uncultivated organism sequence
  REGION 1..1249: note = Category: MG13 effectors
  REGION 1..1249: note = Description: MG13-11 effector
MKEFTNLYPVSKTLRFDLQPIGRTKENIERNGILQRDEKRAEDYKTVKGFIDEYHKQFIKDRLWSYKLPLYSEGHLNSLEEYQALYELSKRDETQEREFAEVKDNLRAFIAKRLTEGGSAYDRIFKKELIREDLVDFLENEDDREIVRQFADFTTYFGGFHENRKNMYSAEEKSTAIAYRLIHQNLPKFMDNMKAFAKIAESSVSEHFEEIYEGWKEYLNVGSLEEIFRLDYFSVTLTQPHIEVYNYIIGKKILEDGTEIKGINEYVNLYNQQQKDKTKRLPFLVPLYKQILSDREKLSWMAEEFDSDDQMLTAINESYSHLHDLLMGDDNESLRSLLEHLKDFNLEQINITNDLSLTDISQHLFGRYDVFTNGIKDELRIITPRKKKEDDESFEDRISKIFKTQKSFSIALLDKLPQPVMEDGKLRTVEDYFLSLGAVNTGLTQKENLFAQIENAYEDARTILQLKNTDDTLSQDKPAVAKIKTLLDALKDLQHFIKPLLGSGEENEKDELFYGSFQMMWDELDTVTPLYNKVRNWLTRKPFSTEKIKLNFDNSQLLGGWDVNKEPDCTGVLLRKDGLYYLGIMDKKSNRIFEADVTPTDGVCYEKFDYKLLPGANKMLPKVFFSKSRIDEFSPSETIIASYKRGAHKKGANFNLAECHRLIDFFKQSISKHEDWSKFGFHFSDTKTYEDISGFYREVEQQGYMLSYHPVSSSYINQLVDEGKLYLFRIWNKDFSEFSKGTSNLHTLYWKMLFDEQNLANVVYKLNGQAEVFYRKASIKSENRIIHKANQPINNKNELNKKDTSTFEYDIIKDRRYTVDKFQFHVPITINFKATGQTNINPIVQDVIRQGGFSHIIGIDRGERHLLYLSLIDLQGNIVKQMTLNDIINEYKGQTYKTNYHDLLAKREGERTDARRSWETIETIKELKEGYLSQVVHIISKMMVEYNAIVVLEDLNTGFMRGRQKIERQVYEKFEKMLIEKLNCYIDKHAEPTEETGLLHPLQLTCDAKKWTRSHQCGCLFYIPAWNTSKIDPVTGFVNLLDTRYDTREKARLFFSKFQRISFNVDMGWFEFAFDYNDFNTKAEGTRTQWNLCTFGERIRSFRNPKKNNQWDDERIVLTDEFKQLFEKYDIDIAGNLKEAISAQSDAQFFKELLGLMKLLLQMRNSVTNSEEDYLLSPVADENGHFFDSREGISSLPIDADANGAYNIARKGLWVIRKIQETQEDEKVSLNITNKEWLQFAQTKPYRND

SEQ ID NO: 46 - protein, 1262 aa, unidentified
  REGION 1..1262: note = Description of Unknown: uncultivated organism sequence
  REGION 1..1262: note = Category: MG13 effectors
  REGION 1..1262: note = Description: MG13-12 effector
MRKFDEFVGLYPISKTLRFELKPIGKTLEHIQRNKLLEEDAVRADDYVKVKKIIDKYHKCLIDEALSGFTFETEVDGRSNNSLSEYYLYYNLRKRNEQEQKTFKTIQNNLRKQIVNKLTQSEKYKRIDKKELITTDLPDFLTNESEKELVEKFKNFTTYFTEFHKNRKNMYSKEEKSTAIAFRLINENLPKFVDNIAAFEKVASSPLAEKINALYEDFKEYLNVEEISRVFRLDYYNELLTQKQIDLYNAIVGGRTEEDNRIQIKGLNQYINEYNQQQTDRSNRLPKLKPLYKQILSDRESVSWLPPKFESDKELLIKIKECYDALSEKEKVFDKLESILKSLSTYDLSKIYISNDSQLSYISQKMFGRWDIIGKAIREDCAKGNPQKNRESLEKFAERIDKKLKAIDSISIGDVDECLAQLGEPYVKRVEDYFAAMGASDMVEEQTDTTSFKKNIERAYKSVKELLNNADNITDNNLMQDKGNVEKIKTLLDTIKDLQRFIKPLLGKGDEADKDGVFYGEFTSLWTKLDAVTPLYNMVRNYLTSKPYSTKKIKLNFENSTLMDGWDLNKEPDNTTVIFRKDGLYYLGIMGKRYNRVFVDREDLPHDGECYDKMEYKLLPGANKMLPKVFFSETGIQRFRPSEELLGKYERGTHKKGAGFDLGDCRALIDFFKKSIERHDDWKKFDFKFSDTSTYQDISEFYREVEQQGYKMSFRKVSVDYIKSLVEEGKLYLFQIYNKDFSAHSKGTPNMHTLYWKMLFDEENLKNVVYKLNGEAEVFFRKSSITVRTPTHPANSPIKNKNKDNQKKESKFEYDLIKDRRYTVDKFLFHVPITMNFKSVGGSNINQLVKRHIRSATDLHIIGIDRGERHLLYLTVIDSRGNIKEQFSLNEIVNEYNGNTYRTDYHELLDTREGERTEARRNWQTIQNIRELKEGYLSQVIHKISELAIKYNAVIVLEDLNFGFMRSRQKVEKQVYQKFEKMLIDKLNYLVDKKKPVAETGGLLRAYQLTGEFESFKTLGKQSGILFYVPAWNTSKIDPVTGFVNLFDTHYENIEKAKGFFDKFKSIRYNSDKDWFEFVVDDYTRFSPKAEGTRRDWTICTQGKRIQNYRNPQRNNEWEGRKIDLTKAFKEHFEAYGVDISKDLREQINTQNKKEFFEELLRLLRLTLQMRNSMPSSDIDYLISPVADDTGCFFDSRKQAELKENAVLPMNADANGAYNIARKGLLTIRKMKQEENDSAKISLAISNKEWLKFAQTKPYLED

SEQ ID NO: 47 - protein, 1261 aa, unidentified
  REGION 1..1261: note = Description of Unknown: uncultivated organism sequence
  REGION 1..1261: note = Category: MG13 effectors
  REGION 1..1261: note = Description: MG13-13 effector
MKQKKSQNPFNQFTGLYPLSKTLRFELRPIGKTKENIISAGILAEDNHRAESYKKVKKIIDEYHKAFIERVLKNLDLDKGALQAFYECYKKSTKEEKREETLQEIGNNLRSQISNAFKKDPKYSTLTSKDLINKELPSIATTEEERILLEEFHGFSTYFVGFHQNRENMYSKEEKATSIAYRLINENLPKFIDNIRSFEKIANSPIADKLESIYNEYAKEGYMNVNNLNEMFEISFYNRVLTQTQIDLYNAIIGGKTEKDGRKTQGINEYINLYNQRGEVQKKDRLPLLKPLFKQILSDREHISWFEEGFVDDQAMLSAIKDFYLKLTETEPTTTESILDRTRSLLRNIADYDLTKIYLEYTSLSKISQQIFGEWDRIQRALEAEYDATHLQRKKTKTYEEQKEQYFQSLKSVSIGFIDECLNSFETEKQLSLSIKEYIAQVGKKNDDPDLIEHITASYKAVKAILTTEWPKERNVAQEKDIVALIKKLLDRIKDLQYFIKPLLGSGKESDKDNLFYGELASIWEVINTVTPLYDKVRNRMTRKPYSTEKIKVNFRNSHFLSYWPQDYETKGGILFEKEGLYYLAIIDKKLKAKDIERLHCTKSNAVRIIVDTQKPDNKNTPRLFIRSKGENYAPAIDEYKLPIHEIIDLYDRKLFKKPLKGASPEDTEIFKASLTKLIDYFKLGFSRHESYRHYKFNWKKSDEYNDIDEFYQDTIESCYQIIRQPIDWDVVEEYTKEGKIYLFQIYNKDFSSHSKGTPNMHTLYWKTLFDEQNLANVVYKLNGEAEIFFREASLERKVTHPANEPIKTKNPETSIREKTFAYDLIKDKRYTEDKFQLHVPITMNFKGLNVKNINSRVNNYIKTEEDLHFIGIDRGERNLLYVCVIDSKGNIKEQYSLNEIVTQYNRTDYKYLLEKREEEREKERRSWQTIENIKDLKQGYLSQVVHKIAQLMVQYHAIVVLEDLNSGFKRSRQKVEKSVYQQFEKSLIDKLNYLVDKQLPIDEEGGVLRAYQLTNKFESFKTMKMQNGFLFYIPAWNTSKMDPTTGFVNLFDTRYTNINKSKEFFEKFEAIRYNEEKDWFELEFDYKNFTAKAEGTQTQWTLCTWGERINTFRNKSKNSSWDYKTINLTEEYKALFEQFSINYRGNLKKEILEQTSKDFFERLLSLLRLTLQMRNSIPNTDTDYLISPVADANGCFYYSEQCGDNLPKNADANGAYNIARKGMWMAEQIRRSNEGDELNLAISNKEWLRFVQEKPYLEEK

SEQ ID NO: 48 - protein, 1253 aa, unidentified
  REGION 1..1253: note = Description of Unknown: uncultivated organism sequence
  REGION 1..1253: note = Category: MG13 effectors
  REGION 1..1253: note = Description: MG13-14 effector
MNNLEQFTGLYPVSKTLRFELLPIGKTKENIEKNGILQRDEKRAEDYKLVKVFIDEYHKQFIKDRLWNFKLPILNEGNHDSLEEYQALYELSKRDDVQEAEFTEVKDNLRGIIAKRLTEKGSAYERIFKKELIREDLVDFLENEEDKNIVRQFEEFTTYFGGFHENRKNMYSAEEKSTAIAYRLIHQNLPKFMDNMKAFAKIAESSVSEHFEEIYEGWKEYLNVGSIEEIFRLDYFSETLTQPHIEVYNYIIGKKILDDGTEIKGINEYVNLYNQQQRDKSKRLPFLVPLYKQILSDREKLSWMAEEFDSDEKMLAAINESYNHLHDLLMGDENESLRSLLTHLKDFNLERINITNDLSITDISQHLFGRYDVFTNGIKGKLREITPRKRKESDEGFEERISKIFKTQKSFSISFLNKLPQPVMEDGKSRSIEEYFMSLGAINTVTTQKENLLAQIENTFENARDVLHMKDTGDALSQNKPAVAKIKAFLDTLKDLQHFIKPLLGSGDENDKDELFYGSFQMMWDELDTVTPLYNKVRNWLTRKPYSTEKIKLNFDNSQLLAGWDVNKEPDCTGILLCKGSFYYLGIMDKRSNRIFDSRITPSDGDCYDKIDYKLLPGANKMLPKVFFSKSRIDEFAPSESIVSNYKRGTHKKGTGFNLSDCHKLIDFFKESINKHDDWSKFNFHFSDTKTYDDISGFYREVEQQGYMLSTHPVSSAYINQMVNEGKLYLFRIWNKDFSEFSKGTPNLHTLYWKMLFDERNLANVVYKLNGQAEVFYRKASIKPENCIIHRANQPIINKNEFNKKQTSTFEYDIIKDRRYTVDKFQFHVPITINFKAMGQANINPIVQETIRKGGFSHIIGIDRGERHLLYLSLIDLKGNIVKQMTLNDIINEYKGQTYKTNYHDLLTKREGDRTDARRSWDTIETIKELKEGYLSQVIHIISKMMIEYNAIVVLEDLNTGFMRGRQKIERQVYEKFEKMLIEKLNCYIDKQANPQSIGGQLRPIQLTNKFDSFQKLGKQSGCLFYIPAWNTSKIDPVTGFVNLLDTRYETREKARLFFSKFQRISYNAEKGWFEFAFDYNDFTTKAESTRTQWTLCTYGERIRTFRNPLKNHQWDDERIILTDEFKHLFEKYDIDIRGNIKEAISAQSDAQFYRNLLGLIKLLLQMRNSITNSKEDYLISPVADDFGHFFDSREGISTLPIDADANGAYNIARKGLWIIRKVQETREGEKPSLTIKNKEWLQFAQNKPYLND

SEQ ID NO: 49 - protein, 1243 aa, unidentified
  REGION 1..1243: note = Description of Unknown: uncultivated organism sequence
  REGION 1..1243: note = Category: MG13 effectors
  REGION 1..1243: note = Description: MG13-15 effector
MKQFTNLYPVSKTLRFELIPQGETRAHLNDLIAEDEQRAEDYKEVKKYIDRYHKWFIDDCLSKVPNSPLGEEMIRLLNKFIEANDEKDGEGPDKVQDDLRKLIVKALKSGVSLDKDPEQEERFKSLFSEELVKNILPNFVQTEEEKSKVAKFRDMTTYFVGFHKNRENMYSEEAQTTAISYRLIHENLPRFLDNIAVYEKIKPVLSDEIVSLEEQLHQNGYVEACCIDSLFSVDFYLRVLTQRGIEQYNAVIGKIVNDESDEIKGLNERINLYNQVHKKEKLPLFKPMYKQILSDREQLSWLPETFENDASLLDAVKGFHQDLLSNDILSRIDKLLSSLQDFNLDQIWIANDVQLRGLSKDLYGDWSLIDRALGIERSEDVVQGLTAAQKKAASAAKKRSSFSIVELNAAIRSRVPDEKYVPVQNYFSAMGKVCAQGEATRENFVTRICAAYQELEEYIPSIRKSLLQEKRATEFIKNYLDAVNDLLRFIKPLLGRGNETDKDANFYGEFAFLTDCLFAIVPLYNEVRNYLTQKPYSTEKFKLNFRGSTLLNGWDKNKEKDNLGVILRKEGKYFLAIMNKKHNTLFTEGKLQQHTGGECYEKMEYKLIPGSKMLPKVFFSQKGISTFQPSEELLLNYRIGTYKKGEKFNLEHLHKLIDFYKHSIAVHEDWSKFDFHFSDTSSYRDISGFYKEVEQQGYKLTFRNVSVSYINRLVEEGKLYLFQIYNKDFSEYSKGTPNLHTLYWKMLFDLENLKDVVYKLSGEAEVFFRKKSLDVSHPTHPQNEPIEKKNINNKGEKSLFSYDLIKDRRFTVDKFQFHVPITMNFKGEQGDRVNQMVQSYVRNHKGLNVIGIDRGERNLLYLAVINEHGEILEQFSLNEIRNAYNGKEHKIDYHTLLEERSKKRQDARQSWQTIEGIKDLKTGYLSQVIHVITQLMVKYNAIVVLEDLNFGFKSSRQKFEQSVYQQFERKLIDKLNFLVNKKVAPNEVGGLLNAYQLTAPLGNSRKMGKQNGFLFYVPAWHTSKIDPRTGFVNLLDTRYENVANSKEFFAKFASITYNPEKKWFEFAFDYKAFGNRADGSRTKWTICSYGERIETFRNPKNNNQWDTKTVPLTERLTELFSNYGIDYTTNLKEQILNQTDKAFFVELLGALRLTLQLRNSRKSTGEDFLFSPVADENGCFFDSRKANDNEPKDADANGAYHIALKGLWVLDTIRNTEEGKNPKLAITNKEWLSFAQAKPFAHE

SEQ ID NO: 50 - protein, 1262 aa, unidentified
  REGION 1..1262: note = Description of Unknown: uncultivated organism sequence
  REGION 1..1262: note = Category: MG13 effectors
  REGION 1..1262: note = Description: MG13-16 effector
MRKFNEFVGLYPISKTLRFELKPIGKTLEHIQRNKLLEHDAVRADDYVKVKKIIDKYHKCLIDEALSGFTFETEADVRSNNSLSEYYLYYNLKKRNEQEQKTFKTIQNNLRKQIVNKLTQSEKYKRIDKKELITTDLPDFLTNESEKELVEKFKNFTTYFTEFHKNRKNMYSKEEKSTAIAFRLINENLPKFVDNIAAFEKVASSPLAEKINALYEDFKEYLNVEEISRVFRLDYYNELLTQKQIDLYNAIVGGRTEEDNRIQIKGLNQYINEYNQQQTDRSNRLPKLKPLYKQILSDRESVSWLPPKFDSDKDLLIKIKECYDALSEREKVFDKLESILKSLSTYDLSKIYISNDSQLSYISQKMFGRWDIIGKAIREDCAKRNPQKSRESLEKFAERIDKKLKAIDSISIGDVDECLAQLGETYVKRVEDYFAAMGELEIDDEQIDTTSFKKNIEEAYESVKELLNNADNITDNNLMQDKGNVEKIKNLLDAIKDLQRFIKPLLGKGDEADKDGVFYGEFTSLWTKLDQVTPLYNMVRNYLTSKPYSTKKIKLNFENSTLMDGWDLNKEPDNTTVIFCKDGLYYLGIMGKKYNRVFVDREDLPHDGECYDKMEYKLLPGANKMLPKVFFSETGIQRFRPSEELLGKYERGTHKKGAGFDLGDCRALIDFFKKSIERHDDWKKFDFKFSDTSTYQDISEFYREVEQQGYKMSFRKVSVDYIKSLVEEGKLYLFQIYNKDFSAHSKGTPNMHTLYWKMLFDEENLKDVVYKLNGEAEVFFRKSSITVQSPTHPANSPIKNKNKDNQKKESEFEYDLIKDRRYTVDKFLFHVPITMNFKSVGGSNINQLVKRHIRSATDLHIIGIDRGERHLLYLTVIDSRGNIKEQFSLNEIVNEYNGNTYRTDYHELLDTREGERTEARRNWQTIQNIRELKEGYLSQVIHKISELAIKYNAVIVLEDLNFGFMRSRQKVEKQVYQKFEKMLIDKLNYLVDKKKPVAETGGLLRAYQLTGEFESFKTLGKQSGILFYVPAWNTSKIDPVTGFVNLFDTHYENIEKAKGFFDKFKSIRYNSDKDWFEFVVDDYTRFSPKAEGTRRDWTICTRGKRIQICRNHQRNNEWEGREIDLTKAFKEHFEAYGVDISKDLREQISTQNKKEFFEELLRLLRLTLQMRNSMPSSDIDYLVSPVADDAGCFFDSRKQAELKENAVLPMNADANGAYNIARKGLLAIRKMKQEENDSAKISLAISNKEWLKFAQTKPYLED

SEQ ID NO: 51 - protein, 1262 aa, unidentified
  REGION 1..1262: note = Description of Unknown: uncultivated organism sequence
  REGION 1..1262: note = Category: MG13 effectors
  REGION 1..1262: note = Description: MG13-17 effector
MRKFNEFVGLYPISKTLRFELKPIGKTLEHIQRNKLLEDDAVRADDYVKVKKIIDKYHKCLIDEALSGFTFDTEVDGRSNNSLSEYYLYYNLRKRNEQEQKTFKTIQNNLRKQIVNKLTQSEKYKRIDKKELITTDLPDFLTNESEKELVEKFKNFTTYFTEFHKNRKNMYSKEEKSTAIAFRLINENLPKFVDNIAAFEKVASSPLAEKINALYEDFKEYLNVEEISRVFRLDYYNELLTQKQIDLYNAIVGGRTEEDNRIQIKGLNQYINEYNQQQTDRSNRLPKLKPLYKQILSDRESVSWLPPKFDSDKELLTKIKECYDALSEKEKVFDKLESILKSLSTYDLSKIYISNDSQLSYISQKMFGRWDIIGKAIREDCAKRNPQKNRESLEKFAERIDKKLKAIDSISIGDVDECLAQLGEPYVKRVEDYFATMGASEIGEEQIGQEFFKKNIEEAYESVKELLNNADNITDNNLMQDKGNVEKIKNLLDAIKDLQRFIKPLLGKGDEADKDGVFYGEFTSLWTKLDTVTPLYNMVRNYLTSKPYSTKKIKLNFENSTLMDGWDLNKEPDNTTVIFRKDGLYYLGIMGKKYNRVFVDREDLPHDGECYDKMEYKLLPGANKMLPKVFFSETGIQRFRPSEELLGKYERGTHKKGAGFDLGDCRALIDFFKKSIERHDDWKKFDFKFSDTSTYQDISEFYREVEQQGYKMSFRKVSVDYIKSLVEEGKLYLFQIYNKDFSAHSKGTPNMHTLYWKMLFDEENLKDVVYKLNGEAEVFFRKSSITVQSPTHPANSPIKNKNKDNQKKESKFEYDLIKDRRYTVDKFLFHVPITMNFKSVGGSNINQLVKQHIRSATDLHIIGIDRGERHLLYLTVIDSRGNIKEQFSLNEIVNEYNGNTYRTDYHELLDTREGERTEARRNWQTIQNIRELKEGYLSQVIHKISELAIKYNAVIVLEDLNFGFMRSRQKVEKQVYQKFEKMLIDKLNYLVDKKKPVAETGGLLRAYQLTGELESFKTLGKQSGILFYVPAWNTSKIDPVTGFVNLFDTHYENIEKAKGFFDKFKSIRYNSNKDWFEFVVDDYTRFSPKAEGTRRDWTICTQGKRIQICRNHQRNNEWEGREIDLTKAFKEHFEAYGVDISKDLREQINTQNKKEFFEELLRLLRLTLQMRNSMPSSDIDYLISPVADDTGCFFDSRKQAELKENAVLPMNADANGAYNIARKGLLAIRKMKQEENDSAKISLAISNKEWLKFAQTKPYLED

SEQ ID NO: 52 - protein, 1239 aa, unidentified
  REGION 1..1239: note = Description of Unknown: uncultivated organism sequence
  REGION 1..1239: note = Category: MG13 effectors
  REGION 1..1239: note = Description: MG13-18 effector
MDNIMKKLNDFTGLYSLNKTLRFELQPVGETADKIKEAGILKDDEYRANNYEAVKKIIDKYHRSFIERVLSGFTFICESSNKENSLEEFYNFYTSTIRDEKKFRTIRSNLRKQIVTAFNEDKDFALLFKKDFIKKVLMEFVETKEEQLLIKKFEKDTTFFKRFNDKRKNIYSADAKHTTIVYRLVHDNLPRFIDNISRFNKLVNCLGLDELQTLCADLKNSLGVRDISNLFELKYYNQVLTQGQIDVYNKIIGGVNKYVNLYNQSQKNRSACLPKLNFLFKQILSEKETISWLPEQFESDNALLASVRNAYQELYIKNKSDLVRLLSNLPEYDLDKIYIKNDDQLSRISKNMFGCSDTIQEALKKELRNTSRKKKDESRIEKEFQKRQSIPIGYINRCLSTEGTETKKIEEYFRECGVTHEDEKSLWNQVEDAYAKVCDLLESAYPQDKTLITDDINIENIKVLLDALKRIQLFVKPLLGNGDETEKDERFYGDFVAVCDTLNEITPLYNRVRNYLTRKPYSKDKIKLIFGESQLLNGWDLNKEQACKSVIFRKGELFYLGIMNKKYNKILEVKNEQSDGDCYEKMELKSFGESFRRIPKSSVAMNEVKTHFDKSEKDYVLDNKKNFLLPLYISKEIYDLGKGGVLDNLRKIEDLEIRRKKLNLWINFCIDFLEKYKSTSIYDVKNLKNKDYEDVNDFYNDVDHICYRITFRNVSVQYIDSLVSDGKLYLFKIHNKDFEPSSKGTPNMHTLYWRMLFDERNLSDVVYQLNGGAEVFFRKASLERRITHPANRPINNKNKNNSKRQSIFKYDLIKDKRYTIDKYLFHVPITLNFNSLNDSDLNTSVQEYIRKSNDLHIIGIDRGERNLVYISVIDLYGNIKAQYSLNEIKNSYLSYSTDYHDLLLNRERERQEARSGWKAIKNIKDLKEGYLSQVVHVIAELMLEYNAIVVLEKLNKGFYRGRQKVEMSVYAKFEKMLIDKLSYYVNKKKDPEDVGGLLNALQLTNKDMDEKSSQNGFLFYVRPQYTSKIDPVTGFVDLFKVQYENKEKAKQFFESFDFIRYNKEKDWFEFSFDYEHFPTKGKSARTSWTVCTHGSRIRSTKSITKNGHWSSEEIILTEEFKRHFEHYGIDWNFDLKDAILAQEDSSFFKDLLSLFKLTLQLRNSRSDVDYIVSPVINENGDRCYDEFLPKDGDANGAYNIARKGLYLVRKIKESNSLDCLSIEDKEWFDFAQKRPYLKI

SEQ ID NO: 53 - protein, 1243 aa, unidentified
  REGION 1..1243: note = Description of Unknown: uncultivated organism sequence
  REGION 1..1243: note = Category: MG13 effectors
  REGION 1..1243: note = Description: MG13-19 effector
MKTFNDLTGLYSLSKTLRFELKPVGKTKDNIETKGIIAQDEKRAEEYKKVKDIIDRYHKSFIDMCLAGLVLKTTSDGNNDSLKDYVALASKSNRDEKEDKDFDDVKTALRKQIVDAFKKGGSYSDLFKKELIQVHLPDFVTDEQEKQMVENFGKFTTYFTGFNENRQNMYSDEEKSTSIAYRLIHENLPMFIDNIKSFAKIAEHEDIDFLPDIENGFKEELKRLKVQSISEVFDLANFTNTLTQSQIDSYNAIIGARYDENGDKVQGINEYVNLYNQQHKDARLPLLKPLYKMILSDRVALSWLPEEFATDEEMLAAINETHGNLKNVMTDVRKLLQNIDSYDTEHIYIANDKGLTDISQQIFGQYDVYTSAIKAELRDSITPSAKERKDPELLEKRINDIFKASKSFSIEYLNSHVDSDKTIQSYYKELGAYDRNGEQRINLLSQIELAYVDAHDVLLGKHTNLNQSEDSIKKIKALLDAYKALQHFIKPLLGNGDEADKDNEFDAKLRAIWDELDIVTPLYDKVRNRLTRKPYSTEKIKLNFDNAQLLNGWDMNKEPDCTSVLLRKDGQYYLAIMDKKSNHAFDIDELPCDGECYDKMDYKLLPGANKMLPKVFFSKSRIKEFAPSKEICDAYQKGTHKKGANFSIKDCRRLIDFFKDSIAKHEDWSKFPFTFSDTSTYEDISGFYREVEQQGYMLGYRKVSVSFINQLVDEGKLYLFQIWNKDFSEYSKGTPNMHTLYWKMLFDERNLANVVYKLNGQAEVFYRKRSLDLNKTTIHRANQPIANKNMQNEKRESTFSYDIVKNRRYTVDKFQFHVPITINFKATGSDNINASVLDVIRNNGIEHIIGIDRGERHLLYLSLIDMKGNIVKQMTLNDIINEYKGNTYTTNYKELLQAREGDRKEARQNWQKIENIKELKEGYLSQVVHVITKMMVEYKAIVVLEDLNGGFMRGRQKIERQVYEKFEKMLIDKLNYYVDKQKDANENGGLLHAYQLASKFDTFKKLGKQSGCLFYIPAWNTSKIDPVTGFVNMLDTRYENADKARKFFSKFKSISYNADKNWFEFVIDDYSKFTDKAKDTRTDWVLCTYGTRIKTFRNPEKLNQWDNKEIVLTDEFKKVFMEAGIDINGNLKEAICTLTEKKHLESLMQLMKLLVQMRNSETNSEVDYLLSPVADTEGHFYDSRNCDDNLPKDADANGAYNIARKGLWAVMKIKASKPQENLKLGISNKEWLQFAQEKPYLND

SEQ ID NO: 54 - protein, 1238 aa, unidentified
  REGION 1..1238: note = Description of Unknown: uncultivated organism sequence
  REGION 1..1238: note = Category: MG13 effectors
  REGION 1..1238: note = Description: MG13-20 effector
MNTYEELTGLYSLIKTINFALNPIGETLRHIEEKGFIAQDEQRAEDYKKVKDIIDRYHKYFITMCLDGFKFSTDKLMKYVALAENAKRDEDAFDEVKTQLRKEIVAAFEKGETYKDLFKKELILKHLPNFVTDENEKRLVASFNKFTTYFKKFHKCRKNMYSDEAKSTAIAHRLIHENLPMFYDNMKSFKKIAACEDCIDLAEFEAAFSEEFKAFKVEHLADIFQLEYFNNTLTQRKIDFYKLVVGGKVLEDGTKLKGVNEYVNLYNQQHKDARLPLLKPLYKMILSDKVALSWLPEEFKSDEEMVEAIQEMHKNLKGALTDNAENNLRDLLLNMGKYDLAHIYIANDLGLRDISQNIFGQYDVYTSALKQALRNEYAPTTDECQNLELYDERINKLFKSRTSFSIAELNSLADCDHTIENHFKQLGAAERNGKQEIDLFSQIETAYAKASDILSGKHGNIGQSEAETALVKNLLDAYKSLQHFIKPLLGHGDEAEKDNEFDAKLRAAWDALDIINPLYNKVRNWLTRKPYSTEKIKLNFENAQLLDGWDKNKETVNTSVLLRKDGMYYLAIMNKKANDAFACDELPSDGDCYEKIDYKQISNARMDLPRVLLPPKNIDKYAPSEEIKDIYSKRTYRKGKNFNLEHCRRLIDFFKRSITKHKDWKNFQFIFSPTEKYECISSFYNEVEQQAYMLDFRKVSVAYINQLVESGNLYLFQIWNKDFSKFSKGTPNMHTLYWKQLFDERNLADVVYKLNWQAEVFYRKRSLKLEETTVHHAHQPIPNKNKQNEKRQSQFNYDIVKNRRFTVDKFQFHVSITLNFKATGGGDINDKVLEIIRNNGIKHVIGIDRGERHLLYLSLIDLKGNIIKQMTLNDIVNEYRGHTYTTNYKDLLAEREDNRTEARRNWKRIDNIKEIKQGYLAQVVHIISKMMVEYKAIVILEDLNMGFMRRWQKIERSVYEQFEKSLIEKLNYYVDKQKDENEVGGLLHAFQLTSKFKSFKELGKQSGCLFYVPAWNTSKIDPVTGFVNLFDTKNVKGEKVRAFFSNFDAIRYNAERDWFEFAFNYSNFTNKARDTREEWTLCTHGTSIRTFRNPSKINHRDSEEVVLTDEFKKVFEKAGIDICGNLKNAICALKEKAHLEKLMQLMKLLLQMRNSKPNTEVDYMISPVADEQGNFYDSRCGNSALPDNADANGAYNIARKGLWVIKQIRETPAGKRPDWAIKNKEWLKFAQQKPYLDD

SEQ ID NO: 55 - protein, 1262 aa, unidentified
  REGION 1..1262: note = Description of Unknown: uncultivated organism sequence
  REGION 1..1262: note = Category: MG13 effectors
  REGION 1..1262: note = Description: MG13-21 effector
MRKFDEFVGLYPISKTLRFELKPIGKTLEYIQRNKLLEHDAVRADDYVKVKKIIDKYHKCLIDEALSGFTFDTEADGRSNNSLSEYYLYYNLRKRNEQEQKTFKTIQNNLRKQIVNKLTQSEKYKRIDKKELITTDLPDFLTNESEKELVEKFKNFTTYFTEFHKNRKNMYSKEEKSTAIAFRLINENLPKFVDNIAAFEKVASSPLAEKINALYEDFKEYLNVEEISRVFRLDYYNELLTQKQIDLYNAIVGGRTEEDNRIQIKGLNQYINEYNQQQTDRSNRLPKLKPLYKQILSDRESVSWLPPKFDSDKDLLIKIKECYDALSEKEKVFDKLESILKSLSTYDLSKIYISNDSQLSYISQKMFGRWDIIGKAIREDCAKRNPQKNRESLEKFAERIDKKLKAIDSISIGDVNECLAQLGEPYVKRVEDYFAAMGASEIGEEQIGQEFFKKNIEEAYESVKELLNNADNITDNNLMQDKGNVEKIKTLLDAIKDLQRFIKPLLGKGDEADKDGVFYGEFTSLWTKLDQVTPLYNMVRNYLTSKPYSTKKIKLNFENSTLMDGWDLNKEPDNTTVIFCKDGLYYLGIMGKKYNRVFVDREDLPHDGECYDKMEYKLLPGANKMLPKVFFSETGIQRFRPSEELLGKYERGTHKKGAGFDLGDCRALIDFFKKSIERHDDWKKFDFKFSDTSTYQDISEFYREVEQQGYKMSFRKVSVDYIKSLVEEGKLYLFQIYNKDFSAHSKGTPNMHTLYWKMLFDEENLKDVVYKLNGEAEVFFRKSSITVQSPTHPANSPIKNKNKDNQKKESKFKYDLIKDRRYTVDKFLFHVPITMNFKSVGGSNINQLVKRHIRSATDLHIIGIDRGERHLLYLTVIDSRGNIKEQFSLNEIVNEYNGNTYRTDYHELLDTREGERTEARRNWQTIQNIRELKEGYLSQVIHKISELAIKYNAVIVLEDLNFGFMRSRQKVEKQVYQKFEKMLIDKLNYLVDKKKPVAETGGLLRAYQLTGEFESFKTLGKQSGILFYVPAWNTSKIDPVTGFVNLFDTHYENIEKAKGFFDKFKSIRYNSDKDWFEFVVDDYTRFSPKAEGTRRDWTICTQGKRIQIYRNPQRNNEWEGREIDLTKAFKEHFEAYGVDISKDLREQINTQNKKEFFEELLRLLRLTLQMRNSMPSSDIDYLISPVADDTGCFFDSRKQAELKENAVLPMNADANGAYNIARKGLLAIRKMKQEENDSAKISLAISNKEWLKFAQTKPYLED

SEQ ID NO: 56 - protein, 1275 aa, unidentified
  REGION 1..1275: note = Description of Unknown: uncultivated organism sequence
  REGION 1..1275: note = Category: MG13 effectors
  REGION 1..1275: note = Description: MG13-22 effector
MNNLNDLTGQYPVSKTIRFDLQPIGKTKENIEKGGILQQDEQRAEDYKTVKGFIDEYHKQFIKDRLWNFRLPLISEGHLDSLEEYQTLYLLAKRNDAQEAEFKEVKDNLRSIIARRLTEKGSAFERIFKKELIREDLIDFVEKPEDKDLVKSFADFTTYFTEFHKNRANMYTAEEKSTAIAYRLIHQNLPKFMDNIKAFAKIAQTSVAGHFVEIYNGSKEYLNVGSLEEVFQLDYFSDTMTQPHIEVYNSIIGKRVLEDGTEIKGINEYVNLYNQQQKDKRQRLPLLVPLYKQILSDREKLSWLAQEFDSDKKMLAAINETFIHLREILMGEDSESLRSILTHLKDFDLTQINITNDLSLTDISQHLFKRFDVFSNGIKAKIRSITPKKKKESDEELEDRVSKIFKTQKSFSIAFLDNLPQPEMEDGKRRSVADYFTALGAVNNEVTQKENLFAQIEIAYEDARDVLQMTETGDTLSQDKPAVAKIKALLDALKDLQHFIKPLRGSGEENEKDELFYGSFLMMWDELDTVTPLYNKVRNWLTRKPYSTEKIKLNFDSPTLLNGWPNPQTNSGAIFRDEEGLYYLAILDAQNRACLNELSSNVNGNEDHIEMMKYLQGGDMGKNVQNLMVIDGEVRKVNGRKETSGEFAGQNLRLENAKHQYLPKNINEIRLKQSYLTSSPTFNKKDLVSFIEYYIPLVEAYYSDYVFHFRKSSEYKSFADFTEHINQQAYQVQFKPVSKTSLYSLVEEGKLYLFRIWNKDFSEFSKGTPNLHTLYWKMLFDERNLADVVYKLNGQAEVFYRKASIKPENKIVHPANRAIANKNELNKKRTSSFDYDIIKDRRYTVDKFQFHVPITINFKATGQTNVNPIVQDTIRRGGFTHIIGIDRGERHLLYVSLIDLKGNIVKQMTLNEILNEYKGLTHKTNYHDLLAKREGERTDARRSWDTIENIKELKEGYLSQVVHIISKMMVEYNAIVVLEDLNPGFMRGRQKIERQVYEKFEKMLIEKLNCYIDKKAEPIEIGGLLHPLQLSCDIKKWKKSHQCGCLFYIPAWNTSKIDPVTGFVNLFDTHYETREKARSFFSKFQRIHFNSEKNWFKFTFDYGNFTTKAEGTRTQWTLCSYGTRIRNFRNPLKNHQWDDEEVELVDEFKHLFDKYSIDIFGNLKESICNQTDAQFYKELMGLMKLLLQMRNSRTNSEVDYLLSPVADEQGHFFDSREGIGSLPDNADANGAFNIARKGLWIIRKVQGTPSDEKMSLAISNKEWLQFAQNRPYLND

SEQ ID NO: 57 - protein, 1263 aa, unidentified
  REGION 1..1263: note = Description of Unknown: uncultivated organism sequence
  REGION 1..1263: note = Category: MG13 effectors
  REGION 1..1263: note = Description: MG13-23 effector
MRDFNEFVGLYPISKTLRFELKPIGKTLEHIQRNELLEDDAVRADDYVKVKKIIDKYHKCLIDEALSGFTFDTEADGRSNNSLSEYYLYYNLKKRNEQEQKTFKTIQNNLRKQIVNKLTQSEKYKRIDKKELITTDLPDFLTNESEKKLVEKFKNFTTYFTEFHKNRKNMYSKEEKSTAIAFRLINENLPKFVDNIAAFEKVASSPLAEKINALYEDFKEYLNVEEISRVFRLDYYNELLTQKQIDLYNAIVGGRTEEDNRIQIKGLNQYINEYNQQQTDRSNRLPKLKPLYKQILSDRESVSWLPPKFDSDKDLLIKIKECYDALSEREKVFDKLESILKSLSTYDLSKIYISNDSQLSYISQKMFGRWDIIIGKAIREDCAKRNPQKSRESLEKFAERIDKKLKAIDSISIGDVDECLAQLGETYVKRVEDYFAAMGESEIDDEQTDTTSFKKNIEGAYESVKELLNNADNITDNNLMQDKGNVEKIKTLLDAIKDLQRFIKPLLGKGDEADKDGVFYGEFTSLWTKLDQVTPLYNMVRNYLTSKPYSTKKIKLNFENSSLMKGWDLNKEPDNTTVIFRKDGLYYLGIMGKKYNRVFVDREDLPHDGECYDKMEYKLLPGANKMLPKVFFSETGIQRFRPSEELLGKYERGTHKKGAGFDLGDCRALIDFFKKSIERHDDWKKFDFKFSDTSTYQDISEFYREVEQQGYKMSFRKVSVDYIKSLVEEGKLYLFQIYNKDFSAHSKGTPNMHTLYWKMLFDEENLKDVVYKLNGEAEVFFRKSSITVQSPTHPANSPIKNKNKDNQKKESEFKYDLIKDRRYTVDKFLFHVPITMNFKSVGVSNINQLVKRHIRSATDLHIIGIDRGERHLLYLTVIDSRGNIKEQFSLNEIVNEYNGNTYRTDYHELLDTREGERTEARRNWQTIQNIRELKEGYLSQVIHKISELAIKYNAVIVLEDLNFGFMRSRQKVEKQVYQKFEKMLIDKLNYLVDKKKPVAETGGLLRAYQLTGELESFKTLGKQSGILFYVPAWNTSKIDPVTGFVNLFDTHCENIEKAKGFFDKFKSIRYNSDKDWFEFVVDDYTRFSPKAEGTRRDWTICTQGKRIQIYRNPQRNNEWEGREIDLTKAFKEHFEAYGVDISKDLREQINTQNKKEFFEELLRLLRLTLQMRNSMPSSDIDYLISPVADDTGCFFDSRKQAELKENAVLPMNADANGAYNIARKGLLAIRKMKQEENDSAKISLAISNKEWLKFAQTKPYLED

SEQ ID NO: 58 - protein, 1250 aa, unidentified
  REGION 1..1250: note = Description of Unknown: uncultivated organism sequence
  REGION 1..1250: note = Category: MG13 effectors
  REGION 1..1250: note = Description: MG13-24 effector
MEQLTNLYPVSKTLRFELQPIGKTRENIEKRGILQQDEERAENYKLVKGFIDEYHKQYIKSRLWNFELPLDDEGRHNSLAEYRALYELPKRDAEQETAFTEVKDNLRAIIARRLTEKGSAYDRIFKKELIREDLIEFLEDENDKEIVRQFADFTTYFTGFHENRANMYSSEEQSTAIAYRLIHQNLPKFMDNMKSFTKIAETSVAEHFADIYAGWEEYLNVGSINDMFRLDYFSQTLTQEHIEVYNYIIGKRILDDGTEIKGINEYVNLYNQQQKDKKQRLPLLVPLYKQILSDREKLSWLSEEFDSDIKMQQAIKETYDHLYDLLMGDENESLKSLLMHLGDFDLSQINITNDLSLTDISQHLFGKYDVFTNGIKDKLRIITPRKKKETDEDFEERITKLFKTQKSFSIAELNSLPHPIIEGSQPKNIEDYYMALGAVNTETVQKENLFAQIENAYTDVLPILQLTDTGDKLSQNKAEVAKIKKLLDAFKDLQHFVKPLLGSGEEVEKDERFYGAFQTIWDELDTEIPLYNKVRNWLTRKPYSTEKIKLNFDNAQLLGGWDVNKEPDCTGVLLRKDGFYYLGIMNKKNNRIFEKDMTPSDGDCYDKIDYKLLPGANKMLPKVFFSKSRIDEFAPSASLVEKYKAGTHKKGANFSLKDCHKLIDFFKQSIAKHEDWSKFGFHFSDTNTYEDISGFYREVEHQGYSLSSHNVSVDYIHRMVDEGKLFLFRLWNKDFSEYSKGTPNLHTLYWKMLFDERNLNDVFYKLNGQAEVFYRKASIKEENRIIHPAKKDINNKNALTDKQTSRFDYDIIKDRRFTVDKFQFHVPITINFKAIGQTNINPVVHDIIRQGGIKHIIGIDRGERHLLYLSLIDLQGRIVKQMTLNEIINEYSGHKYKTNYHDLLAKREGERTDARRSWDTIENIKELKEGYLSQVVHVITRMMVKYKAIVVLEDLNMGFMRGRQKIERQVYEKFEHMLIDKLNCYIDKQEDPSKPGGMLHALQLSNKFESFARLGKQSGCLFYIPAWNTSKIDPVTGFVNLLDTHYDTMKAAKSFFSKFECIRYNGENDWFEFTFDYDEFNKKAEGTKTRWTLCTYGTRIRNFRNPQKNNQWDDEEVVLTDMFKKLFDVYGIDYRGNLKEAIQQPTEAKFYQELMLLMKSLLQMRNSKINSEVDYLLSPVADENGHFFDSRQGDATLPDNADANGAYNIARKGLWAIRKIQESPKDEKVSLAISNKEWLTFAQTKPYLDK

SEQ ID NO: 59 - protein, 1252 aa, unidentified
  REGION 1..1252: note = Description of Unknown: uncultivated organism sequence
  REGION 1..1252: note = Category: MG13 effectors
  REGION 1..1252: note = Description: MG13-25 effector
MKNLKQFTNLYPVSKTLRFELQPIGKTKENIEKNGILTRDEKRAKDYQVVKGFIDEYHKQFIKDRLWDFKLPLISEGNLDSLEEYQMLYEMARRDDAQEAEFSEIKDNLRAIIAKRLTENGSAYDRIFKKELIREDLVDFLDNEEDKALVRQFADFTTYFSGFHENRRNMYSAEEKSTAIAYRLIHQNLPKFMDNMKAFTKIAETSVAEHFINIYKGWEEYLNVGSIEEIFRLDYFSETLTQPHIEVYNYIIGKKVLEDGTEIKGINEYVNLYNQQQKDKSKRLPFLVPLYKQILSDREKLSWMAEEFDSDEKMLAAINESYTHLHELLMGNENESLRSLLLHLREYDLSQINITNDLSLTDISQHLFGRYDVYTNAIKEQLKIITPRKKKETDEDFEDRISKIFKTQKSFSISFLNNLPHPETEDGKPRSVEEYFISTGAINTETTQKENLFAQIENAYENVRVILKMKDTDDALSQNKPAVTKIKALLDAFKDLQHFIKPLLGSGEELEKDELFYGSFQMIWDELDNVTPLYNKVRNWLTRKPYSTEKIKLNFDNSQLLGGWDVNKEPDCTGILLRKDGFYYLGIMDKKSNRVFEADVTPSDGDCYEKIDYKLLPGANKMLPKVFFSKSRIDEFAPSKSIVSSYKRGTHKKGKDFNLSDCHRLIDFFKRSINKHEDWCKFGFHFSDTHTYDDISGFYREVEDQGYMLSSHSVSSSYINQLVDEGKLYLFRIWNKDFSEYSKGTPNLHTLYWKMLFDERNLSNVVYKLNGQAEVFYRKASIQPENRIIHKAKQSIANKNELNKKRTSTFEYDIIKDRRYTVDKFQFHVPITINFKGTGQFNINPIVQETIRQGDFTHIIGIDRGERHLLYLSLIDLNGNIVKQMTLNDIINEYKGQTYKTNYHDLLVKREGDRTNARRSWDTIETIKELKEGYLSQVVHVISKMMVEYKAIVVLEDLNSGFMRGRQKIERQVYEKFEKMLIEKLNCYIDKQADATEVTGLLHPLQLTCEAKKWKRSHQCGCIFYIPAWNTSKIDPVTGFVNLLDTRYDTREKARLFFSKFQRISFNTEKGWFEFTFDYNDFTTKADGTRTQWTLCTYGERIRTFRNSQKNNQWDNERIILTDEFKKLFDEKEIDISGNIKEAICNQADAQFYRDLLGLMKLLLQMRNSITNSEEDYLLSPVADENGHFFDSRESISNLPIDADANGAYNIARKGLWIVRKIRDNPEDEKLSLTITNKEWLLFAQNKSYLND

SEQ ID NO: 60 - protein, 1249 aa, unidentified
  REGION 1..1249: note = Description of Unknown: uncultivated organism sequence
  REGION 1..1249: note = Category: MG13 effectors
  REGION 1..1249: note = Description: MG13-26 effector
MKQFTNLYPVSKTLRFELQPIGKTKENIEKKGILTRDEKRAKDYQIVKGFIDEYHKQFIKDRLWNFKLPLASEGNLDSLEEYQMFYEMPRRDDAQETDFSEVKDNLRVIIANRLRESGSAYDRIFKKELIREDLVEFLSDEEDKNIVRQFADFTTYFSGFHENRRNMYSAEEKSTAIAYRLIHQNLPKFMDNMKAFTKIAKTSVAEHFADIYAGWKEYLNVGSIEEVFRLDYFSETLTQPHIEVYNYIIGKKVLEDGKEIKGINEYINLYNQQQKDKSKRLPFLVPLYKQILSDREKLSWLAEEFDSDEKMLAAIDKLYTHLHELLMGEENESLRSLLMHMKDYDLSQINITNDLSLTDISQHLFNRYDVYTNGVKEQLKGITPRKKKENDEDFEDRISKIFKTQKSFSISLLNGLPHPEIEDSQPRRIEEYFMAMGAVNTATIQRENLFSKIESAYEDARAILQMKDTGDSLSQNKPAVAKIKALLDAFKDLQHFIKPLLGSGEELEKDELFYGSFQMIWDELDTVTPLYNKVRNWLTRKPYSTEKIKLNFDNSQLLGGWDVNKEPDCTGVLLRKDGFFYLGIMDKRYNHIFEADLPHSDDDCYDKVDYKLLPGANKMLPKVFFSKSRIDEFAPSAAIVSSYKRGTHKKGKNFDLSDCHRLIDFFKQSIQKHADWCKFGFHFSDTQTYEDISGFYREVEEQGYMLSSHQVPSSYINELVDGGKLYLFRIWNKDFSENSKGTPNLHTLYWKMLFDKRNLSDVVYKLNGQAEVFFRKASIKPENRVVHKANQSITNKNALNKKTTSTFEYDIIKDRRYTVDKFQFHVPITINFKASGQTNINPIVQETIRQGGFKHIIGLDRGERHLLYLSLIDLNGNIVKQMTLNDIVNEYNGQTYKTNYHDLLTKREGERTDARRSWDTIETIKELKEGYLSQVIHIISKMMVEYKAIVVLEDLNTGFMRGRQKIERQVYEKFEKMLIEKLNCYIDKKADATDATGLLHPLQLTCDAKKWNRSHQCGCLFYIPAWNTSKIDPVTGFVNLLDTRYETREKAHLFFSKFQRISFNQKKGWFEFAFDYADFTTKAEGTRTQWTLCTYGERIRTFRNPQKNNQWDNERIVLTDEFKRIFDEKGIDIFGNLKDAICNQRDAKFFKDLLGLMKLLLQMRNSITNSEEDYLLSPVADEKGHFFDSREGISSLPIDADANGAYNIARKGLWVIRKIQETPENERPSLSITNKEWLQFAQTKPYLKE

SEQ ID NO: 61 - protein, 1238 aa, unidentified
  REGION 1..1238: note = Description of Unknown: uncultivated organism sequence
  REGION 1..1238: note = Category: MG13 effectors
  REGION 1..1238: note = Description: MG13-27 effector
MNTYEELTGSYPLIKTINLALNPIGETLRHIEEKGFIAQDEQRAEDYEKVKDIIDRYHKYFITMCLDEFKFSTDKLMKYVALAEDSKRDEDAFDEVKTQLRKEIVAAFEKGETYNDLFKKKLILKHLPNFVTDENEKRLVASFNKFTTYFKKFHKCRKNMYSDEAKSTAIAHRLIHENLPMFYDNMKSFKKIAACEDCIDFAEFEAAFSEEFKEFKVEHLADIFQLEYFNNTLTQRKIDFYKLVIGGKVLEDGTKLKGVNEYVNLYNQQHKDARLPLLKPLYKMILSDKVALSWLPEKFESDEEMVEAIQEMHKNLKGTLIDNAENNLRDLLLNMGKYDLAHIYIANDLGLRDISQSIFGQYDVYTSALKQALRNEYAPTTDECQNLELYDERINKLFKSRTSFSIAELNSLADCDHTIENHFKQLGAAERNGKQEIDLFSQIETAYAKASDILSGKHGNIGQSEVETALVKNLLDAYKSLQHFIKPLLGHGDEAEKDNEFDAKLRAAWDALDIINPLYNKVRNWLTRKPYSTEKIKLNFENAQLLDGWDKNNETVNTSVLLRKDGMYYLAIMNKKANDAFACDELPSDGDCYEKIDYKQISKAKMNLPHGFFPQKNIDKYAPSEEIKDIYSKRTYRKGKNFNLEHCRRLIDFFKRSFTKHKDWKNFQFIFSPTEKYECISSFYNEVEQQAYMLDFRKVSVAYINQLVESGKLYLFQIWNKDFSKFSKGTPNMHTLYWKQLYDERNLADVVYKLNGQAEVFYRKRSLKLEETTVHQAHQPIPNKNKQNEKRQSQFNYDIVKNRRFTVDKFLFHVPIVLNFKATGGGDINDKVLEIIRNNGIKHVIGIDRGERHLLYLSLIDLKGNIIKQMTLNDIVNEYRGHTYATNYKDLLAEREDNRTEARRNWKRIDNIKEIKQGYLAQVVHIISKMIVEYKAIVILEDLNMGFMRGRQKIERSVYEQFEKSLIEKLNYYVDKQKDEKEVGGLLHALQLTSKFKSFKELGKQSGCLFYVPAWNTSKIDPVTGFVNLFDTRYVNVEKARAFFSNFDAIRYNAEKDWFEFAFNYSNFTDKAKDTREEWTLCTHGTSIRMFRNPSKLDHWDGEEVVLTDEFKKVFEKAGIDICGNLKNAICALKEKAHLEKLMQLMKLLLQMRNSKPNTEVDYMISPVADEQGNFYDSRCGNSALPDNADANGAYNIARKGLWVIKQIRETPAGKRPDWAIKNKEWLKFAQQKPYLDD

SEQ ID NO: 62 - protein, 1249 aa, unidentified
  REGION 1..1249: note = Description of Unknown: uncultivated organism sequence
  REGION 1..1249: note = Category: MG13 effectors
  REGION 1..1249: note = Description: MG13-28 effector
MKQFTNLYPVSKTLRFELQPIGKTKENIEKKGILTRDEKRAKDYQIVKGFIDEYHKQFIKDRLWNFKLPLASEGNLDSLEEYQMFYEMPRRDDAQETDFSEVKDNLRAIIANRLRESGSAYDRIFKKELIREDLVEFLSDEDDKNIVRQFADFTTYFSGFHENRRNMYSAEEKSTAIAYRLIHQNLPKFMDNMKAFTKIAKTSVAEHFADIYAGWKEYLNVGSIEEVFRLDYFSETLTQPHIEVYNYIIGKKVLEDGKEIKGINEYINLYNQQQKDKSKRLPFLVPLYKQILSDREKLSWLAEEFDSDEKMLAAIDKLYTHLHELLMGEENESLRSLLMHMKDYDLSQINITNDLSLTDISQHLFNRYDVYTNGVKEQLKGITPRKKKENDEDFEDRISKIFKTQKSFSISLLNGLPHPEIEDSQPRRIEEYFMAMGAVNTATTQRENLFSKIESAYEDARAFLQMKDTGDSLSQNKPAVAKIKALLDAFKDLQHFIKPLLGSGEELEKDELFYGSFQMIWDELDTVTPLYNKVRNWLTRKPYSTEKIKLNFDNSQLLGGWDVNKEPDCTGVLLRKDGFFYLGIMDKRYNHIFEVDLPHSDDDCYDKVDYKLLPGANKMLPKVFFSKSRIDEFAPSAAIVSSYKRGTHKKGKNFDLSDCHRLIDFFKQSIQKHADWCKFGFHFSDTQTYEDISGFYREVEKQGYMLSSHQVPSSYINELVDGGKLYLFRIWNKDFSENSKGTPNLHTLYWKMLFDKRNLSDVVYKLNGQAEVFFRKASIKPENRVVHKANQSITNKNALNKKTTSTFEYDIIKDRRYTVDKFQFHVPITINFKASGQTNINPIVQETIRQGGFKHIIGLDRGERHLLYLSLIDLNGNIVKQMTLNDIVNEYNGQTYKTNYHDLLTKREGERTDARRSWDTIETIKELKEGYLSQVIHIISKMMVEYKAIVVLEDLNTGFMRGRQKIERQVYEKFEKMLIEKLNCYIDKKADATDATGLLHPLQLTCDAKKWNRSHQCGCLFYIPAWNTSKIDPVTGFVNLLDTRYETREKAHLFFSKFQRISFNQKKGWFEFAFDYADFTTKAEGTRTQWTLCTYGERIRTFRNPQKNNQWDNERIVLTDEFKRIFDEKGIDIFGNLKDAICNQRDAKFFKDLLGLMKLLLQMRNSITNSEEDYLLSPVADEKGHFFDSREGISSLPIDADANGAYNIARKGLWVIRKIQETPENERPSLSITNKEWLQFAQTKPYLKE

SEQ ID NO: 63 - protein, 1262 aa, unidentified
  REGION 1..1262: note = Description of Unknown: uncultivated organism sequence
  REGION 1..1262: note = Category: MG13 effectors
  REGION 1..1262: note = Description: MG13-29 effector
MRDFNEFVGLYPISKTLRFELKPIGKTLEHIQRNKLLEDDAVRADDYVKVKKIIDKYHKCLIDEALSGFTFETEADVRSNNSLSEYYLYYNLKKRNEQEQKTFKTIQNNLRKQIVNKLTQSEKYKRIDKKELITTDLPDFLTNESEKELVEKFKNFTTYFTEFHKNRKNMYSKEEKSTAIAFRLINENLPKFVHNIAAFEKVASSPLAEKINALYEDFKEYLNVEEISRVFRLDYYNELLTQKQIDLYNAIVGGRTEEDNRIQIKGLNQYINEYNQQQTDRSNRLPKLKPLYKQILSDRESVSWLPPKFDSDKDLLIKIKECYDTLSEREKVFDKLESILKSLSTYDLSKIYISNDSQLSYISQKMFGRWDIIGKAIREDCAKRNPQKSRESLEKFAERIDKKLKAIDSISIGDVDECLAQLGETYVKRVEDYFAAMGASDMGEKQTDTTSFKKNIEGAYESVKELLNNADNITDNNLMQDKGNVVKIKNLLDAIKDLQRFIKPLLGKGDEADKDGVFYGEFTSLWTKLDAVTPLYNMVRNYLTSKPYSTKKIKLNFENSTLMDGWDLNKEPDNTTVIFRKDGLYYLGIMGKKYNRVFVDREDLPHDGECYDKMEYKLLPGANKMLPKVFFSETGIQRFRPSEELLGKYERGTHKKGAGFDLGDCRALIDFFKKSIERHDDWKKFDFKFSDTSTYQDISEFYREVEQQGYKMSFRKVSVAYIKSLVEEGKLYLFQIYNKDFSAHSKGTPNMHTLYWKMLFDEENLKDVVYKLNGEAEVFFRKSSITVQSPTHPANSPIKNKNKDNQKKESEFKYDLIKDRRYTVDKFLFHVPITMNFKSVGVSNINQLVKRHIRSATDLHIIGIDRGERHLLYLTVIDSRGNIKEQFSLNEIVNEYNGNTYRTDYHELLDTREGERTEARRNWQTIQNIRELKEGYLSQVIHKISELAIKYNAVIVLEDLNFGFMRSRQKVEKQVYQKFEKMLIDKLNYLVDKKKPVAETGGLLRAYQLTGEFESFKTLGKQSGILFYVPAWNTSKIDPVTGFVNLFDTHYENIEKAKGFFDKFKSIRYNSDKDWFEFVVDDYTRFSPKAEGTRRDWTICTQGKRIQICRNPQRNNEWEGREIDLTKAFKEHFEAYGVDISKDLREQINTQNKKEFFEELLRLLRLTLQMRNSMPSSDIDYLISPVADDTGCFFDSRKQAELKENAVLPMNADANGAYNIARKGLLAIRKMKQEENDSAKISLAISNKEWLKFAQTKPYLED

SEQ ID NO: 64 - protein, 1232 aa, unidentified
  REGION 1..1232: note = Description of Unknown: uncultivated organism sequence
  REGION 1..1232: note = Category: MG13 effectors
  REGION 1..1232: note = Description: MG13-30 effector
MQQFTNLYPVSKTLRFELIPDERTRAMLEHSDLIAQDEHRAASYKLVKKIIDRYHMAYIDSVLEALILPSGYLKGMCDLYLKSQKSDADKKALEQLQDKLRKMIAGALTKDNRFKRIDKKELIREDIMSVITPEERALIDEFRDFTTYFTGFHKNRQNMYSAEAQSTAIAYRLIHENLPKFIDNMATFARIAASPVAEKFPQLYQEMSEYLNVREIGDLFKLDYYTELLTQRQIDVYNAVIGGRTQDDGDKKIQGINEYVNLYNQQQATKETRIPKLKPLFKQILSDREAVSWLPEEFASDKDMLEAVRDCCNSLNSHVFGMLRELLTNLSGYRLDGIYIPNDLSISDISQAMFKDWAVIKKGIVEDLKRNYPPKRSEKADNYEERIRKLIKRENSFSIGYLNSCINKDICDYFASLGAIDDGENQAVNLFMRIQNAYTEVQSLLENGYPEDCNLAQDKDNVAKLKTLLDAIKALQHFVKPLLGNGDEPDKDERFYGELAVLWEELDRVTPLYNKVRNRMTRKPYSIEKFKLNFENSTLLDGWDVNKERDNTCVILRREGKYYLGIMRKQFNDIFVNVPNAQGEDNFEKMEYKLLPGANKMLPKVFFSKSRIKEFNPSPTLLEHYHQGTHKKGDNFSLQDCHELIDFFKVSLAKHEDWGKFDFHFSPTESYEDMSGFYREVEQMGYKISYKLIPFSYIDQMVEEGKLFLFQIYNKDFSRFSKGTPNLHTLYWKMVFDERNLADVVYKLNGQAEVFYRKKSLAYKRPTHPAYQAIKNKNSEGKKAESTFDYDIVKDRRFTTDKFQFHVPITINFKATGTGNINVRVNQFIHDHDDLHFIGIDRGERHLLYVTVIDSKGRIKEQFSLNEIVNEYQGTKYKTNYRSLLDKREEERQRERQSWNTIEGIKELKQGYLSQVIHKIVTLMVKYRAVVVLEDLNMGFKRGRQKVESSVYQQFEKALIDKLNLLIDKRIDATAPGGLLHAYQLTNKFTSFREMRRQNGFMFYIPSWNTSKIDPVTGFVDLLHPRYESVEKSRVFFSKFKSIRYNQDNGWYEFSLDYKDFTSKADGSRTEWTLCTHGTRVVTYRNPKKNSSWDSREINLTEEFNALFEAYGIQAQGNLKQAIAEQSEKDFFDKLTHLLSLTLQLRNSITGTEVDYMISPVADEYGHFFDSRTCGKDLPQNADANGAYNIARKGLWVARQIQASAVDEKVDIIMSNKEWLVFAQEKPYLADD

SEQ ID NO: 65 - protein, 1262 aa, unidentified
  REGION 1..1262: note = Description of Unknown: uncultivated organism sequence
  REGION 1..1262: note = Category: MG13 effectors
  REGION 1..1262: note = Description: MG13-31 effector
MRKFDEFVGLYPISKTLRFELKPIGKTLEHIQRNKLLEHDAVRADDYVKVKKIIDKYHKCLIDEALLGFTFETEVDGRSNNSLSEYYLYYNLRKRNEQEQKTFKTIQNNLRKQIVNKLTQSEKYKRIDKKELITTDLPDFLTNESEKKLVEKFKNFTTYFTEFHKNRKNMYSKEEKSTAIAFRLINENLPKFVDNIAAFEKVASSPLAEKINALYEDFKEYLNVEEISRVFRLDYYNELLTQKQIDLYNAIVGGRTEEDNRIQIKGLNQYINEYNQQQTDRSNRLPKLKPLYKQILSDRESVSWLPPKFDSDKDLLIKIKECYDALSEREKVFDKLESILKSLSTYDLSKIYISNDSQLSYISQKMFGRWDIIGKAIREDCAKRNPQKSRESLEKFAERIDKKLKAIDSISIGDVDECLAQLGEPYVKRVEDYFAAMGTSDMGEEQTDTTSFKKNIEGAYKSVKELLNNADNITDNNLMQDKGNVEKIKNLLDAIKDLQRFIKPLLGKGDEADKDGVFYGEFTSLWTKLDQVTPLYNMVRNYLTSKPYSTKKIKLNFENSTLMDGWDLNKEPDNTTVIFCKDGLYYLGIMGKKYNRVFVDREDLPHDGECYDKMEYKLLPGANKMLPKVFFSETGIQRFRPSEELLGKYERGTHKKGAGFDLGDCRALIDFFKKSIERHDDWKKFDFKFSDTSTYQDISEFYREVEQQGYKMSFRKVSVDYIKSLVEEGKLYLFQIYNKDFSAHSKGTPNMHTLYWKMLFDEENLKDVVYKLNGEAEVFFRKSSITVQSPTHPANSPIKNKNKDNQKKESKFEYDLIKDRRYTVDKFLFHVPITMNFKSVGGSNINQLVKRHIRSATDLHIIGIDRGERHLLYLTVIDSRGNIKEQFSLNEIVNEYNGNTYRTDYHELLDTREGERTEARRNWQTIQNIRELKEGYLSQVIHKISELAIKYNAVIVLEDLNFGFMRSRQKVEKQVYQKFEKMLINKLNYLVDKKKPVAETGGLLRAYQLTGEFESFKTLGKQSGILFYVPAWNTSKIDPVTGFVNLFDTHCENIEKAKGFFDKFKSIRYNSDKDWFEFVVDDYTRFSPKAEGTRRDWTICTQGKRIQIYRNPQRNNEWEGREIDLTKAFKEHFEAYGVDISKDLREQINTQNKKEFFEELLRLLRLTLQMRNSMPSSDIDYLISPVADDTGCFFDSRKQAELKENAVLPMNADANGAYNIARKGLLAIRKMKQEENDSAKISLAISNKEWLKFAQTKPYLED

SEQ ID NO: 66 - protein, 1275 aa, unidentified
  REGION 1..1275: note = Description of Unknown: uncultivated organism sequence
  REGION 1..1275: note = Category: MG13 effectors
  REGION 1..1275: note = Description: MG13-32 effector
MNNLNDLTGQYPVSKTIRFDLQPIGKTKENIEKGGILQQDEQRAEDYKTVKGFIDEYHKQFIKDRLWNFRLPLISEGHLDSLEEYQTLYLLAKRNDAQEAEFKEVKDNLRSIIARRLTEKGSAFERIFKKELIREDLIDFVEKPEDKDLVKSFADFTTYFTEFHKNRANMYTAEEKSTAIAYRLIHQNLPKFMDNIKAFAKIAQTSVAGHFVEIYNGSKEYLNVGSLEEVFQLDYFSDTMTQPHIEVYNSIIGKRVLEDGTEIKGINEYVNLYNQQQKDKRQRLPFLVPLYKQILSDREKLSWLAQEFDSDKKMLAAINETFIHLREILMGEDSESLRSILTHLKDFDLTQINITNDLSLTDISQHLFKRFDVFSNGIKAKIRSITPKKKKESDEELEDRVSKIFKTQKSFSIAFLDNLPQPEMEDGKRRSVADYFTALGAVNNEVTQKENLFAQIEIAYEDARDVLQMTETGDTLSQDKPAVAKIKALLDALKDLQHFIKPLRGSGEENEKDELFYGSFLMMWDELDTVTPLYNKVRNWLTRKPYSTEKIKLNFDSPTLLNGWPNPQTNSGAIFRDEEGLYYLAILDAQNRACLNELSSNVNGNEDHIEMMKYLQGGDMGKNVQNLMVIDGEVRKVNGRKETSGEFAGQNLRLENAKHQYLPKNINEIRLKQSYLTSSPTFNKKDLVSFIEYYIPLVEAYYSDYVFHFRKSSEYKSFADFTEHINQQAYQVQFKPVSKTSLYSLVEEGKLYLFRIWNKDFSEFSKGTPNLHTLYWKMLFDERNLADVVYKLNGQAEVFYRKASIKPENKIVHPANRAIANKNELNKKRTSSFDYDIIKDRRYTVDKFQFHVPITINFKATGQTNVNPIVQDTIRRGGFTHIIGIDRGERHLLYVSLIDLKGNIVKQMTLNEILNEYKGLTHKTNYHDLLAKREGERTDARRSWDTIENIKELKEGYLSQVVHIISKMMVEYNAIVVLEDLNPGFMRGRQKIERQVYEKFEKMLIEKLNCYIDKKAEPIEIGGLLHPLQLSCDIKKWKKSHQCGCLFYIPAWNTSKIDPVTGFVNLFDTHYETREKARSFFSKFQRIHFNSEKNWFEFTFDYGNFTTKAEGTRTQWTLCSYGTRIRNFRNPLKNHQWDDEEVELVDEFKHLFDKYSIDIFGNLKESICNQTDAQFYKELMGLMKLLLQMRNSRTNSEVDYLLSPVADEQGHFFDSREGIGSLPDNADANGAFNIARKGLWIIRKVQGTPSDEKMSLAISNKEWLQFAQNRPYLND

SEQ ID NO: 67 - protein, 1249 aa, unidentified
  REGION 1..1249: note = Description of Unknown: uncultivated organism sequence
  REGION 1..1249: note = Category: MG13 effectors
  REGION 1..1249: note = Description: MG13-33 effector
MKEFTNLYPVSKTLRFDLQPIGRTKENIERNGILQRDEKRAEDYKTVKGFIDEYHKQFIKDRLWSYKLPLYSEGHLNSLEEYQALYELSKRDETQEREFAEVKDNLRAFIAKRLTEGGSAYDRIFKKELIREDLVDFLENEDDREIVRQFADFTTYFGGFHENRKNMYSAEEKSTAIAYRLIHQNLPKFMDNMKAFAKIAESSVSEHFEEIYEGWKEYLNVGSLEEIFRLDYFSVTLTQPHIEVYNYIIGKKILEDGTEIKGINEYVNLYNQQQKDKTKRLPFLVPLYKQILSDREKLSWMAEEFDSDDQMLTAINESYSHLHDLLMGDDNESLRSLLEHLKDFNLEQINITNDLSLTDISQHLFGRYDVFTNGIKDELRIITPRKKKEDDESFEDRISKIFKTQKSFSIALLDKLPQPVMEDGKLRTVEDYFLSLGAVNTGLTQKENLFAQIENAYEDARTILQLKNTDDTLSQDKPAVAKIKTLLDALKDLQHFIKPLLGSGEENEKDELFYGSFQMMWDELDTVTTLYNKVRNWLTRKPFSTEKIKLNFDNSQLLGGWDVNKEPDCTGVLLRKDGLYYLGIMDKKSNRIFEADVTPTDGVCYEKFDYKLLPGANKMLPKVFFSKSRIDEFSPSETIIASYKRGAHKKGANFNLAECHRLIDFFKQSISKHEDWSKFGFHFSDTKTYEDISGFYREVEQQGYMLSYHPVSSSYINQLVDEGKLYLFRIWNKDFSEFSKGTSNLHTLYWKMIFDEQNLANVVYKLNGQAEVFYRKASIKSENRIIHKANQPINNKNELNKKDTSTFEYDIIKDRRYTVDKFQFHVPITINFKATGQTNINPIVQDVIRQGGFSHIIGIDRGERHLLYLSLIDLQGNIVKQMTLNDIINEYKGQTYKTNYHDLLAKREGERTDARRSWETIETIKELKEGYLSQVVHIISKMMVEYNAIVVLEDLNTGFMRGRQKIERQVYEKFEKMLIEKLNCYIDKHAEPTEETGLLHPLQLTCDSKKWTRSHQCGCLFYIPAWNTSKIDPVTGFVNLLDTRYDTREKARLFFSKFQRISFNVEMGWFEFAFDYNNFTTKAEGTRTKWNLCTFGERIRSFRNPKKNNQWDDERIVLTDEFKQLFDKYDIDIAGNLKEAISAQSDAQFFKELLGLMKLLLQMRNSVTNSEEDYLLSPVADENGHFFDSREGISSLPIDADANGAYNIARKGLWVIRKIQETQEDEKVSLNITNKEWLQFAQTKPYRND

SEQ ID NO: 68 - protein, 1240 aa, unidentified
  REGION 1..1240: note = Description of Unknown: uncultivated organism sequence
  REGION 1..1240: note = Category: MG13 effectors
  REGION 1..1240: note = Description: MG13-34 effector
MKTFNDLTGLYSLSKTLRFELKPVGKTKDNIETKGIIAQDEKRAEEYKKVKDIIDRYHKSFIDMCLAGLVLKTTSDGNNDSLKDYVALASKSNRDEKEDKDFDDVKTVLRKHIVDAFKKGNSYGDLFKKELIQNHLPDFVTDEQEKLMVENFSKFTTYFTGFNENRKNMYSDEEKSTSIAYRLIHENLPMFIDNIKSFAKITEQEDIDFIADVEHSFKEELKGKSITQMFCLENFTETLTQGHIELYNKIVGGRVEDSGVKKQGINEYVNLYNQQHKDARLPLLKPLYKMILSDRVALSWLPEEFATDEEMLAAINETHGNLKNVMTDVRKLLQNIDSYDTEHIYIANDKGLTDISQQIFGQYDVYTSAIKAELRDSITPSAKERKDPELLEKRINDIFKASKSFSIEYLNSHVDSDKTIQSYYKELGAYDRNGEQRINLLSQIELAYVDAHDVLLGKHTNLNQSEDSIKKIKALLDAYKALQHFIKPLLGNGDEADKDNEFDAKLRAIWDELDIVTPLYDKVRNRLTRKPYSTEKIKLNFDNAQLLNGWDMNKEPDCTSVLLRKDGQYYLAIMDKKSNHAFDIDELPCDGECYEKMEYKLLPGANKMLPKVFFSKSRIKEFAPSKEILDAYQKGTHKKGPNFSIKDCRRLIDFFKDSIAKHEDWSKFPFAFSDTSTYEDISGFYREVEQQGYMLGYRKVSVSFINQLVDEGKLYLFQIWNKDFSEYSKGTPNIHTLYWKMLFDERNLANVVYKLNGQAEVFYRKRSLDLDKTTIHRANQPIANKNKQNEKRESTFSYDIVKNRRYTVDKFQFHVPITINFKATGSDNINASVLDVIRNNGIEHIIGIDRGERHLLYLSLIDMKGNIVKQMTLNDIINEYKGNTYTTNYKELLQAREGDRKEARQNWQKIENIKELKEGYLSQVVHVITKMMVEYKAIVVLEDLNGGFMRGRQKIERQVYEKFEKMLIDKLNYYVDKQKDVNDNGGLLHAYQLASKFDTFKKLGKQSGCLFYIPAWNTSKIDPVTGFVNMFDTRYENADKARKFFNKFKSISYNADKEWFEFVIDDYSKFTDKAKDTRTDWVLCTYGTRIKTFRNPEKLNQWDNKEIVLTDEFKKVFMEAGIDINGNLKEAICTLTEKKHLESLMQLMKLLVQMRNSETNSEVDYLLSPVADTEGHFYDSRNCGDNLPKDADANGAYNIARKGLWAVMKIKASKPQENLKLGISNKEWLQFAQEKPYLND

SEQ ID NO: 69 - protein, 1251 aa, unidentified
  REGION 1..1251: note = Description of Unknown: uncultivated organism sequence
  REGION 1..1251: note = Category: MG13 effectors
  REGION 1..1251: note = Description: MG13-35 effector
MKEFINLYPVSKTLRFELQPIGKTKENIERNGILKRDSKRAEDYKIVKGFIDEYHKQFIKDRLWSFKLPLQSEGHLDSLEEYQTLYELSKRDATQEAEFTEVKDNLRGIIAKRLTQSGSNYERIFKKELIREDLVEFLENEEDKEIVRQFADFTTYFVGFHENRKNMYSAEEKSTAIAYRLIHQNLPKFMDNMKAFAKIAETTVSEHFADIYEGWKEYLNVGSIEEMFRLDYFSETLTQTHIEVYNYIIGKKILEDGTEIKGINEYVNLYNQQQKDKSKRLPFLVPLYKQILSDREKLSWLADEFDSDEKMLAAINELYINLHDLLMGDENESLRSLLTHLTDFDLTQINITNDISLTDISQHLFGRYDVFTNGIKDKLRVITPKKKKESDEDFEDRISKIFKSQKSFSIDFLNKLPQPVMDDGKPRTIEDYFMALGAVSTDAVQKENLFAQIENAYEDARTILQMNDTGDTLSQNKPAVAKIKVLLDTLKDLQRFIKPLLGSGEENEKDELFYGSFQMMWDELDAVTPLYNKVRNWLTRKPYSTEKIKLNFDNSQLLGGWDVNKEPDCTGILLRKNGYYYLGIMDKKSNHAFDVEISPSDGECYDKIDYKLLPGANKMLPKVFFSKSRIDEFAPSETIVSNYKRGTHKKGADFSLSDCHKLIDFFKQSISKHEDWSKFGFHFSDTDTYEDISGFYREVEQQGYMLSSHRVSVAYVNQLVDEGKLYLFRIWNKDFSEYSKGTANLHTLYWKMLFDERNLADVVYKLNGQAEVFYRKASIKSENRIVHKANQPIANKNELNAKRNSTFEYDIVKDRRYTVDKFQFHVPITINFKAAGQTNINPIVQDTIRRGGFTHIIGIDRGERHLLYLSLIDLKGNIIKQMTLNDIVNEYKGQTYKTNYHDLLAKREGDRTEARRSWDTIETIKELKEGYMSQVVHIISKMMVEYNAIVVLEDLNPGFMRGRQKIERQVYEKFEKMLIDKLNCYIDKQASPTSEGGLLHPLQLTNKFESFRKLGKQSGCLFYIPAWNTSKIDPVTGFVNLLDTRYDTREKARVFFSKFQRISFNPNKGWFEFALDYYNDFTAKAEGTRTQWTLCTYGERIRTFRNPQKNHQWDDERIMLTDAFKQLFERYGIDINGNLKEAIGSQTDAQFYKDMMGLMKLLLQMRNSITNSEEDYLLSPVADEKGNFFDSRKGIESLPIDADANGAYNIARKGLWAIRKIQETRDDEKPSLNITNKEWLQFAQTKPYFND

SEQ ID NO: 70 - protein, 1278 aa, unidentified
  REGION 1..1278: note = Description of Unknown: uncultivated organism sequence
  REGION 1..1278: note = Category: MG13 effectors
  REGION 1..1278: note = Description: MG13-36 effector
MKKFTNKFQLSKTLRFELIPQGKTLENIKSKGLIAKDDQRAISYKKMKKSIDEYHKYFIGLALSNVKLSKLQDFADLYFETNPDKKKEDAYKKSLEKIQTDLRKEIVKGFKEGDAKEIFGKLNKKELFTELLEEWKQEKGDFYFDEEFKTFTTYFTGFNKNRANMYSDEAKSTAIAFRLIHENLPKFLDNIKVFEKAKSIPQLQENCKLLYKEIEEYLNISKIDEVFELGYFNEALTQNDIDVYNLIIGGRTAKEGVQKIQGLNEYINLYNQKQDKKNRIPKLKVLYKQILSDRENISFLPEKFNDSNEVLEAIENFYKSNLLEFQTGDMEHSENVLASLKTLVGEIANFDTSKIYLRNDKSITDISQTIFGDWGIIKSALEFSFIQGLIIGKKGISIKQEVEKDKYLSKQSYYSIAEIENALMLYKDQNELLKELKPTDLPVANYFKNHFKIKVKKDDNSEKEFDLITNIEDKYRCIKGILANDYPEDKDLKSTNNPDTLNIKLFLDSLMEFLHFIKPLALPKDTVLEKDEHFYNPFVIGYEQMQLLIPLYNKVRNYATQKPYSEEKFKLNFENSTLLSGWDVNKEETNTSILFIKEGIYYLGVMDKDHNKIFRDIPKARSNSVYQKINYKLLPGASKMLPKVFFSDKNISFFNPSDEIQNIRNHGTHTKGGSPQEGYSKLDFNVNDCRKMIDFFKTSIEKHPEWKNFGFQFSDTTTFDSIDAFYREVEAQGYTISYSNLDKDYIDQLVSEGKLYLFKIYNKDFSSYSKGQPNMHTLYWKALFDKDNLKDVVYKLNGQAELFYRKKSINYDEKTMKEGHHYQELKDKFAYPIIKDKRFTEDKFHFHVPITLNFKASGNDYINADVLTYLKNNPDVNIIGLDRGERHLIYLSLINQKGEVLKDKNGNPIQYSLNEIINEHKGKTYPTNYQTLLDSKEKERDSARKNWGEIENIKELKEGFISQVVHKIAHLMIDFNAIVVMEDLNFGFKRGRFKVEKQVYQKLEKMLIDKLNYLVFKDKEPTEIGGIYNALQLTNKFKSFKEMGKQSGFLFYVPAWNTSKIDPTTGFVNLFNTKYETIEKAQEFFSKFNDIRFNEKENHFEFEVDDYTKFNLKAEGTKTDWVVCTNEDRILTFRNPETNNNWDNKKVVLTDEFVKFFTENQIEYKTNLQTQILEKTEGKFFKDLFHLFKLTLQMRNSITNSEVDYLISPVKNNDSYFYDSRKADNTLPQDADANGAYHIAKKGLWVLEQINQYEKDDNWKKLQLAISNKMWLNFVQKK

SEQ ID NO: 71 - protein, 1253 aa, unidentified
  REGION 1..1253: note = Description of Unknown: uncultivated organism sequence
  REGION 1..1253: note = Category: MG13 effectors
  REGION 1..1253: note = Description: MG13-37 effector
MKNLTEFTGLYPVSKTLRFELKPQGRTLEYIEKNGLLEQDEHRASSYILVKKIIDDYHKAFIANALRDFKLYSLEDYYLYYNIQKRDDEQKKKFEDIQSKLRKQIADRFTKEESFKNLFAKELIKENLIEFVQTVEDRELIKEFESFTTYFTGFHENRKNMYSAEEKSTAIAYRLIHQNLPKFIDNMRVFEKIANSPVKDKFQTILSDNQLGPVIQVMAVEDMFRLDYFNETLTQIGIDKYNSLCGGFSPNEGKEKIQGLNEYINLYNQTAKKEERIPKLKPLFKQILSDRSTASFIPDEFENDSEVLESIELFYQEVNEQVINKNVEGEHSLKELLKSLPEYELTKIYLRNDLSITDISQKIFGDWGVFQKAMNTWFELNYNGKAKFGTEKYEEEQRKYFANLDSFSIGFINECLLQLDTPYHKNIADYFALRGKTDTETQDLFAVLEDKYNAVTDLLNNPYPQDQDLAQDQKQVDKLKELLDAVKAIQWFIKPLLGKGNEADKDERFYGEFTSLWITLDQITPLYNKVRNYMTRKPYSTDKIKLNFENSYFLNGWAQDYESKAGLIFTKDGNYYLGINDKKLSNEDKTLLKSNSELNLAKRIVLDFQKPDNKNIPRLFIRSKGNNFAPAVEKYNLPIHEVIEIYDNGKFKTEYRKINETDYLKSLHLLIDYFKIGFSKHESYKHYPFSWKNTTEYKDIAEFYHDVEVSCYQVFEENVNWDTLMNFVDEGKLYLFQLYNKDFSPNSKGTPNLHTLYWKMLFDADNLKDVVYKLNGQAEVFFRKSSIKPENIVLHKANEAVNNKNEQNTKKQSRFEYDIIKDKRYTVDKFQFHVPITMNFKARGLNNINTEVNQWLQKSDNVHIIGIDRGERHLLYLTLIDSKGNIKQQFSLNEIVNEYEGKTYKTDYHKLLDNREGNRDEARKNWKTIETIKELKEGYLSQVIHKISELMVEYNAIVVLEDLNMGFMRGRQKVEKQVYQKFEKMLIDKLNYLVDKKQNPAEMGGTLHAYQFTNKFESFQKMGKQSGMLFYVPAWNTSKMDPVTGFVNLFDTRYENMEKARSFIGKFDTIRYNPKKEYFEFDFDYNKFTAKAEGTRTRWTLCTNDTRIETFRNPAKNSQWDNREIILSDEFINLFKLYNIDYQNSDLKVQICKQTEKAFFERLLHLLKLTLQMRNSMTGTEVDYLISPVTNSRGEFYDSRTASDILPKNADANGAYNIARKGMWVIEQIRKATDFRKLKLAISNKEWLSFVQH

SEQ ID NO: 72 - protein, 1251 aa, unidentified
  REGION 1..1251: note = Description of Unknown: uncultivated organism sequence
  REGION 1..1251: note = Category: MG13 effectors
  REGION 1..1251: note = Description: MG13-38 effector
MNTFNGFTGLYPLSKTLRFELKPIGKTLQFIINNGILEQDKHRADSYSQVKEIINEYHKAFIERGLTGFELKYNNEGKKNSLLEYFMYYNIKNREERDKNTYKQIQNNLRKQITDRLSKDEAFQRINKKELIQQDLISFVETQPNSAKKRALVEEFRNFTTYFSGFHENRKNMYSAEEKSTSIAYRLINENLPKFVDNIQVFSKVMGTEISKKMPQLYQEFQKFLNVENIEEMFHLKYFSSTLTQSQIDVYNAIIGGITSDDNVRIKGLNEYINLYNQQHKDTKLPKLKLLLKQILSERNPVSWLPEKFDSDEQMLTAIKQCYENLSERVFGNTSLRLQLELLGDFDLNGIFISNDPQLADISQKIFGNWGIIQKAIQTKIANCLPQKRKESFEDYQERITKRFKSFDSFSIGYIEECLSAVGIPSNKIEKYFSDLGVVNNRIEQKENHFVRIANAYEEIRDLLNNPYPMEKRLSQDKAHVEKIKQLLDAIKALQHFIKPLLSGGDEPNKDERFYGEFTALWNELDQITPLYNMVRNYITRKPYSEKKIKLNFENSTLMDGWDLNKEKDNTTIILRKDNLYYLGIMNKKFNKIFDKYPGSTSDEYYEKMEYKLLPGANKMLPKVFLLSKSGLDEFNPSQEIRDNYEKGTHKKGINFKLEDCHALIDFFKTSINKHSDWKKFDFKFSETSTYEDLSGFYKEVEQQGYKVSFRNVSANYIDTLIDEGKLYLFQIYNKDFSPYSKGIPNMHTLYWKMLFDEQNLENVVYKLNGQAEIFYRESSLEYHHPTHPANQPVMNKNQSNVKQESVFPYDLIKNRRYTIDKFQFHVPITMNFKSNGVNNINQQVNECLQHADDTHIIGIDRGERHLLYLVVIDKKGNIKEQCSLNEIMNEYNGNRYSTDYHNLLNRREDERLKARQSWQSIESIKDLKEGYLSQVIHKISELIVKYNAIVVLEDLNLGFIRGRQKIEKQIYQKFEKMLIDKLNYLVDKKKEPNELGGILKAYQLANKFESFQKMGKQSGFLFYIPAWNTSKIDPQTGFVNLLDVHYESTEKAKSFFCKFDSIKYNTSKDWFEFELDYSKFNQKAEGTRIHWTLCSYGTRIETLRYVSKNSQWDSVEVNLTEKFKEHFNKYHIDIHTNLKEAISRQIEKNFFEGLLHLLKLTLQMRNSKIGADIDYLISPVADDNGIFYDSRSCDPSLPANADANGAYNIARKGLWILKQIKETVDLKKLKLTISNKEWLRFAQEKPYLND

SEQ ID NO: 73 - protein, 1249 aa, unidentified
  REGION 1..1249: note = Description of Unknown: uncultivated organism sequence
  REGION 1..1249: note = Category: MG13 effectors
  REGION 1..1249: note = Description: MG13-39 effector
MKNFESFTNLYPLSKTLRFELRPIGRTLENIQANGLLEQDNHRAESYKLVKAIIDRYHKVFIDEALSHCVLPVENSGNKNSLSEVYQYLTTKDHSEKETDDFNKTQDNLRKMIVSALKKDTHFGRIFKKELIREDLLNNDLQGFDLNEEEYDLIKEFRDFTTYFVGFNENRANMYSEEAKSTAIGYRLIHENLPKFIDNMVIFQKVKVSPVSEYFANIETEMEDMLQGIKVEDIFDLNFFNQVLVQRFIDLYNAVIGGQVASEEDHRKGLNQYINEYNQVQKDKKDRLPKFKPLFKQILSDRIHASWQIDNFESDNEVLKAIENAYETLDEEVISRKDSNLPLLFASISDFDLSGIYVSAKAITDFSQQIFKDWNAIDSALEAACRRSNQPKKKETEEKYAERIKKQRSHIDSYSVGEIIESLVAFQPNPEKSILDYLGGMGRREDKPSIIESIKSAYRDVEELLKTEYPANKNLALDKDNISKVKALLDAIKELQFFIKPLLGTGKESGKDERFYGEFVDYWQTLDIITPLYNKVRNYATRKPYSTAKFKLNFENSTLLNGWDVNKEPDNTSVLLRKDGLYYLAIMKKSCNRVFAVDQYDTVGDCYEKIDYKLLPGANKMLPKVFFAKSRIDEFAPSREVLDIYKRGSFKKGEEFCKADLHTLIDFYKASITKHEDWKKFGFEFSPTSSYDDISGFYREVEQQGYQIRFRKVSCTYIDSLVDQGQIYLFQIYNKDFSPFSKGTPNMHTLYWKMIFDERNLKDVVYKLNGQAEIFFRKSSLPVETPTHPANQPIANKNPLNRKKESLFTYDIVKNRRYRYDKFQFHVPITMNFKSIGSEYINDQVQDYIRQSKDLHFIGIDRGERHLLYLTVIDSKGIIEEQFSLNVINNEYNGTTYSTNYHDLLEERGDDRTKARREWLAIESIKELKEGYLSQVVKKITDLMIKYNAIVVLEDLNMGFKRGRQKVESSAYQQFEHKLIDKLNYLAGKTAPIDKVGGLLKAYQLATPYQNEMGFQNGFVFYIPAWNTSKIDPVTGFTNLFDLHIETMEQAKKFFSKFDYIRWNAANNWFEFAFDYKNFTEKADGSRTQWTLCTQGTRIRTFRNPEKNSEWDNVEVDLTDQFLSLFNSKNIDIKSDLKTQILAQNEKDFFMSLLLCLKLTLQMRNSISNSEVDYLISPVADANGDFFDSRKVDLSLPANADANGAYNIARKGLWMARRIKKSRPEDKVSLKITNKEWLNFAQNKPYLTD

SEQ ID NO: 74 - protein, 1249 aa, unidentified
  REGION 1..1249: note = Description of Unknown: uncultivated organism sequence
  REGION 1..1249: note = Category: MG13 effectors
  REGION 1..1249: note = Description: MG13-40 effector
MEQFTNLYPLSKTLRFELIPHEKTKELLERTDYLAQDEKRAESYKIVKGIIDRYHKSFIEDVLSKPIEDQGEKRPILKFAKESTKNCDSLEEFYELYSKSQKSETEKNTLEITQNNLRKQIVYALTQDARFKNLDKKELIYQDIYAIAKPEEIPFIKEFEGFATYFVGFHENRMNMYSSEAKSTAIGNRLINENLPIFTDNMGTFQKLLNSPVSEHFDTICKDMEDILPYDNIEEIFMLHNYNDFLTQKQITVYNAIIGGRVLEDGTKIQGINEYVNLYNQQQPTRETRLPKLKTLFKQILSDKESVSWLAEEFTSDEEMLKSIRDYYTSFKNNASQQMIDILTNIKSYDIDHIFIPNDISLTTISKKVFKDWEAINKSIIKRLKEDNPQKGREKDDNYEERMSKAFKSYDSFSLGLINSCTATDDVCIYFSKIAKTDEETGLSHNLLDNIEEAYDKAKEYLNNGYPSNLNLAQDKSTVQKIKNLLDSIKDLQKFIKPLLGSGTEAVKDERFYGDISLVWEILDQITPLYNKVRNRMTRKAYSIEKIKLNFENSTLLAGWDLNKEKDNTSIILKKDGLYYLAIMRKEFNKVFQNTPQLTSGEDSFEKMEYKLLPGANKMLPKVFFSKSRISEFAPSDVLIEKYKKGTHKKGSNFNIDDCHNLIDFFKSSIQKHDDWSKFNFKFSPTDSYEDMSGFYREVEKMGYKITFKKISADYIEELVTSGKIFLFKIYNKDFSQYSKGTPNLHTLYWKMVFDENNLKDVVFKLNGEAEIFYRKKSLSYKSPTHPAHQPIRNKNPYNAKEESVFAYDLIKDKRYTLDKFHFHIPITINFKSEGVNNINTLVCNYIRNNDDIHFIGIDRGERHLLYVSVIDSKGRIKEQFSLNQIINEYKGNSYSTDYHKLLEERDEKRTKERQSWDSIESIKELKQGYLSQVIHKIASLVVKYNAIVVLEDLNIGFKRGRQKVESSIYQQFEKALIDKFNYLVDKNVAPEQPGGLMKGYQLTNKFSSFRDMGKQNGFLFYIPAWNTSKIDPVTGFVDMLHPKYESVEKAREFFTKFNKISYNQEKGWFEFLFDYNDFTTKAEGTRTVWTLCTFGKRIEKFRNKDKNSMWDNKEIDLTSAFISLCEKYNVPLSCDMKNDIVAQTEKDFYVELIRILRLTLQMRNSITGTDIDHLISPVADENGNFYDSRNADSTLPENADANGAYNIARKGLWAAMQIRSCTDPDLKVNLAISNKEWLTFAQTKPYIK

SEQ ID NO: 75 - protein, 1243 aa, unidentified
  REGION 1..1243: note = Description of Unknown: uncultivated organism sequence
  REGION 1..1243: note = Category: MG13 effectors
  REGION 1..1243: note = Description: MG13-41 effector
MKQFTNLYPVSKTLRFELIPQGETRAHLNDLIAEDEQRAEDYKEVKKYIDRYHKWFIDDCLSKVPNSPLGEEMIRLLNKYIEANDEKDGEGPDKVQDDLRKLIVKALKSGVSLDKDPEQEERFKSLFSEELVKNILPDFVQTEEEKNNVAKFRDMTTYFVGFHKNRENMYSEEAQTTAISYRLIHENLPRFLDNIAVYEKIKPVLSDEIVSLEEQLHQNGYVEACCIDSLFSVDFYLRVLTQRGIEQYNAVIGKIVNDESDEIKGLNERINLYNQVHKKEKLPLFKPMYKQILSDREQLSWLPETFENDASLLDAVKGFHQDLLSNDILSRIDKLLSSLQDFNLNQIWIANDVQLRGLSKDLYGDWSLIDRALGIERSEDVVQGLTAAQKKAASAAKKRSSFSIVELNAAIRSRVPDEKYVPVQNYFSAMGKVCAQGEATRENFVTRICAAYQELEEYIPSIRKSLLQEKRATEFIKNYLDAVNDLLRFIKPLLGRGNETDKDANFYGEFAFLTDCLFAIVPLYNEVRNYLTQKPYSTEKFKLNFRGSTLLNGWDKNKEKDNLGVILRKEGKYFLAIMNKKHNTLFTEGKLQQHTGGECYEKMEYKLIPGSKMLPKVFFSKKGISTFQPSEELLLNYRIGTYKKGEKFNLEHLHKLIDFYKHSMAVHEDWSKFDFHFSDTSSYRDISGFYKEVEQQGYKLTFRNVSVSYINRLVEEGKLYLFQIYNKDFSEYSKGTPNLHTLYWKMLFDPENLKDVVYKLNGEAEVFFRKKSLDVSHPTHTKNEPIEKKNKNNKGEKSLFSYDLIKDRRFTVDKFQFHVPITMNFKGEQGDRVNQMVQSYVRNNKGLNVIGIDRGERNLLYLVVINEHGEILEQFSLNEIRNAYNGKEHKIDYHTLLEERSKKRQDARQSWQTIEGIKDLKTGYLSQVIHVITQLMVKYNAIVVLEDLNFGFKSSRQKFEQSVYQQFERKLIDKLNFLVNKKAAPNEVGGLLNAYQLTAPFESFRKMGKQNGFLFYVPAWHTSKIDPRTGFVNLLDTRYENVANSKEFFAKFASITYNPEKKWFEFAFDYKAFGNRADGSRTKWTICSYGERIETFRNPENNNQWDTKTVPLTERLTELFSKYGIDYTTNLKEQILNQTDKAFFVELLGALRLTLQLRNSRKSTGEDFLFSPVAAENGCFFDSRKANDNEPKDADANGAYHIALKGLWVLDTIRNTEEGKNPKLAITNKEWLSYAQAKPFAHE

SEQ ID NO: 76 - protein, 1249 aa, unidentified
  REGION 1..1249: note = Description of Unknown: uncultivated organism sequence
  REGION 1..1249: note = Category: MG13 effectors
  REGION 1..1249: note = Description: MG13-42 effector
MKQLTNLYPVSKTLRFELQPIGKTRENIEKGGILQQDEERAENYKLVKGFIDEYHKQYIKSRLWNFELPLADEGRHNSLAEYRVLYEMPKRDAEQEALFTEVKDNLRAIIARRLTEKGSAYDRIFKKELIREDLIEFLENEKDKEIVRQFADFTTYFTGFHENRANMYSSEEQSTAIAYRLIHQNLPKFMDNMKSFVKIAETAVAEHFPEIYAGWEEYLNVGSINDMFHLDYFSQTLTQEHIEVYNYIIGKRILDDGTEIKGINEYVNLYNQQQKDKKQRLPLLVPLYKQILSDREKLSWLSEEFDSDERMQHAIKETYDHLYNLLMGDENESLKSLFMHLRDFDLSQINITNDLSLTDISQHLFGKYDVFTNGIKDKLRIITPRKKKETDEVFEERITKLYKTQKSFSIAELNGLPHPVVEGSQPNNIVDYFMALGAVNTDTIQKENLFAQIENAYTDVLPILQMTDTGDKLSQNKPAVAKIKRLLDALKDLQHFVKPLLGSGEEVEKDERFYGQFQTIWDELDYVTPLYNKVRNWLTRKPYSTEKIKLNFDNSQLLGGWDVNKEPDCTGVLLRKGGFYYLGIMNKKNNRIFEKDLTPSDGDCYDKIDYKLLPGANKMLPKVFFSKSRIDEFAPSTSLVEKYKAGTHKKGANFNLKDCHNLIDFFKQSIAKHEDWRKFGFHFSNTDSYEDISGFYREVEQQGYSLTSHKVSTDYIHRMVDEGKLFLFRLWNKDFSEHSKGTPNLHTLYWKMLFDERNLQDVVYKLNGQAEVFYRKASIKEENRIIHPAKKDISNKNALNNKHTSRFDYDIIKDRRYTVDKFQFHVPITINFKAIGQTNINPVVHDIIRQGGIKHIIGIDRGERHLLYLSLIDLKGRIVKQMTLNEIINEYSGRQYKTNYHDLLVKREGERTDARRSWDTIENIKELKEGYLSQVVHVITKMMVEYKAIVVLEDLNMGFMRGRQKIERQVYEKFEHMLIDKLNCYIDKQEDPSKSGGLLHALQLSNKFESFARLGKQSGCLFYIPAWNTSKIDPVTGFVNLLDTHYDTMKAAKSFFSKFERISYNGEKDWFEFTFDYNEFNKKAEGTRTHWTLCTYGARIRNFPNPQKNNQWDDEEVVLTDMFKNFFEDYGIDYRGNLKEAIQQPTEAKFYQELMSLMKLLLQMRNSKINSEVDYLLSPVVDENGQIFDSRLVNTTLPDNADANGAYNIARKGLWVIRKIQESPKDEKMSLAISNKEWLTFAQTKPYLE

SEQ ID NO: 77 - protein, 1249 aa, unidentified
  REGION 1..1249: note = Description of Unknown: uncultivated organism sequence
  REGION 1..1249: note = Category: MG13 effectors
  REGION 1..1249: note = Description: MG13-43 effector
MKQFTNLYPVSKTLRFELQPIGKTKENIEKNGILMRDEKRAKDYKIVKEFIDDYHKQFIKERLWDFKLPLNSEGKLNSLEEYQALYELSKRDEVQEAEFTEVKDNLRSIIAKRLTESGSAYERIFKKELIREDLVDFLENEEDKDIVRQFADFTTYFSGFHENRHNMYVAEEKSTAIAYRLIHQNLPKFMDNMKAFAKIAETSVAEHFADIYDGWKEYLNVESIEEVFRLDFFSETLTQPHIEVYNYIIGKKILEDGTEIKGINEYVNIYNQQQKDKSKRLPFLVPLYKQILSDREKLSWLAEEFDSDEKMLSAINESYSHLHDLLMSNENESLRSLLLHIKEFNLSHINIANDLSLTDISQHLFSRYDVFTNGIKDELRIITPRKKKESDEDFEERITKIFKAIKSFSIDFLDNLPQPVMEDGKRRSIENYFMTLGAVNTETTQKENLFAQIENAYEDARNILQLKDTGDTLSQNKPAVAKIKALLDALKDLQHFIKPLLGSGEENEKDELFYGSFMMMWDELDTITPLYNKVRNWLTRKPFSTEKIKLNFDNAQLLGGWDVNKEPDCTGVLLRKDGFYYLGIMNKKSNRIFESEVTPSDGECYDKIDYKLLPGANKMLPKVFFSKSRIDEFAPSEAVVSSYKRGTHKKGANFNLSECHRLIDFFKQSINKHEDWSKFGFHFSPTDTYEDISGFYREVEQQGYMLSSHPVSSSYINQLVDEGKLYLFRIWNKDFSEFSKGTPNLHTLYWKMLFDERNLADVVYKLNGQAEVFYRKASIKPENRIIHKANQPIANKNELNEKRTSTFEYDIIKDRRYTVDKFQFHVPITINFKAAGQTNINPIVQDVIRQGGFSHIIGIDRGERHLLYLSLIDLKGNIIKQMTLNEIINEYKGQTYKTNYHTLLAKREGDRTDARRSWETIETIKELKEGYLSQVVHIISKMMVEYNAIVVLEDLNTGFMRGRQKIERQVYEKFEKMLIEKLNCYIDKHADPSEDAGLLHPLQLTSDIQKWKRSHQCGCLFYIPAWNTSKIDPVTGFVNLLDTRYDTREKARVFFSKFQRISFNAQKGWFEFAFDYNDFTTKAEGTRTQWTLCTQGERIRTFRNPQKNNQWDDERIVLTDAFKQLFDKYDIDINGNLKEAISAQTDAQFFKELLGLMKLLLQMRNSITNSEEDYLLSPVADNTGNFFDSREGIYSLPIDADANGAYNIARKGLWVIRKIQETPNGEKTSLSITNKEWLQFAQTKPYLND

SEQ ID NO: 78 - protein, 1237 aa, unidentified
  REGION 1..1237: note = Description of Unknown: uncultivated organism sequence
  REGION 1..1237: note = Category: MG13 effectors
  REGION 1..1237: note = Description: MG13-44 effector
MHTMKKINELTALYPLSKTLRFELKPIGKTLDHIEQKGLIVQDEQRAEEYKQVKKIIDSYHKEFITMCLKGLKLNMVYLERYESLAREVHRDEAEFDKVKAALRKQIVEAFKQGGSYNDLFKKELIQKHLPEFVESEEEKKMVANFSKFTTYFTGFYENRKNMYSDEEKSTAIAYRLIHENLPLFLDNMRSFRKIAESEVGEQFANIEVRFEEYLNVEHLAEMFELDYFSDTLTQEQIAVYNSVIGGRTLDDGTKIQGINEYVNLYNQQHKEARLPLLKPLYKMILSDRVALSWLPENPFESDEEMVEAIKEMCQSLKEVLMGNDGLRNLLLNIDLYDIEHIYIANDLGLTDISQQMFGQYDVYASAIKQKLRQGVKQSPKERREPELFEERINRLYKSTKSFSIADLNSHTDANHTIESYFKQLGAYDREGEQRDNLFTQIEMAQIAATDILAGKHGNISQSDKEIAILKGLLDAYKSLQHFVKPLLGHGDEADKDNEFDAKLREAWNALDIVTPLYNKVRNWLTRKPYSVEKIKLNFENAQLLGGWDVNKEPDCTSVLLRKDGFYYLAIMDKKSNHAFDSDELPCDGKCYEKIDYKLLPGANKMLPKVFFSKSRIDEFAPSKEIVEAYKNGTHKKGKDFNLAHCRRLIDFFKRSITKHEDWKNFPFVFSPTESYEDISGFYREVEQQGYMLSFRKVSESFINQLVDEGKLYLFKIWNKDFSEYSKGMPNMHTLYWKMLFNEQNLADTVYKLNGQAEVFYRKRSLDMADTTVHRASQPLVNKNALNKKRHSTFDYDIVKDRRYTVDKFQFHVPMTMNFKAVGRDNINSEVLNIIRNGGIKHIIGIDRGERHLLYLSLIDLKGNIVKQMTLNDIVNEYNGNTYATNYRDLLAEREGNRTEARRNWKKIENIKEIKQGYLSQVVHIISKMMVEYDAIVVLEDLNMGFMRGRQKIERSVYEQFEKMLIDKLNYYVDKQKRIDEAGGLLHALQLTSKFESFKKLGKQSGCLFYIPAWNTSKIDPVTGFVNLFDTRYVNADKAREFFSKFDSIRYNDAKNWFEFAFDYNKFTEKAKGTRTRWTLCTWGTRIRTFRNPAKLNQWDNEEVVLTDVFKKAFDEAGIDIHSNLKEAICTLTEKKHLESLLHLMKLLLQMRNSITNSEIDYLLSPVADENGHFYDSRTCDDTLPKDADANGAYNIARKGLWAIRTIQESSETERPNLALKNQDWLRFAQQKPYLND

SEQ ID NO: 79 - protein, 1274 aa, unidentified
  REGION 1..1274: note = Description of Unknown: uncultivated organism sequence
  REGION 1..1274: note = Category: MG13 effectors
  REGION 1..1274: note = Description: MG13-45 effector
MNVDLLIKKTYNMRDFNEFVGLYPISKTLRFELKPIGKTLEHIQRNKLLEDDAVRADDYVKVKKIIDKYHKCLIDEALSGFTFDTEADGRSNNSLSEYYLYYNLKKRNEQEQKTFKTIQNNLRKQIVNKLTQSEKYKRIDKKELITTDLPDFLTNESEKKLVEKFKNFTTYFTEFHKNRKNMYSKEEKSTAIAFRLINENLPKFVDNIAAFEKVASSPLAEKINALYEDFKEYLNVEEISRVFRLDYYNELLTQKQIDLYNAIVGGRTEEANRIQIKGLNQYINEYNQQQTDRSNRLPKLKPLYKQILSDRESVSWLPPKFDSDKDLLIKIKECYDALSEKEKVFDKLESILKSLSTYDLSKIYISNDSQLSYISQKMFGRWDIIGKAIREDCAKRNPQKSRESLEKFAERIDKKLKAIDSISIGDVDECLAQLGETYVKRVEDYFAAMGESEIDDEQTDTTSFKKNIEGAYESVKELLNNADNITDNNLMQDKGNVEKIKTLLDAIKDLQRFIKPLLGKGDEADKDGVFYGEFTSLWTKLDAVTPLYNMVRNYLTSKPYSTKKIKLNFENSSLMKGWDLNKEPDNTTVIFRKDGLYYLGIMSKKYNRVFVDREDLPHDGECYDKMEYKLLPDANKMLPHVFLSKKGIQRFRPSGELLGKYERGTHTKGADFDLGDCRALIDFFKKSIERHDDWKKFDFKFSDTSTYQDISEFYREVEQQGYKMSFRKVSVDYIKSLVEEGKLYLFQIYNKDFSAHSKGTPNMHTLYWKMLFDEENLKDVVYKLNGEAEVFFRKSSITVQSPTHPANSPIKNKNKDNKKKESEFEYDLIKDRRYTVDKFLFHVPITMNFKSVGGSNINQLVKRHIRSATDLHIIGIDRGERHLLYLTVIDSRGNIKEQFSLNEIVNEYNGNTYRTDYHELLDAREGERTEARRNWQTIQNIRELKEGYLSQVIHKISELAIKYNAVIVLEDLNFGFMRSRQKVEKQVYQKFEKMLIYKLNYLVDKKKPIAETGGLLRAYQLTGELESFKTLGKQSGILFYVPAWNTSKIDPVTGFVNLFDTHYENIEKAKGFFDKFKSIRYNSDKDWFEFVVDDYTRFSPKAEGTRRDWTICTQGKRIQIYRNPQRNNEWEGRKIDLTKAFKEHFEAYGVDISKDLREQINTQNKKEFFEELLRLLRLTLQMRNSMPSSDIDYLISPVADDTGCFFDSRKQAELKENAVLPMNADANGAYNIARKGLLAIRKMKQEENDSAKISLAISNKEWLKFAQTKPYLED

SEQ ID NO: 80 - protein, 1252 aa, unidentified
  REGION 1..1252: note = Description of Unknown: uncultivated organism sequence
  REGION 1..1252: note = Category: MG13 effectors
  REGION 1..1252: note = Description: MG13-46 effector
MKQFTNLYPVSKTLRFEIQPIGKTRENIEKNGILQRDEKRAEDYKIVKGFIDEYHKQFIKDRLWSFKLPLHSEGHLDSLEEYQALYEMSKRNDAQEAEFTEIKDNLRSIIAKRLTESGSAYERIFKKELIREDLIDFLESNEDKDIVRQFADFTTYFSGFHENRRNMYVAEEKSTAIAYRLIHQNLPKFMDNMKAFAKIAGTSVAEHFTDIYEGWKEHLNVGSIEEIFRLDYFSETLTQIHIEVYNYIIGKKILEDGTEIKGINEYVNLYNQQQKDKSKRLPFLVPLYKQILSDRDKLSWLAEEFDSDEKMLAAINESYNHLHDLLMGNENESLRSLLLHIKDFNLSQINITNDFSLTDISQHLFGRYDVFTSGIKDELRIITPRKKKESDEDFEDRISKIFKTQKSFSIDFLDKLPQPVMEDGKPRCIEDYFMTLGAVNTETTQKENLFAQIENAYEDARAILQMKDTGDTLSQNKSAVAKIKALLDALKDLQHFIKPLLGSGEENEKDELFYGSFQMMWDELDTVTPLYNKVRNWLTRKPFSTEKIKLNFDNSQLLGGWDVNKEPDCTGVILRKDSYYYLGIMDKKSNRIFEANATPSDGDCYDKIDYKLLPGANKMLPKVFFSKSRIDEFAPSEAIVSSYKRGTHKKGADFNLAECHRLIDFFKQSINKHEDWSKFNFHFSDTKTYEDISGFYREVEQQGYMLSSHPISSSYVNQLVDEGKLYLFRIWNKDFSESSKGTPNLHTLYWKMLFDERNLADVVCKLNGQAEVFYRKASIKPENRIVHKANQPIANKNELNTKRASTFEYDIIKDKRYTVDKFQFHVPITINFKAAGQTNINPIVQDAIRQGGFSHIIGIDRGERHLLYLSLIDLKGKIIKQMTLNEIINEYKGQTYKTNYHDLLAKREGDRTDARRSWETIETIKELKEGYLSQVVHIISKMMVEYNAIVVLEDLNTGFMRGRQKIERQVYEKFEKMLIEKLNCYIDKQLSPTDEGGLLHPLQLTCDAQKWKRAHQCGCLFYIPAWNTSKIDPVTGFVNLINTSRYDTREKARGFFSKFQRISFNEKKDLFEFTLDYNDFDYIAKAEGTRTQWTLCTQGERIRTFRNPQKNHQWDDERIVLTDAFKQLFDKYDIDINGNLKEAISAQTDAQFFKELLGLTKLMLQMRNSITNSEEDYLLSPVADITGHFFDSREGISSLPIDGDANGAYNIARKGLLVIRKIQETPDGEKPSLTITNKEWLLFAQTKPYLND

SEQ ID NO: 81 - protein, 1249 aa, unidentified
  REGION 1..1249: note = Description of Unknown: uncultivated organism sequence
  REGION 1..1249: note = Category: MG13 effectors
  REGION 1..1249: note = Description: MG13-47 effector
MKQFTNLYPVSKTLRFELQPVGKTKENIEKNGILLRDEQRAEDYKRVKLLIDEYHKQFIKDRLWNFKLPMINNGHHDSLEEYQALYELSKRDDDQEATFTEVKDNLRSIIAKQLTVGSAYERIFKKELIREDLIEFLEDEKDKDIVRQFADFTTYFSGFHENRKNMYSAEEKSTAIAFRLIHQNLPKFMDNMKAFAKIKQTSVAEHFTDIYEGWKEYLNVESIEEIFSLDYFSETLTQPHIEVYNYIIGKKILDDGTEIKGINEYVNLYNQQQKDKNKRLPFLVPLYKQILSDREKLSWIAEEFDSDEKMLSAINESYSHLHDLLMGEENESLRSLLSHIKDYDLTQINITNDLSLTEISQHLFSRYDVFTNGIKDELRVITPRKKKEGDEIFEDRISKIFKTLKSFSIAFLDRLPQPVMEDGKPRSVEDYFMSLGAVNTETTQRENLFVQIENAYEDARAILQMKDTGDTLSQNKSAVAKIKTLLDTLKDLQHFIKPLLGSGEEQEKDELFYGSFQMMWDELDAITPLYNKVRNWLTRKPYSTEKIKLNFDNAQLLGGWDVNKEPDCTGVLLRKDGLYYLGIINKNHNRIFDADVTPTDGDCFIKIDYKLLPGANKMLPKVFFSKSRIDEFAPSKAIVSSYKQGTHKKGTNFNLTDCHRLIDFFKHSINKHPDWSKFGFHFSDTETYEDISGFYREVEQQGYMLSSHSVSVSYINQMVDEGKLYLFRIWNKDFSEFSKGTPNLHTLYWKMLFDERNLADVVYKLNGQAEVFYRKASIKPENRIVHQAHRPITNKNELNEKRTSTFEYDIIKDRRYTVDKFQFHVPITINFKAKGQNNINPIVQETIRQDGFKHIIGIDRGERHLLYLSLIDLNGNIVKQMTLNDIINEYKGQTYKTNYHHLLAKREGERTDARRSWDTIETIKELKEGYLSQVIHIISKMMVEYNAIVVLEDLNIGFMRGRQKIERQVYEKFEKMLIDKLNCYIDKQIAPQEVGGMLHPIQLTNKFESFGKLGKQSGCLFYIPAWNTSKIDPMTGFVNLFDTRYETREKARLFFSKFQRISFNEEKGWFEFAFDYNDFTTKAEGTRTQWTLCTYGERIRTFRNPDNNHQWDDERIELTEEFKLLFEKYNINIRGNLKEAISNQSDAQFYRDLLGLMKLLLQMRNSIINSEEDYLLSPVADENGHFFDSREEIESLPNNADANGAYNIARKGLWIMEQIKKTDNLAKLKLTISNKEWLHFAQNKPYLNE

SEQ ID NO: 82 - protein, 1171 aa, unidentified
  REGION 1..1171: note = Description of Unknown: uncultivated organism sequence
  REGION 1..1171: note = Category: MG13 effectors
  REGION 1..1171: note = Description: MG13-48 effector
MIRLLNKYIEANNEKDGEGPDKVQDDLRKLIVKALKSGVSLDKDPEQEERFKSLFSEKLVKNILPNFVQTEEEKSKVAKFRDMTTYFVGFHKNRENMYSEEAQTTAISYRLIHENLPRFLDNIAVYEKVKPVLSDEIASLEEQLHQNGYVEASCIDSLFSVDFYLRVLTQRGIEQYNAVIGKIVNDESDEIKGLNERINLYNQVHKKEKLPLFKPMYKQILSDREQLSWLPETFENDASLLDAVKGFHQDLLSNDILSRIDKLLSSLQDFNLDQIWIANDVQLRGLSKDLYGDWSLIDRALGIERSEDVVQGLTAAQKKAASAAKKRSSFSIVELNAATRSSVPDEKYVPVQNYFSAMGKVCAQGEATRENFVTRICAAYQELEEYIPSIRKSLLQEKRATELIKNYLDAVNDLLRFIKPLLGRGDETDKDANFYGEFTFLTDCLFAIVPLYNEVRNYLTQKPYSTEKFKLNFRGSTLLNGWDKNKERVNLGVILRKEGKYFLAIMNKKHNTLFTEGKLQQHTGGECYQKMEYKLIPGSKMLPKVFFSKKGISTFQPSEELLLNYRIGTYKKGEKFNLEHLHKLIDFYKHSIAVHEDWSKFDFHFSDTSSYRDISGFYKEVEQQGYKLTFRNVSVSYINRLVEEGKLYLFQIYNKDFSEYSKGTPNLHTLYWKMLFDPENLKDVVYKLSGEAEVFFRKKSLDVSHPTHPKNEPIEKKNKNNKGEKSLFSYDLIKDRRFTVDKFQFHVPITMNFKGEQGDRVNQMVQSYVRNNKGLNVIGIDRGERNLLYLVVINEHGEILEQFSLNEIRNAYNGKEHKIDYHTLLEERSKKRQDARQSWQTIEGIKDLKTGYLSQVIHVITQLMVKYNAIVVLEDLNLGFKSSRQKFEQSVYQQFERKLIDKLNFLVNKKAAPNEMGGLLNAYQLTAPFESFRKMGKQNGFLFYVPAWHTSKIDPRTGFVNLLDTRYENVAKAKEFFAKFESITYNPEKKWFEFAFDYKAFGNRADGSRTKWTICSYGERIETFRNPKNNNQWDTKSVPLTERLTELFSKYGIDYTTNLKEQILNQTDKAFFVELLGALRLTLQLRNSRKSTGEDFLFSPVADENGCFFDSRKANDNEPKDADANGAYHIALKGLWVLDTIRNTEEGKNPKLAITNKEWLSFAQAKPFAHE

SEQ ID NO: 83 - protein, 1243 aa, unidentified
  REGION 1..1243: note = Description of Unknown: uncultivated organism sequence
  REGION 1..1243: note = Category: MG13 effectors
  REGION 1..1243: note = Description: MG13-49 effector
MKTFNDLTGLYSLSKTLRFELKPVGKTKDNIETKGIIAQDEKRAEEYKKVKDIIDRYHKKFIEMCLANLKLKTISDGNNDSLKEYVTLASKANKDEKEDNDFKDVKTALRKQIVDAFKKGGSYSDLFKKELIQVHLPDFVTDEQEKQMVENFGKFTTYFTGFNENRQNMYSDEEKSTSIAYRLIHENLPMFIDNIKSFAKIAEHEDIDFFPDIENGFKEELKRLKAQSISEVFDLANFTNTLTQSQIDSYNAIIGARHDENGDKVQGINQYVNLYNQKNKDARLPLLKPLYKMILSDRVALSWLPEEFATDEEMLNAINEAHENLKSVLEKVRVLLLNIGNYDTEHIYIANDKGLTDISQQIFGQYDVYTSAIKAELRDSITPSAKERKDPELLEKRINDIFKASKSFSIEYLNSHVDSDKTIQSYYKELGAYDRNGEERINLFSQIELAYVDAHDVLLGKHTNLNQSEDSIKKIKALLDAYKELQHFIKPLLGNGDEADKDNEFDAKLRAIWDELDIVTPLYDKVRNRLTRKPYSTEKIKLNFDNAQLLNGWDMNKEPDCTSVLLRKDGQYYLAIMDKKSNHAFDIDELPCDGECYDKMDYKLLPGANKMLPKVFFSKSRIKEFAPSNEICDAYQKGTHKKGANFSIKDCRRLIDFFKDSIAKHEDWSKFPFTFSDTSTYEDISGFYREVEQQGYMLGYRKVSVSFINQLVDEGKLYLFQIWNKDFSEYSKGTPNMHTLYWKMLFDERNLANVVYKLNGQAEVFYRKRSLDLNKTTIHRANQPIANKNIQNEKRESTFCYDIVKNRRYTVDKFQFHVPITINFKATGSDNINASVLDVIRNNGIEHIIGIDRGERHLLYLSLIDMKGNIVKQMTLNDIINEYKGNTYTTNYKELLQAREGDRKEARQNWQKIENIKELKEGYLSQVVHVITKMMVEYKAIVVLEDLNGGFMRGRLKIERQVYEKFEKMLIDKLNYYVDKQKDVNDNGGLLHAYQLASKFDTFKKLGKQSGCLFYIPAWNTSKIDPVTGFVNMLDTRYENADKARKFFSKFKSINYNADKNWFEFVIDDYSKFTDKAKDTRTDWVLCTYGTRIKTFRNPEKLNQWDNKEIVLADEFKKVFMEAGIDINGNLKEAICTLTEKKHLESLMQLMKLLVQMRNSETNSEVDYLLSPVADTEGNFYDSRNCGDNLPKDADANGAYNIARKGLWAVMKIKASKPGENLKLGISNREWLQFAQEKPYLND

SEQ ID NO: 84 - protein, 1171 aa, unidentified
  REGION 1..1171: note = Description of Unknown: uncultivated organism sequence
  REGION 1..1171: note = Category: MG13 effectors
  REGION 1..1171: note = Description: MG13-50 effector
MIRLLNKYIEANDEKDSEGPDKVQDDLRKLIVKALKSGVSLDKDPEQEERFKSLFSEKLVKNILPNFVQTEEEKSKVAKFRDMTTYFVGFHKNRENMYSEEAQTTAISYRLIHENLPRFLDNIAVYEKVKPVLSDEIASLEEQLHQNGYVEACCIDSLFSVDFYLRVLTQRGIEQYNAVIGKIVNDESDEIKGLNERINLYNQVHKKEKLPLFKPMYKQILSDREQLSWLPETFENDASLLDAVKGFHQDLLSNDILSRIDKLLSSLQDFNLDQIWIANDVQLRGLSKDLYGDWSLIDRALGIERSEDVVQGLTAAQKKAASAAKKRSSFSIVELNAATRSSVPDEKYVPVQNYFSAMGKVCSQGEPKRENFVTRICAAYQELEEYIPSIRKSLLQEKRATELIKNYLDAVNDLLRFIKPLLGRGNETDKDANFYGEFAFLTDCLFAIVPLYNEVRNYLMQKPYSTEKFKLNFRGSTLLNGWDKNKERDNLGVILRKEGKYFLAIMNKKHNTLFTEGKLQQHTGGECYQKMEYKLIPGSKMLPKVFFSKKGISTFQPSEELLLNYRIGTYKKGEKFNLEHLHKLIDFYKHSIAVHEDWSKFDFHFSDTSSYRDISGFYKEVEQQGYKLTFRNVSVSYINRLVEEGKLYLFQIYNKDFSEYSKGTPNLHTLYWKMLFDPENLKDVVYKLSGEAEVFFRKKSLDVSHPTHPQNEPIEKKNINNKGEKSLFSYDLIKDRRFTVDKFQFHVPITMNFKGEQGDRVNQMVQSYVRNHKGLNVIGIDRGERNLLYLVVINEHGEILEQFSLNEIRNAYNGKEHKIDYHTLLEERSKKRQDARQSWQTIEGIKDLKTGYLSQVIHVITQLMVKYNAIVVLEDLNFGFKSSRQKFEQSVYQQFERKLIDKLNFLVNKKVAPNEVGGLLNAYQLTAPLGNSRKMGKQNGFLFYVPAWHTSKIDPRTGFVNLLDTRYENVANSKEFFAKFASITYNPEKKWFEFAFDYKAFGNRADGSRTKWTICSYGERIETFRNPKNNNQWDTKTVPLTERLTELFSNYGIDYTTNLKEQILNQTDKAFFVELLGALRLTLQLRNSRKSTGEDFLFSPVADENGCFFDSRKANDNEPKDADANGAYHIALKGLWVLDTIRNTEEGKNPKLAITNKEWLSFAQAKPFAHE

SEQ ID NO: 85 - protein, 1244 aa, unidentified
  REGION 1..1244: note = Description of Unknown: uncultivated organism sequence
  REGION 1..1244: note = Category: MG13 effectors
  REGION 1..1244: note = Description: MG13-51 effector
MKQFTNLYPVSKTLRFELIPQGETRAHLNDLIAEDEQRAEDYKEVKKYIDRYHKWFIDDCLSKVPNSPLGEEMIRLLNKYIEANDEKDGEGPDKVQDDLRKLIVKALKSGVSLDKDPEQEERFKSLFSEDLVKNILPNFVQTEEEKSKVAKFRDMTTYFVGFHENRKNMYSEEAQTTAIGYRVIHENLPRFLDNIAVYEKVKPVLSDEIASLEEQLHQNGYVEASCIDSLFSVDFYLRVLTQRGIEQYNAVIGKIVNDESDEIKGLNERINLYNQVHKKEKLPLFKPMYKQILSDREQLSWLPETFENDASLLDAVKGFHQDLLSNDILSRIDKLLSSLQDFNLDQIWIANDVQLRGLSKDLYGDWSLIDRALGIERSGDVVQGLTAAQKQAAAVAKKRSSFSIVELNVATRSRVPDEKYVPVQNYFSAMGKVCAQGEATRENFVTRICAAYQELEEYIPSIRKSLLQEKRATELIKNYLDAVNDLLRFIKPLLGRGNETDKDANFYGEFAFLTDCLFAIVPLYNEVRNYLTQKPYSTEKFKLNFRGSTLLNGWDKNKERDNLGVILRKEGKYFLAIMNKKHNTLFTESKLQQHTAGECYEKMEYKLLPGPNKMLPKVFFSKKGISTFQPSEELLLNYRIGTHKKGEKFNLEHLHKLIDFYKHSIAVHEDWSKFDFHFSDTSSYRDISGFYKEVEQQGYKLTFRNVSVSYINRLVEEGKLYLFQIYNKDFSEYSKGTPNLHTLYWKMLFDPENLKDVVYKLSGEAEVFFRKKSLDVSHPTHPKNEPIEKKNINNKGGKSLFSYDLIKDRRFTVDKFQFHVPITMNFKGEQGDRVNQMVQSYVRNNKGLNVIGIDRGERNLLYLVVINEHGEILEQFSLNEIRNAYNGKEHKIDYHTLLEERSKKRQDARQSWQTIEGIKDLKTGYLSQVIHVITQLMVKYNAIVVLEDLNFGFKSSRQKFEHSVYQQFERKLIDKLNFLVNKKTAPNEVGGLLNAYQLTAPLGNSRKMGKQNGFLFYVPAWHTSKIDPRTGFVNLLDTRYGNVAKAKEFFAKFESITYNPEKKWFEFAFDYKAFGNRADGSRTKWTICTFGERIETFRNPENNNQWDTKTVPLTERLTELFSNYGINFTTNLKEQILNQTDKAFFVVLLGALRLTLQLRNSRKSTGEDFLFSPVADENGRFFDSRIANDNEPKDADANGAYHIALKGLWVLDTIRNTEEGKNPKLAITNKEWLSFAQAKPFAHE

SEQ ID NO: 86 - protein, 1246 aa, unidentified
  REGION 1..1246: note = Description of Unknown: uncultivated organism sequence
  REGION 1..1246: note = Category: MG13 effectors
  REGION 1..1246: note = Description: MG13-52 effector
MSIYNELTNLYPVQKTLKFELCPIGNTLEHFLTSGILEEDEQRHEEYKSVKKIIDRYHKQFIEKALSNFSFKVQNEEKLNSLEEYIELFIHKKSVENGAEKFKKVQDNLRKQITSHFAKQEAFANLFKKELIQDDLPAFVTSTDEKEMIAHFTRFTTYFVDFHKNRKNMYSDEAKATSIAYRLIHENLPKFLTNALAFERIRNSEVANHFEAIQESLNIENIASLFDPLSYSQVLTQAKIDIYNGVIGGKTLDNLGNRSQGLNEYINLYNQTHNERLPLLKPLYKQILSDRSSLSWLPDTFKDDEQLADTLNDWYNEIENEIISPQDGQISLRELLENISTYNTDTIYIQNDTSITDISTRLFKRYDTITNAVSSEFQRILPRKKNESQEKYDERIKKIIDKKSSFSIGYLNYCLSQVPNLSYQTIDSYFKSLGAYERDGVQKENLLTSIERAHFLAQPYIINAKGDNLIHNSEAIKAIRELLVSVNNLLHFIKPLCIGEEEADADASFYGDFTHIWAILEKTTLLYNMVRNYLTRKPYSTDKFKLNFKNDQLLLGWDQNKEVDRTTVLLRKDGYYYLAIMNKAHNRIFDMEHLPDDGDCYEKMDYKLLPGPNKMLPKVFFSKSRIDEFAPDTTLLENYNKGTHKKGNNFRIEDCHALIDFFKASIDKHEDWKKFGFHFSDTKDYEDLSDFYQEVEKQGYKVSFRNVSVSYIDNLVNEGKLYLFKIYNKDFSSNSKGTPNLHTLYWKMLFDERNLKHVVYKLNGEAEIFYRKASIPEDKRIIHHVNDEKRFRSPWNQQRHEVFKHEIIQDRRYTIDKFQFHVPITINFQSKGIGDINEKVQQLIHDGKIRHIIGLDRGERHLLYLSLIDMKGNIVKQISLNEIANQYNGNIYKTHYQNLLKQREEDRLEARKNWQVINNIKNLKQGYLSQVVHKISEMIVEYDAIVVLEDLNFGFMRGRQKIERSIYQQFEVALIEKLNYLVDKKQSVEKECGLLQALQLTNQFESFQKLGKQTGVLFYIPAWNTSKIDPVTGFTNLFDTRCDTREKIHDFISSFDSIKYNPDKNYFEFSFNYDNFTKKAEGSRTHWTICSYGERIETFHNLEKNNNWDMRVIDLSAQIRSLLEEEKIDINGNLKDAILRIDKTSFLKSIMHYIKLMLQMRNSKTGTEEDYILSPVADENGIFFDSRTQKANLPLDADANGAYNIARKGLWIVRQIQKKQENEKLNLAISNKEWLKFAQEKTYLND

SEQ ID NO: 87 - protein, 1249 aa, unidentified
  REGION 1..1249: note = Description of Unknown: uncultivated organism sequence
  REGION 1..1249: note = Category: MG13 effectors
  REGION 1..1249: note = Description: MG13-53 effector
MKQFTNLYPVSKTLRFELQPIGKTKENIEKNGILMRDEKRAEDYKIVKGFIDDYHKQFIKERLWSFKLPLNSEGHLNSLEEYQALYEVSKRNEVQEAEFSEVKDNLRSIIAKRLTESGSAYERIFKKELIREDLIDFLESKEDKDIVRQFADFTTYFSGFHENRKNMYVAEEKSTAIAYRLIHQNLPKFMDNMKTFAKIAETSVAEHFSDIYEGWKEYLNVGSIEEIFRLDYFSETLTQPHIEVYNYIIGKKILEDGTEIKGINEYVNLYNQQQKDKSKRLPFLIPLYKQILSDREKLSWLVEEFDSDEIMLAAINEAYNHLHDLLMGRENESLRSLLLHIKDFDLSQISITNDLSLTDISQHLFSRYDVFTNGIKDELRIITPRKKKESDEDFEDRISKIFKTQKSFSIDFLDKLPQPVMEDGKTRSIEDYFMTLGAVNTETTQKENLFAQIENAYEDARFVLQLKDTGDTLSQNKSAVAKIKALLDALKDLQHFIKPLLGSGEENEKDDLFYGSFQMMWDELDTITPLYNKVRNWLTRKPFSTEKIKLNFDNSQLLGGWDVNKEPDCTGVLLRKDGLFYLGIMDKKSNHIFETDVIPTDGECFDKIDYKLLPGANKMLPKVFFSKSRIDEFAPSESIITSYKRGTHKKGVGFNLAECHRLIDFFKQSINKHEDWSKFGFHFSDTKTYEDISGFYREVEQQGYMLSSRPVSSSYIDTLVSEGKLYLFRIWNKDFSEFSKGTPNLHTLYWKMLFDERNLSDVVYKLNGQAEVFYRKASIKPENRIVHKANQPVANKNELNTKLASTFEYDIIKDKRYTVDKFQFHVPITINFKAAGQTNINTIVQDAIRQEEFSHIIGIDRGERHLLYLSLIDLKGNIVKQMTLNEIINEYKGQTYKTNYHDLLAKREGDRTNARRSWETIETIKELKEGYLSQVVHIISKMMVEYNAIVVLEDLNTGFMRGRQKIERQVYEKFEKMLIEKLNCYIDKQVSPTAKGGLLNPLQLTCDAQKWKRSHQCGCLFYIPAWNTSKIDPVTGFVNLLDTHYDTREKARVFFSKFQRISYNAQKGWFEFAFDYNDFTSKAEGTRTQWTLCTQGERIRTFRNPQKNHQWDDERIALTDAYKQLFDKYDIDINGNIKEAISAQTDAQFFKELMGLMKLLLQMRNSVTNSEEDYLLSPVADDAGHFFDSREGISNLPIDADANGAYNIARKGLWIIRKIQEAPSGERISLSITNKEWLQFAQTKPYFND

SEQ ID NO: 88 - protein, 1274 aa, unidentified
  REGION 1..1274: note = Description of Unknown: uncultivated organism sequence
  REGION 1..1274: note = Category: MG13 effectors
  REGION 1..1274: note = Description: MG13-54 effector
MNELKQFTNLYQLSKTLRFELQPIGKTKDNIETNGILQRDKKRAEDYIRVKQFIDEYHKQFIKERLWNFTLPMESEGCHDSLEEYQSLYELPKRDTAQEAAFTEVKDNLRGIIAKRLTEKGTAYDRIYKKELIREDLIEFLEKDEEKDIVRQFADFTTYFTGFYENRANMYTAEEKSTAIAYRLIHQNLPKFMDNMKAFAKIAQTSVAEHFADIYDGWKEYMNVGSLEGIFQLDYFSETLTQPHIEVYNYIIGKRILEDGTEIKGINEYVNLYNRQQKDKSLRLPFLVPLYKQILSDREKLTWLSEELDSDEKMLAAIKETYTNLHDLLMGEENESLRSLLQHLKDFNLAQVNITNDISLTDISQHLFGQYDVFTRGLKDELRIITPRKKNESDEAFEERITKIFKTQKSFCIAVLDKLPQPVMEDGKPRCIEDYFMTLGAVNTETNQKVNLFAQIENAHEDARAILQMTDTGDMLSQNKPAVAKIKALLDAFKDLQHFIKPLLGSGEENEKDELFYGVFHLIWDELDTITPLYNKVRNWLTRKPYSTEKIKLNFDSPTLLKNMANPQTSSAAIFRDKEGYYYLGILNPKHRNCLNNMPSAADDKAESIEFLNYRQGGDMGKNVQNLMVIDGETRMVHGRKETSGKFAGQNLRLENAKNEYLPADVNAIRLRQSYLTTSSTFNKDDLATFIAYYIPLVKSYYSDFVFHFKEPHEYISLPDFTDHINQQAYQLYFTSVSKAYIDQMVKEGKIFLFRIWNKDFSEYSKGTPNLHTLYWRMLFDEHNLRDVVYMLNGQGAEVFFRKASIKPENRIVHKANNAIANKNSLNEKRTSTFDYDIIKDRRYTVDKFQFHVPITINFKEPKERNINPIVLDTIRNGGFTHVIGIDRGERHLLYISLIDLQGHIVKQMTLNEIVNEYKGLTHKTNYHDLLAKREGERTTARRSWDTIENIKELKEGYLSQVVHVISKMMVEYNAIIVLEDLNKGFTRGRQKIERQVYDKFERMLMDKLNCYIDKQIEPDATGGLLHSLQLTNEYKLFSKLKQKQSGCLFYIPAWNTSKIDPVTGFVNLFDTRYETREKARLFFLRFQRISFNVDKNWFEFAFDYNDFTTKAEETRTQWTLCTHGTRIRSFRNPNKNYQWDDDEIVLTDEFKRLFEKYGIDIRGNLKEAINSQAEAQFYKDLMSLMKLLLQMRNSRINSEVDYLLSPVADEKGLFFDSREGIDGLPDNADANGAYNIARKGLWMMEQIKQSDESAKPKLSISNKEWLRYTQGME

SEQ ID NO: 89 - protein, 1263 aa, unidentified
  REGION 1..1263: note = Description of Unknown: uncultivated organism sequence
  REGION 1..1263: note = Category: MG13 effectors
  REGION 1..1263: note = Description: MG13-55 effector
MRKFNEFVGLYPISKTLRFELKPIGKTLEYIQRNKLLEHDAVRADDYVKVKKIIDKYHKCLIDEALSGFTFETEADVRSNNSLSEYYLYYNLKKRNEQEQKTFKTIQNNLRKQIVNKLTQSEKYKRIDKKELITTDLPDFLTNESEKELVEKFKNFTTYFTEFHKNRKNMYSKEEKSTAIAFRLINENLPKFVDNISAFEKVASSPLAEKINALYEDFKEYLNVEEISRVFRLDYYNELLTQKQIDLYNAIVGGRTEEDNRIQIKGLNQYINEYNQQQTDRSNRLPKLKPLYKQILSDRESVSWLPPKFDSDKDLLIKIKECYDALSEREKVFDKLESILKSLSTYDLSKIYISNDSQLSYISQKMFGRWDIIIGKAIREDCAKRNPQKSRESLEKFAERIDKKLKAIDSISIGDVDECLAQLGETYVKRVEDYFAAMGESEIDDEQTDTTSFKKNIEGAYESVKELLNNADNITDNNLMQDKGNVEKIKTLLDAIKDLQRFIKPLLGKGDEADKDGVFYGEFTSLWTKLDQVTPLYNMVRNYLTSKPYSTKKIKLNFENSSLMKGWDLNKEPDNTTVIFRKDGLYYLGIMGKKYNRVFVDREDLPHDGECYDKMEYKLLPGANKMLPKVFFSETGIQRFRPSEELLGKYERGTHKKGAGFDLGDCRALIDFFKKSIERHDDWKKFDFKFSDTSTYQDISEFYREVEQQGYKMSFRKVSVDYIKSLVEEGKLYLFQIYNKDFSAHSKGTPNMHTLYWKMLFDEENLKDVVYKLNGEAEVFFRKSSITVQSPTHPANSPIKNKNKDNQKKESEFKYDLIKDRRYTVDKFLFHVPITMNFKSVGVSNINQLVKRHIRSATDLHIIGIDRGERHLLYLTVIDSRGNIKEQFSLNEIVNEYNGNTYRTDYHELLDTREGERTEARRNWQTIQNIRKLKEGYLSQVIHKISELAIKYNAVIVLEDLNFGFMRSRQKVEKQVYQKFEKMLIDKLNYLVDKKKPVAETGGLLRAYQLTGEFESFKTLGKQSGILFYVPAWNTSKIDPVTGFVNLFDTHYENIEKAKGFFDKFKSIRYNSDKDWFEFVVDDYTRFSPKAEGTRRDWTICTQGKRIQIYRNHQRNNEWEGREIDLTKAFKEHFEAYGVDISKDLREQINTQNKKEFFEELLRLLRLTLQMRNSMPSSDIDYLISPVADDTGCFFDSRKQAELKENAVLPMNADANGAYNIARKGLLAIRKMKQEENDSAKISLAISNKEWLKFAQTKPYLED

SEQ ID NO: 90 - protein, 1249 aa, unidentified
  REGION 1..1249: note = Description of Unknown: uncultivated organism sequence
  REGION 1..1249: note = Category: MG13 effectors
  REGION 1..1249: note = Description: MG13-56 effector
MKNFESFTNLYPLSKTLRFELRPIGRTLENIQANGLLEQDNHRAESYKLVKAIIDRYHKVFIDEALSHCVLPVENSGNKNSLSEVYQYLTTKDHSEKETDDFNKTQDNLRKMIVSALKKDTHFGRIFKKELIREDLLNNDLQGFDLNEEEYDLIKEFRDFTTYFVGFNENRANMYSEEAKSTAIGYRLIHENLPKFIDNMVIFQKVKVSPVSEYFANIETEMEDMLQGIKVEDIFDLNFFNQVLVQRFIDLYNAVIGGQVASEEDHRKGLNQYINEYNHVQKDKKDRLPKFKPLFKQILSDRIHASWQIDNFESDNEVLKAIENAYETLDEEVISRKDSNLPLLFASISDFDLSGIYVSAKAITDFSQQIFKDWNAIDSALEAACRRSNQPKKKETEEKYAERIKKQRSHIDSYSVGEIIESLVAFQPNPEKSILDYLGGMGRREDKPSIIESIKSAYRDVEELLKTEYPANKNLALDKDNISKVKALLDAIKELQFFIKPLLGTGKESGKDERFYGEFVDYWQTLDIITPLYNKVRNYATRKPYSTAKFKLNFENSTLLNGWDVNKEPDNTSVLLRKDGLYYLAIMKKSCNRVFAVDQYDTVGDCYEKIDYKLLPGANKMLPKVFFAKSRIDEFAPSREVLDIYKRGSFKKGEEFCKADLHTLIDFYKASITKHEDWKKFGFEFSPTSSYDDISGFYREVEQQGYQIRFRKVSCTYIDSLVDQGQIYLFQIYNKDFSPFSKGTPNMHTLYWKMIFDERNLKDVVYKLNGQAEIFFRKSSLPVETPTHPANQPIANKNPLNRKKESLFTYDIVKNRRYRYDKIQFHVPITMNFKSIDSEYINDQVQDYIRQSKDLHFIGIDRGERHLLYLTVIDSKGIIEEQFSLNVINNEYNGTTYSTNYHDLLEERGDDRTKARREWLAIESIKELKEGYLSQVVKKITDLMIKYNAIVVLEDLNMGFKRGRQKVESSAYQQFEHKLIDKLNYLAGKTAPIDKVGGLLKAYQLATPYQNEMGFQNGFVFYIPAWNTSKIDPVTGFTNLFDLHIETMEQAKKFFSKFDYIRWNAANNWFEFAFDYKNFTEKADGSRTQWTLCTQGTRIRTFRNPEKNSEWDNVEVDLTDLFLSLFKSKNIDIKSDLKTQILAQNEKDFFMSLLLCLKLTLQMRNSISNSEVDYLISPVADANGDFFDSRKVDSSLPANADANGAYNIARKGLWMALRIKKSRPEDKVSLKITNKEWLNFAQNKPYLTD

SEQ ID NO: 91 - protein, 1235 aa, unidentified
  REGION 1..1235: note = Description of Unknown: uncultivated organism sequence
  REGION 1..1235: note = Category: MG13 effectors
  REGION 1..1235: note = Description: MG13-57 effector
MKAFTNFYSLPKTLKFELKPIGKTLEFINTNGLLAQDEHRADNYIKVKKIIDDYHKAFIENSLRNLKLKYEDIEAYYSYYIIKNREENQKKAFVNIQTSLRKQIASRFKDNDLSRLFGKELIKEDLINFVKTNDDRILIEEFKNFTTYFTGFHENRKNMYSEEEKSTSIAYRLINENLPKFIDNISTFEKVRNTSIENDFNTIYSELEEYLNVVSIEEIFNLNYFTEVLTQTQIDVYNAIIGGKSFDDGRKIKGLNEYINLYNQTQKDKTKRLPKLKVLFKQILSDRNAISYIPEEFKNDNEVLNSIEKVYQDLNQEVFNKKKEGEYSLKELLLHIKEFELDKIYLRNDLSLTDISKKHLGDWGIINKAIANQYIKENPKKTKDKQEKYDEKIKKYLNSFDSFSIQFINDCLEDKTKKVEDYFIQCKNKDDKNLFEQIEIYYNGIKDLLNTDYPENKQLSQDKESVEKIKLFLDSIKELQWFIKPFLEKGEVAEKDEKFYGEFSSMWKLLDDSITPLYNKVRNYMTKKPYSQEKIKLNFENSTLLDGWDVNKESDNASIILRKDGLYYLGIMNKKHNRIFDNKNIKTNGVCYEKMDYKLLPGANKMLPKVFFSKSRIDEFSPSEKLLENYKNDTHKKGDTFNINDCRDLIDFYKSSIQKHEDWKKFNFKFSDTKTYNDLSGFYREVEQQGYKITFRNVSEEYINTLVEEGKLYLFQIYNKDFSPNSKGTPNMHTLYWKMLFDEENLKNVVYKLNGQAEVFFRKSSIKDENKIIHKANSPILNKNEKNHKKESLFDYDLIKDKRYTIDKFQFHVPITINFKAIGSENINPNVNQYIKENKVKHIIGIDRGERHLLYLSLIDLKGNIIKQFSLNEIRNEYKGETYKTNYHDLLNKKEVDRDEARKNWQTIENIKELKEGYLSQVIHKISQLMVEYNAIVVLEDLNFGFMRGRQKVEKQVYQKFEKMLIDKLNYLVDKKKDPQEEGGLLNAYQLTSKFESFQKLGKQSGFLFYVPAWNTSKIDPTTGFVNLFDTRYENIDKSIEFFGKFSSIEYNKAKDYFEFEFDYSKYTTKADGTKTSWTICTNSTRIETFRNTEKNSQWDSKEIVLSQAFKDLFDKYKINYSSNLKASILSQDKKEFFEELLHLLKLTLQMRNSKTGTDIDYLISPVANNKGVFYDSRVVNDTLPKDADANGAYNIARKGLWVIDQIKKTEDLKNLKLAISNKEWLSYVQSLVEK

SEQ ID NO: 92 - protein, 1272 aa, unidentified
  REGION 1..1272: note = Description of Unknown: uncultivated organism sequence
  REGION 1..1272: note = Category: MG13 effectors
  REGION 1..1272: note = Description: MG13-58 effector
MKQFTNLYPVSKTLRFELQPIGKTKEHIEKTGILQRDEKRAEDYKIVKGFIDDYHKQFIKDRLWSFKLPLHSEGHLDSLEEYQALYEMSKRNDVQEAEFTEIKDNLRSIIAKRLTESGSAYERIFKKELIREDLIDFLESNEDKDIVRQFADFTTYFSGFHENRRNMYVAEEKSTAIAYRLIHQNLPKFMDNMKAFAKIAGTSVAEHFTDIYEGWKEYLNVGSIEEIFRLDYFSETLTQTHIEVYNYIIGKKILEDGTEIKGINEYVNLYNQQQKDKSKRLPFLVPLYKQILSDRDKLSWLAEEFDSDEKMLAAINESYNHLHDLLMGNENESLRSLLLHIKDFDLSQINITNDLSLTDISQHLFGRYDVFTNGIKDELRNITPRKRKEGEEDFEDRISKIFKTQKSFSIDFLDKLPQPVMDDGKLRSIEDYFITLGAVNTETTQKENLFAQIENAYEDARTILQLKDTGDSLSQNKSAVAKIKALLDALKDLQHFIKPLLGSGEENEKDELFYGSFQMMWDELDTVTPLYNKVRNWLTRKPFSTEKIKLNFESPTLLKNMAVPQTSSAAIFRDRQGYYYLGILDSNSRNCINELLSVSADPSGFDFMQYHQGGDMGKNVQNLMVINGEVCKKNGRKERSGQFVGQNLILEKLKNEYLPKDVNEIRLKQSYLTSSSTFSKKDLVRFVEYYIPLVKAYYSEYSFVFKTPSEYKSFADFTDHINQQAYQLSFTPISKDSIDNLVEEGRLYLFRIWNKDFSKFSKGTPNLHTLYWQMLFDERNLQNVVYMLNGQGAEVFYRKASIKPENRIIHKANQPIANKNELNTKRTSTFEYDIIKDKRYTVDKFQFHVPITINFKAAGQTNINPIVQEAIKQGEFSHIIGIDRGERHLLYLSLTDLKGNIVKQMTLNDIVNEYKGQTYKTNYHDLLAKREGDRTDARRSWEAIETIKELKEGYLSQVVHIISKMMIEYNAIIVLEDLNTGFMRGRQKMERQVYEKFERMLIDKLNCYIDKQLSPTDEGGLLHPLQLTCDAQKWKRSHQCGCLFYIPAWNTSKIDPVTGFVNLLDTHYDTREKARVFFSKFQRISFNVPKGWFEFAFDYNDFTTKAEGTRTQWTLCTQGERIRTFRNPQKNNQWDDERIVLTDAFKQLFDKYDIDINGNIKEAISEQTDAQFFKDLLGLMKLLLQMRNSITNSEEDYLLSPVADDAGHFFDSREGISSLPIDADANGAYNIARKGLWIVRKIKETPNGEKTTLSISNKEWLQFAQTKPYIND

SEQ ID NO: 93 - protein, 1252 aa, unidentified
  REGION 1..1252: note = Description of Unknown: uncultivated organism sequence
  REGION 1..1252: note = Category: MG13 effectors
  REGION 1..1252: note = Description: MG13-59 effector
MNTFDQFTNLYNVQKTLCFELQPLGKTKDYIEKNGILMRDEKRAEDYKVVKRIIDEYHKKFIKDRLWSFKLPLNSEGRHNSLEEYQTLYEMSKRDESQESAFTEVKDNLRTIIAKRLTESGTKYDTIFKKELIREDLIDSLVDEEEKELVRQFADFTTYFTGFHENRKNMYSAEEKSTAIAYRLIHQNLPKFMDNMKAFAKIAETSVAEHFADIYEGSKEMLNVGSIEEIFRLDYFSETMTQPHIEVYNSIIGKRVLEDGTEIKGINEYVNLYNQQQKEKSQRLPLLVPLYKQILSDREKLSWLAEEFDCDEKMLAAVNETYARLHDLLMGNENESLRSLLLHLGDYDLEQINIANDLSLTDISQHLFGRYDVFTNGIREELRVITPRKRKETDEQLEDRISKIFKTQKSFSIAFLNSLPQPAMEDGKPRNIEGYFMALGAVNTETTQKENLFAQIENAYENAKSVLQMKETGDMLSQNKPAVAKIKALLDALKDLQHFIKPLLGSGEENEKDELFYGSFQMMWDELDAVTPLYNKVRNWLTRKPYSTEKIKLNFDNAQLLGGWDVNKEPDCTGVLLRKDGFYYLGIMDKKSNRVFEPEATPNDGDCFDKIDYKLLPGPNKMLPKVFFSKSRIDEFAPSEAIVSGYKRGTHKKGADFSLSDCHRLIDFFKQSINKHEDWKKFGFRFSDTSTYEDISGFYREVERQGYMLSSHRVSASYVERLVDEGKLYLFRIWNKDFSEYSKGTPNLHTLYWKMLFDERNLADVVYKLNGQAEVFYRKSSIQPEHRIVHPAGKPIANKNELNAKRTSTFEYDIVKDRRYTVDKFQFHVPITINFKATGQENINPVVQDTIRKGGFTHIIGIDRGERHLLYLSLIDLQGNIVMQMTLNEIINEYNGLKHKTNYHDLLAKREGERTEARRSWDTIENIKEMKEGYLSQVVHIISKMMVEYNAIVVLEDLNTGFMRSRQKIERQVYEKFEKMLIDKLNCYIDKQTDPTSEGGLLHPLQLACEAKKWKRSHQCGCLFYIPAWNTSKIDPVTGFVNLFDTRYENAAKAKAFFGKFGSIRYNANKDWFEFAFNYKDFTTKAEGTRTQWTLCTYRERIRTFRNPQKNHQWDDEEIVLTDAFKQLFDKYDIDMKGNLKEAICAQNDAQFFKDMMELMKLLLQMRNSITNSETDYLLSPVADEKGQFFDSRRGITTLPDNADANGAYNIARKGLWVIRKIQETAENEKPSLAITNKEWLQFAQTKPYLKD

SEQ ID NO: 94 - protein, 1240 aa, unidentified
  REGION 1..1240: note = Description of Unknown: uncultivated organism sequence
  REGION 1..1240: note = Category: MG13 effectors
  REGION 1..1240: note = Description: MG13-60 effector
MKQFTNLYPVSKTLRFELIPDKRTKEYLEQSDLISKDEKRSENYKIVKKIIDRYHKQFIDEVLSTTKLQYAKEGKLNSLEEFYFLYTNSNKTDADKKALDKVKEQLRKQIADALKKDNRFKRIDKKELIREDILKVATQEERPLIDEFRDFTTYFTGFHENRKNMYSPEAQSTAIAYRLIHENLPKFVDNIATFQKILHSPIAENLPVLYKEMEEFLNVNSIEEMFMLDYYSDVLTQPQIEVYNAIIGGRTLEDGTKIQGLNEYVNLYNQRQTLRENRLPKLKPLFKQILSDKEAVSWLPEEFESDQQLLKSVREFYASFKDNVMQQLKELLLNLPNYNLDKIYIPNDLALTDISQSLYGDWSVIKNRINEDFRNEYPQKKKETAEKYEERITKLVKSMDSFSIGYLNSCLTSQVKNICSHFTSLGAVNTDKKQKENIFIQIENAYIDVCDLLEKEYPQNKNLAQDKVHVNNLKAFLDAIKTLQHFIKPFLNTENEAEKDERFYGDITVLGEELNSITPLYNKVRNRMTRKPYSIAKFKLNFENSTLLDGWDVNKERDNSCVILRKDGFYYLAIMRKDSNRIFADAPKVENNADAYEKMEYKLLPGANKMLPKVFFSKSRIDEFQPSSLLLEHYEKGTHKKGDSFSLKDCHELIDFFKASINKHEDWKNFNFKFSPTETYEDLSGFYREVEQMGYKISFKNIPVSYINVMVSEGKLFLFQIYNKDFSQYSKGTPNLHTLYWKMIFDEQNLANVIYKLNGQAEVFYRKKSLNIVKATHPANQAIINKNPFNKKEKSTFKYDLIKDKRFTVDKFQFHVPITINFKAIGMGNINPLVNQFIKNTSDLHIIGIDRGERHLLYVTVIDSKGNIKEQFSMNQIVNEHKGNTYKTDYHDLLDKREEERLKERQSWSTIEGIKELKQGYLSQVIHKIVTLMVKYNAIVVLEDLNMGFKRGRQKVESSVYQQFEKALIEKLNYLVDKQQNPHEYGGLLKGFQLTNKFTSFRDMGRQNGFLFYIPAWNTSKMDPVTGFVNLLHPKYESVEKARSFICKFKSIRFNEKKGWYEFTFDYNDFTAKAEGTRTEWTLCTYSTRIETFRNKEKNSSWDSREVNLTEEFNKLFSQYGISDDENLKEAIAKQTEKHFFETLMHLLNLTLQMRNSKTGTEIDYLISPVTNEEGYFYDSRNCGSSLPENADANGAYNIARKGLWITRQIQSSENFEKVDITMSNKEWLNFAQTKPYLND

SEQ ID NO: 95 - protein, 1252 aa, unidentified
  REGION 1..1252: note = Description of Unknown: uncultivated organism sequence
  REGION 1..1252: note = Category: MG13 effectors
  REGION 1..1252: note = Description: MG13-61 effector
MKDLKQFTNLYPVSKTLRFELQPIGKTKENIEKNGILARDEQRAKDYMLVKGFIDEYHKQYIKDRLWSFKIPMNDEGHLDSLEEYQMFYEMSKRDDTQEASFTEVKDNLRGIIVNRLTENGSPYERIFKKELIREDLIDFLEDDESREIVRQFADFTTYFSGFHENRRNMYSAEEKSTAIAYRLIHQNLPKFMDNMKAFAKIAETSVAEHFPDIYEGWKEYLNVGSIEEIFRLDYFSETLTQPHIEVYNYIIGKKVLEDGTEIKGINEYVNLYNQQQKDKSKRLPFLVPLYKQILSDREKLSWLAEEFDSDDKMLSAINELYNHLHDLLMGKENESLRLLLSHLKDYNLEQINIANDLSLTDISQQLFGRYDVFTNGIKEELRAITPRKKKESDEEFEDRISKIFKTQKSFSIALLDKLPQPVMEDAKPRRVEDYFMSLGAVNTEKTQKENLFAQIENAYEDVRSILQMKDTSNMLSQNKVAVAKIKTLLDALKDLQHFIKPLLGSSEENEKDELFYGSFQMMWDELDTLTPLYNKVRNWLTRKPYSTEKIKLNFDNAQLLGGWDVNKEPDCTGVLLKKDGLYYLGIMDKKSNRIFDADVTPADGDCYDKIDYKLLPGANKMLPKVFFSKSRIDEFAPSEAIIDKYKRGTHKKGKDFSLTDCHRLIDFFKSSISKHEDWSKFGFRFSDTKTYEDISGFYREVEQQGYMLSSHPVSASYIHQLVDEGKLYLFRIWNKDFSEYSKGTPNLHTLYWKMLFDERNLADVVYKLNGQAEVFYRKASIKAENRIIHPAKHPIANKNVLNENRTSTFEYDIIKDRRYTVDKFQFHVPITIGFKAAGQTNINPVVQETIRSGGFSHIIGIDRGERHLLYFSLIDLKGNIVKQMTLNDIVNEYKGVTYKTNYHDLLAKREGERTDARRSWDTIETIKELKEGYLSQVVHIISKMMVEYNAIIVLEDLNTGFMRGRQKIERQVYEKFERMLIDKLNCYIDKQANPSENGGLLHPLQLTCDAQKWKRSHQCGCLFYIPAWNTSKIDPVTGFVNLFDTRYDTREKARLFFSKFQRISYNAKKDWFEFAFDYNDFTTKAEGTRTEWTLCTYGERIRTFRNPEKNHQWDDERIMLTEEFKQLFDRYDIDIHGNLKEAISAQSDAQFFKELLSLMKLLLQMRNSITNSEEDYLLSPVADENGHFYDSREDNISLPNNADANGAYNIARKGLWLIEQIKHADELSKLKLAISNKEWLQFAQTKPYLND

SEQ ID NO: 96 - protein, 1249 aa, unidentified
  REGION 1..1249: note = Description of Unknown: uncultivated organism sequence
  REGION 1..1249: note = Category: MG13 effectors
  REGION 1..1249: note = Description: MG13-62 effector
MKQFINQYQVAKTLRFDLQPIGKTKDNIEKTSILARDEQRAKDYVIVKGFIDDYHMQFIKDRLWSFKIPLKSEGHLDSLEEYQMLYGLSKRDEAQETAFTEVKDNLRSIIAKRLTGNGSAYDRIFKKELIREDLVDFLEKEEDKEIVRQFADFTTYFTGFHENRRNMYSAEEKSTAIAYRLIHQNLPKFMHNLKAFAKIAETPVAEHFADIYKGWEEHLNVGSIEEIFQLDYFSETLTQPHIEVYNYIIGKKILEDGTEIKGINEYVNLYNQQQKDKSKRLPFLVPLYKQILSDREKLSWMAEEFDSDDKMLSAINESYSHLHDLLMGEENDSLRSLLLHIKDFNLEQINITNDLSLTDISQHLFNRYDVFTNGIKDELRTITPRKKKETDEIFEDRISKIFKTQKSFSIAFLDKLPQPVMEDGKPRRVEEYFLSLGAVNTETTQKENLFARIEHAYEDAQSILQMKDTIDTLSQNKPAVAKIKALLDALKDLQHFIKPLLGSGEENEKDELFYGSFQMMWDELDTVTPLYNKVRNWLTRKPYSTEKIKLNFDNAQLLAGWDVNKEADCTGVLLQRDGFYYLGIMNKKTNRIFDADVTPSHGECYDKIDYKLLPGANKMLPKVFFSKSRIDEFAPSDAIINSYKRGTHKKGTDFSLSDCHRLIDFFKASIRKHEDWSKFGFHFSDTKIYDDISGFYREVEQQGYKLASHPVSVSYVHQLVEEGKLYLFRIWNKDFSQFSKGTPNLHTLYWKMLFDPRNLEDVVYKLNGQAEVFYRKASIKPENRIIHPAHRPITNKNEFNEKRTSTFEYDIIKDRRYTVDKFQFHVPITINFKATGQTNINPIVQEAIRRRGFTHIIGIDRGERHLLYLSMIDLKGNIVKQMTLNDIINEYNGITYRTNYHDLLAKREGERTDARRSWDTIENIKELKEGYLSQVVHIISKMMVEYNAIVVLEDLNTEFMRGRQKIERQVYEKFEKMLIETLNCYIDKHADPLEGGGLLHPLQLTCDVKKWKRSHQCGCLFYIPAWNTSKIDPVTGFVNLFDTRYDTREKARLFFSKFQRISYNSEKDWFEFTFDYSNFTSKAEGTRTKWTLCTYGERIRTFRNPKKNHQWDDEQIVLTKDFKQLFDKYGIDIHGNLKEAISTQSDSQFFRDMLGLMKLLLQMRNSITNSEVDYLLSPVADEAGHFFDSREEIESLPNNADANGAFNIARKGLWVIRKIQETAENDKISLAISNKEWLQFAQTKPYLND

SEQ ID NO: 97 - protein, 1249 aa, unidentified
  REGION 1..1249: note = Description of Unknown: uncultivated organism sequence
  REGION 1..1249: note = Category: MG13 effectors
  REGION 1..1249: note = Description: MG13-63 effector
MKEFTNLYPVSKTLRFELQPIGMTKENIEKNGILQRDEKRAEDYKIVKGFIDEYHKQFIKERLWSFKLPLNCEGHLNSLEEYQALYELPKRNDAQEAEFTEIKDNLRSIIAKRLTESGSAYERIFKKELIREDLIDFLESNEDKEIVRQFADFTTYFSGFHENRRNMYVAEEKSTAIAYRLIHQNLPKFMDNMKAFAKIAETPVAEHFDDIYEGWKEFLNVGSIDEIFRLDYFTETLTQPHIEVYNYIIGKKILEDGTEIKGINEYVNLYNQQQKDKSKRLPFLVPLYKQILSDREKLSWLGEEFDSDEKMLAAINESYTHLHDLLMGDENESLRALLLHIKDFDLTKINITNDLSLTDISQHLFGRYDVFTNGIKDELRNITPRKRKESDEELEDRISKIFKTQKSFSIDFLDKLPQPVMDDEKPRSIEDYFMTLGAVNTETTQKVNLFAQIENAYEDARTILQLTDTGDTLSQNKSAVAKIKALLDALKDLQHFIKPLLGSGEENEKDELFYGSFQMMWDELDTVTPLYNKVRNWLTRKPFSTEKIKLNFDNSQLLGGWDVNKEPDCTGVILRKEGFYYLGIMDKKSNHIFEADITPSVGECYDKIDYKLLPGANKMLPKVFFSKSRIDEFAPSEAIISSYKRGTHKKGADFNLVECHRLIDFLKQSINKHEDWSKFNFHFSDTKSYEDISGFYREVEQQGYMLSSHPVSSSYINQLVDEGKLYLFRIWSKDFSEFSKGTPNLHTLYWKMLFDERNLADVVYKLNGQAEVFYRKASIKPENRIIHKANHSIANKNELNSKRTSTFEYDIIKDRRYTVDKFEFHVPITINFKAAGQTNINPIVQDVIRQGGFSHIIGIDRGERHLLYLSLIDQKGNIIKQMTLNEIINEYKGQTYKTNYHDLLAKREGDRTDARRSWETIETIKELKEGYLSQVVHIISKMMVEYNAIVVLEDLNTGFMRGRQKIERQVYEKFEKMLIEKLNCYIDKHEAPSENTGLLHPLQLTCDAQKWKRSHQCGCLFYIPAWNTSKIDPVTGFTNLLDTRYDTREKARVFFSKFQRISYNAEKGWFEFALDYNDFTAKAEGTRTQWTLCTYGERIRTFRNPKKNHQWDDERIVLTDAFKQLFDTYDIDINGNLKETISAQTDAQFFKELLGLMKLLLQMRNSITNSEEDFLLSPVADDAGHFFDSREGNSSLPIDADANGAYNIARKGLWVIRKIQETANEEKPSLSITNKEWLHFAQTKPYLKD

SEQ ID NO: 98 - protein, 1252 aa, unidentified
  REGION 1..1252: note = Description of Unknown: uncultivated organism sequence
  REGION 1..1252: note = Category: MG13 effectors
  REGION 1..1252: note = Description: MG13-64 effector
MNNLKQFTGLYPVNKTLRFELKPVGKTKENIENKGVLERDSQRAVDYKVVKGFIDEYHKQFIKDRLWSFKLPLFSEGRLDSLEEYMALYELSKRDEAQEAEFSEVKDNLRSIIAKRLTESGSAYERIFKKELIREDLIAFLEKDEDKEIVRQFADFTTYFGGFHENRKNMYSAEEKSTAIAYRLIHQNLPKFMDNMKAFAKIAETSVAEHFADIYMGWKEYLNVGSIEEIFCLDYFSETLTQPHIEVYNYIIGKKILEDGTEIKGINEYVNLYNQQQKDKSKRLPFLVPLYKQILSDREKLSWLTEEFDSDEKMLAAINESYEHLYDLLMGNENESLRSLLIHLKDFNLAQINITNDLSLTDISQHLFSRYDVFTNGIKDKLRIITPRKKKENDEDFEDRISKIFKTQKSFSIDFLDKLPQPVMDDGKPRSVEDYFMSLGTVNTETTQKENLFAKIENAYEDVRPILQMKDTGDALSQNKPAVAKIKSLLDALKDLQHFIKPLLGSGEENGKDELFYGSFQIMWDELDTVTPLYNKVRNWLTRKPYSTEKIKLNFDNAQLLGGWDVNKEPDCTGILLRKDGQYYLGIMDKKSNRIFEADVTPADGDCYDKIDYKLLPGANKMLPKVFFSKSRIDEFAPSEAIVSSYKKGTHKKGAYFNLLECHRLIDFFKQSINKHEDWSKFGFRFSDTETYEDISGFYREVEQQGYMLSSHPVSSLYINQLVDEGKLYLFRIWNKDFSEFSKGTPNLHTLYWKMLFDERNLADVVYKLNGQAEVFYRKASIKPENRVVHQANKPIDNKNGLNKKRTSTFEYDIIKDKRYTVDKFQFHVPITINFKATGQNNINPVVQETIRQGGFSHIIGIDRGERHLLYLSLIDLKGNIVKQMTLNDIVNEYKGQTYKTNYHDLLAKREGERTDARRSWETIETIKELKEGFLSQVVHIISKMMVEYNAIVVLEDLNTGFMRGRQKIERQVYEKFEKMLIEKLNCYIDKHAAPTEDTGLLHPLQLTCDAQKWKRSHQCGCLFYIPAWNTSKIDPVTGFVNLLDTRYDTREKARVFFSKFQRISFNSEKGWFEFVLDYNDFTTKAEGTRTQWTLCTYGERIRTFRNPQKNHQWDDERIMLTEAFKQLFDKYDIEINGNLKEAISAQSDAQFFKGLLSLMKLLLQMRNSITNSEEDFLLSPVSDESGHFFDSREGISCLPIDADANGAYNIARKGLWVIRKIQAVQDGEKLSLAITNKEWLQFAQTKPYLKE

SEQ ID NO: 99 - protein, 1249 aa, unidentified
  REGION 1..1249: note = Description of Unknown: uncultivated organism sequence
  REGION 1..1249: note = Category: MG13 effectors
  REGION 1..1249: note = Description: MG13-65 effector
MKNFESFTNLYPLSKTLRFELRPIGRTLENIQANGLLEQDNHRAESYKLVKAIIDRYHKVFIDEALSHCVLPVENSGNKNSLSEVYQYLTTKDHSEKETDDFNKTQDNLRKMIVSALKKDTHFGRIFKKELIREDLLNNDLQGFDLNEEEYDLIKEFRDFTTYFVGFNENRANMYSEEAKSTAIGYRLIHENLPKFIDNMVIFQKVKVSPVSEYFANIETEMEDMLQGIKVEDIFDLNFFNQVLVQRFIDLYNAVIGGQVASEEDHRKGLNQYINEYNQVQKDKKDRLPKFKPLFKQILSDRIHASWQIDNFESDNEVLKAIENAYETLDEEVISRKDSNLPLLFASISDFDLSGIYVSAKAITDFSQQIFKDWNAIDSALEAACRRSNQPKKKETEEKYAERIKKQRSHIDSYSVGEIIESLVAFQPNPEKSILDYLGGMGRREDKPSIIESIKSAYRDVEELLKTEYPANKNLALDKDNISKVKALLDAIKELQFFIKPLLGTGKESGKDERFYGEFVDYWQTLDIITPLYNKVRNYATRKPYSTAKFKLNFENSTLLNGWDVNKEPDNTSVLLRKDGLYYLAIMKKSCNRVFAVDQYDTVGDCYEKIDYKLLPGANKMLPKVFFAKSRIDEFAPSREVLDIYKRGSFKKGEEFCKADLHTLIDFYKASITKHEDWKKFGFEFSPTSSYDDISGFYREVEQQGYQIRFRKVSCTYIDSLVDQGQIYLFQIYNKDFSPFSKGTPNMHTLYWKMIFDERNLKDVVYKLNGQAEIFFRKSSLPVETPTHPANQPIANKNPLNRKKESLFTYDIVKNRRYRYDKFQFHVPITMNFKSIGSEYINDQVQDYIRQSKDLHFIGIDRGERHLLYLTVIDSKGIIEEQFSLNVINNEYNGTTYSTNYHDLLEERGDDRTKARREWLAIESIKELKEGYLSQVVKKITDLMIKYNAIVVLEDLNMGFKRGRQKVESSAYQQFEHKLIDKLNYLAGKTAPIDKVGGLLKAYQLATPYQNEMGFQNGFVFYIPAWNTSKIDPVTGFTNLFDLHIETMEQAKKFFSKFDYIRWNAANNWFEFAFDYKNFTEKADGSRTQWTLCTQGTRIRTFRNPEKNSEWDNVEVDLTDQFLSLFKSKNIDIKSDLKTQILAQNEKDFFMSLLLCLKLTLQMRNSISNSEVDYLISPVADANGDFFDSRKVDSSLPANADANGAYNIARKGLWMARRIKKSRPEDKVSLKITNKEWLNFAQNKPYLTD

SEQ ID NO: 100 - protein, 1171 aa, unidentified
  REGION 1..1171: note = Description of Unknown: uncultivated organism sequence
  REGION 1..1171: note = Category: MG13 effectors
  REGION 1..1171: note = Description: MG13-66 effector
MIRLLNKYIEANNEKDGEGPDKVQDDLRKLIVKALKSGVSLDKDPEQEERFKSLFSEKLVKNILPNFVQTEEEKSKVAKFRDMTTYFVGFHKNRENMYSEEAQTTAISYRLIHENLPRFLDNIAVYEKVKPVLSDEIASLEEQLHQNGYVEASCIDSLFSVDFYLRVLTQRGIEQYNAVIGKIVNDESDEIKGLNERINLYNQVHKKEKLPLFKPMYKQILSDREQLSWLPETFENDASLLDAVKGFHQDLLSNDILSRIDKLLSSLQDFNLDQIWIANDVQLRGLSKDLYGDWSLIDRALGIERSEDVVQGLTAAQKKAASAAKKRSSFSIVELNAATRSSVPDEKYVPVQNYFSAMGKVCAQGEATRENFVTRICAAYQELEEYIPSIRKSLLQEKRATELIKNYLDAVNDLLRFIKPLLGRGDETDKDANFYGEFTFLTDCLFAIVPLYNEVRNYLTQKPYSTEKFKLNFRGSTLLNGWDKNKERVNLGVILRKEGKYFLAIMNKKHNTLFTEGKLQQHTGGECYQKMEYKLIPGSKMLPKVFFSKKGISTFQPSEELLLNYRIGTYKKGEKFNLEHLHKLIDFYKHSIAVHEDWSKFDFHFSDTSSYRDISGFYKEVEQQGYKLTFRNVSVSYINRLVEEGKLYLFQIYNKDFSEYSKGTPNLHTLYWKMLFDPENLKDVVYKLSGEAEVFFRKKSLDVSHPTHPKNEPIEKKNKNNKGEKSLFSYDLIKDRRFTVDKFQFHVPITMNFKGEQGDRVNQMVQSYVRNNKGLNVIGIDRGERNLLYLVVINEHGEILEQFSLNEIRNAYNGKEHKIDYHTLLEERSKKRQDARQSWQTIEGIKDLKTGYLSQVIHVITQLMVKYNAIVVLEDLNLGFKSSRQKFEQSVYQQFERKLIDKLNFLVNKKAAPNEMGGLLNAYQLTAPFESFRKMGKQNGFLFYVPAWHTSKIDPRTGFVNLLDTRYENVAKAKEFFAKFESITYNPEKKWFEFAFDYKAFGNRADGSRTKWTICSYGERIETFRNPKNNNQWDTKSVPLTERLTELFSKYGIDYTTNLKEQILNQTDKAFFVELLGALRLTLQLRNSRKSTGEDFLFSPVADENGCFFDSRKANDNEPKDADANGAYHIALKGLWALDTIRNTEEGKNPKLAITNKEWLSFAQAKPFAHE

SEQ ID NO: 101 - protein, 1275 aa, unidentified
  REGION 1..1275: note = Description of Unknown: uncultivated organism sequence
  REGION 1..1275: note = Category: MG13 effectors
  REGION 1..1275: note = Description: MG13-67 effector
MNNLNDLTGQYPVSKTIRFDLQPIGKTKENIEKGGILQQDEQRAEDYKTVKGFIDEYHKQFIKDRLWNFRLPLISEGHLDSLEEYQTLYLLAKRNDAQEAEFKEVKDNLRSIIARRLTEKGSAFERIFKKELIREDLIDFVEKPEDKDLVKSFADFTTYFTEFHKNRANMYTAEEKSTAIAYRLIHQNLPKFMDNIKAFAKIAQTSVAGHFVEIYNGSKEYLNVGSLEEVFQLDYFSDTMTQPHIEVYNSIIGKRVLEDGTEIKGINEYVNLYNQQQKDKRQRLPLLVPLYKQILSDREKLSWLAQEFDSDKKMLAAINETFIHLREILMGEDSESLRSILTHLKDFDLTQINITNDLSLTDISQHLFKRFDVFSNGIKAKIRSITPKKKKESDEELEDRVSKIFKTQKSFSIAFLDNLPQPEMEDGKRRSVADYFTALGAVNNEVTQKENLFAQIEIAYEDARDVLQMTETGDTLSQDKPAVAKIKALLDALKDLQHFIKPLRGSGEENEKDELFYGSFLMMWDELDTVTPLYNKVRNWLTRKPYSTEKIKLNFDSPTLLNGWPNPQTNSGAIFRDEEGLYYLAILDAQNRACLNELSSNVNGNEDHIEMMKYLQGGDMGKNVQNLMVIDGEVRKVNGRKETSGEFAGQNLRLENAKHQYLPKNINEIRLKQSYLTSSPTFNKKDLVSFIEYYIPLVEAYYSDYVFHFRKSSEYKSFADFTEHINQQAYQVQFKPVSKTSLYSLVEEGKLYLFRIWNKDFSEFSKGTPNLHTLYWKMLFDERNLADVVYKLNGQAEVFYRKASIKPENKIVHPANRAIANKNELNKKRTSSFDYDIIKDRRYTVDKFQFHVPITINFKATGQTNVNPIVQDTIRRGGFTHIIGIDRGERHLLYVSLIDLKGNIVKQMTLNEILNEYKGLTHKTNYHDLLAKREGERTDARRSWDTIENIKELKEGYLSQVVHIISKMMVEYNAIVVLEDLNPGFMRGRQKIERQVYEKFEKMLIEKLNCYIDKKAEPIEIGGLLHPLQLSCDIKKWKKSHQCGCLFYIPAWNTSKIDPVTGFVNLFDTHYETREKARSFFSKFQRIHFNSEKNWFEFTFDYGNFTTKAEGTRTQWTLCSYGTRIRNFRNPLKNHQWDDEEVELVDEFKHLFDKYSIDIFGNLKESICNQTDAQFYKELMGLMKLLLQMRNSRTNSEVDYLLSPVADEQGHFFDSREGIGSLPDNADANGAFNIARKGLWIIRKVQGTPSDEKMSLAISNKEWLQFAQNRPYLND

SEQ ID NO: 102 - protein, 1249 aa, unidentified
  REGION 1..1249: note = Description of Unknown: uncultivated organism sequence
  REGION 1..1249: note = Category: MG13 effectors
  REGION 1..1249: note = Description: MG13-68 effector
MKNFESFTNLYPLSKTLRFELRPIGRTLENIQANGLLEQDNHRAESYKLVKAIIDRYHKVFIDEALSHCVLPVENSGNKNSLSEVYQYLTTKDHSEKETNDFNKTQDNLRKMIVSALKKDTHFGRIFKKELIREDLLNNDLQGFDLNEEEYDLIKEFRDFTTYFVGFNENRANMYSEEAKSTAIGYRLIHENLPKFIDNMVIFQKVKVSPVSEYFANIETKMEDMLQGIKVEDIFDLNFFNQVLVQRFIDLYNAVIGGQVASEEDHRKGLNQYINEYNQVQKDKKDRLPKFKPLFKQILSDRIHASWQIDNFESDNEVLKAIENAYETLDEEVISRKDSNLPLLFASISDFDLSGIYVSAKAITDFSQQIFKDWNAIDSALEAACRRSNQPKKKETEEKYAERIKKQRSHIDSYSVGEIIESLVAFQPNPEKSILDYLGGMGRREDKPSIIESIKSAYRDVEELLKTEYPANKNLALDKDNISKVKALLDAIKELQFFIKPLLGTGKESGKDERFYGEFVDYWQTLDIITPLYNKVRNYATRKPYSTAKFKLNFENSTLLNGWDVNKEPDNTSVLLRKDGLYYLAIMKKSCNRVFAVDQYDTVGDCYEKIDYKLLPGANKMLPKVFFAKSRIDEFAPSREVLDIYKRGSFKKGEEFCKADLHTLIDFYKASITKHEDWKKFGFEFSPTSSYDDISGFYREVEQQGYQIRFRKVSCTYIDSLVDQGQIYLFQIYNKDFSPFSKGTPNMHTLYWKMIFDERNLKDVVYKLNGQAEIFFRKSSLPVETPTHPANQPIANKNPLNRKKESLFTYDIVKNRRYRYDKFQFHVPITMNFKSIGSEYINDQVQDYIRQSKDLHFIGIDRGERHLLYLTVIDSKGIIEEQFSLNVINNEYNGTTYSTNYHDLLEERGDDRTKARREWLAIESIKELKEGYLSQVVKKITDLMIKYNAIVVLEDLNMGFKRGRQKVESSAYQQFEHKLIDKLNYLAGKTAPIDKVGGLLKAYQLATPYQNEMGFQNGFVFYIPAWNTSKIDPVTGFTNLFDLHIETMEQAKKFFSKFDYIRWNAANNWFEFAFDYKNFTEKADGSRTQWTLCTQGTRIRTFRNPEKNSEWDNVEVDLTDQFLSLFKSKNIDIKSDLKTQILAQNEKDFFMSLLLCLKLTLQMRNSISNSEVDYLISPVADANGDFFDSRKVDSSLPANADANGAYNIARKGLWMARRIKKSRPEDKVSLKITNKEWLNFAQNKPYLTD

SEQ ID NO: 103 - protein, 1249 aa, unidentified
  REGION 1..1249: note = Description of Unknown: uncultivated organism sequence
  REGION 1..1249: note = Category: MG13 effectors
  REGION 1..1249: note = Description: MG13-69 effector
MKQFTNLYPVSKTLRFELQPIGKTKENIEKKGILTRDEKRAKDYQIVKGFIDEYHKQFIKDRLWNFKLPLASEGNLDSLEEYQMFYEMPRRDDAQETDFSEVKDNLRAIIANRLRESGSAYDRIFKKELIREDLVEFLSDEDDKNIVRQFADFTTYFSGFHENRRNMYSAEEKSTAIAYRLIHQNLPKFMDNMKAFTKIAKTSVAEHFADIYAGWKEYLNVGSIEEVFRLDYFSETLTQPHIEVYNYIIGKKVLEDGKEIKGINEYINLYNQQQKDKSKRLPFLVPLYKQILSDREKLSWLAEEFDSDEKMLAAIDKLYTHLHELLMGEENESLRSLLMHMKDYDLSQINITNDLSLTDISQHLFNRYDVYTNGVKEQLKGITPRKKKENDEDFEDRISKIFKTQKSFSISLLNGLPHPEIEDSQPRRIEEYFMAMGAVNTATTQRENLFSKIESAYEDARAFLQMKDTGDSLSQNKPAVAKIKALLDAFKDLQHFIKPLLGSGEELEKDELFYGSFQMIWDELDTVTPLYNKVRNWLTRKPYSTEKIKLNFDNSQLLGGWDVNKEPDCTGVLLRKDGFFYLGIMDKRYNHIFEADLPHSDDDCYDKVDYKLLPGANKMLPKVFFSKSRIDEFAPSAAIVSSYKRGTHKKGKNFDLSDCHRLIDFFKQSIQKHADWCKFGFHFSDTQTYEDISGFYREVEEQGYMLSSHQVPSSYINELVDGGKLYLFRIWNKDFSENSKGTPNLHTLYWKMLFDKRNLSDVVYKLNGQAEVFFRKASIKPENRVVHKANQSITNKNALNKKTTSTFEYDIIKDRRYTVDKFQFHVPITINFKASGQTNINPIVQETIRQGGFKHIIGLDRGERHLLYLSLIDLNGNIVKQMTLNDIVNEYNGQTYKTNYHDLLTKREGERTDARRSWDTIETIKELKEGYLSQVIHIISKMMVEYKAIVVLEDLNTGFMRGRQKIERQVYEKFEKMLIEKLNCYIDKKADATDATGLLHPLQLTCDAKKWNRSHQCGCLFYIPAWNTSKIDPVTGFVNLLDTRYETREKAHLFFSKFQRISFNQKKGWFEFAFDYADFTTKAEGTRTQWTLCTYGERIRTFRNPQKNNQWDNERIVLTDEFKRIFDEKGIDIFGNLKDAICNQRDAKFFKDLLGLMKLLLQMRNSITNSEEDYLLSPVADEKGHFFDSREGISSLPIDADANGAYNIARKGLWVIRKIQETPENERPSLSITNKEWLQFAQTKPYLKE

SEQ ID NO: 104 - protein, 1249 aa, unidentified
  REGION 1..1249: note = Description of Unknown: uncultivated organism sequence
  REGION 1..1249: note = Category: MG13 effectors
  REGION 1..1249: note = Description: MG13-70 effector
MEQFTNLYQVSKTLRFDLQPIGKTQENIEKNGILARDEQRAKDYLLVKGFIDDYHKQFIKERLWDFKLPLESEGRLDSLQEYQELYELSKRDDAQEAAFTEIKDNLRSIIAKRLTESGSAYERIFKKELIREDLVEFLEKEEAKDIVRQFADFTTYFSGFHENRRNMYSAEEKSTAIAYRLIHQNLPKFLDNMKAFAKIAETSVAKHFADIYDGWKEHLNVGSIEEIFRLDYFSETLTQTHIEVYNYIIGKKIFEDGTEIKGINEYVNLYNQQQKDKSQRLPFLVPLYKQILSDREKLSWMAEEFDSDEQMLSAINESYNHLHDLLMGDENDSLRSLLLHIKDFNLSQINITNDLSLTDISQHLFSRYDVFTNGIKDELRIITPRKKKESDEDFEDRISKIFKTQKSFSVAFLDNLPQPVMDDGKSRSVEDYFMSLGAVNTETTQKENLFAQIENAYEDARHILQMIDTGDTLSQNKPAVAKVKALLDSLKDLQHFIKPLLGSGEENEKDELFYGLFQMIWDELNTVTPLYNKVRNWLTRKPYSTEKIKLNFDNAQLLGGWDVNKEPDCTGVLLQHDGFYYLGIMNKKANHIFDADVTPSDGDCYDKIDYKLLPGANKMLPKVFFSRSRIDEFAPSETIVNSYKRGTHKKGTGFSLSDCHRLIDFFKTSISKHEDWSKFGFRFSDTKTYEDISGFYREVEQQGYMLSSHPVSTSYIHQLVEDGKLYLFRIWNKDFSEFSKGTPNMHTLYWKMLFDERNLADVVYKLNGQAEVFYRKASIKLENRIVHPSNRPIANKNELNKKRTSTFEYDIIKDRRYTVDKFQFHVPITINFKAAGQTNINPIVQDAIRRGGFKHIIGIDRGERHLLYLSLIDLKGNIVKQMTLNDIVNEYKGITYRTNYHDLLAKREGDRTEARRSWDTIETIKELKEGYLSQVIHIISKMMVEYNAIVVLEDLNTGFMRGRQKIERQVYEKFEKMLIEKLNCYIDKQADPSEITGLLHPLQLTCDAQKWKRSHQCGCLFYIPAWNTSKIDPVTGFVNLLDTRYDTREKARLFFSKFQRISFNAKKDWFEFAFDYNDFTTKAEGTRTNWTLCTYGERIRTFRNPQKNNQWDDERIVLTDAFKQLFDKYNIDIIGNIKESISAQSDTQFFKELLGLMKLLLQMRNSITNSEEDYLLSPVADQNGHFFDSRESNDSLPNNADANGAYNIARKGLWIIEQIKQTEDLSKLKLAVSNKEWLQFAQNKPYLND

SEQ ID NO: 105 - protein, 1220 aa, unidentified
  REGION 1..1220: note = Description of Unknown: uncultivated organism sequence
  REGION 1..1220: note = Category: MG13 effectors
  REGION 1..1220: note = Description: MG13-71 effector
MNTLKDFTNLYQVSKTLRFELKPVGKTLEHIQNNGILENDEHRAESYILVKKIIDEYHKHFIEDAFQGFKLDSNDLSEYYLYFQIRNREESQQKAFETVQSKLRKQISKSFDTKRLFGKELIREDLPDFVNEETDKQLVQEFKDFTTYFTGFHENRKNMYSHEDKSTAIAYRLIHENLPKFINNMTVFDKIKQPLANNLQTLYVDFKEYLNDREIAELFTLNYFSEVLAQTQIDVYNLMIGGKTLEDGTKIKGLNEYINLYNQQQTNRNARLPKFTPLFKQILSDRETISWLPEMFANDNELLESIEKVYQEIPFGEIKSIIEKLHEYDLSKIYVRNDLGITDISQHLLGNYAAIPNAIKENIKQSNPQKRTENQENYEERINKLFKSRGSFSIELINKVIPEKSLTTYFKDYNKTEENPDLLNRIQNCYLQVKNLLNTDYPADKSLKQDKQNVEKIKQLLDNIKEVQQFIKPLLGKGDEADKDAIFYAEFEKLWHKLDNITPLYNMVRNYITQKPYSTGKIKLNFENSTLLDGWDVNKERNNSSIILRKGGLYYLAIMNKKHNTVFLKENTPSTGSCYEKMEYKLLPGANKMLPKVFFSESRIDEFNPSKQLLDNYNNETHKKGEKFNLQDCRSLIDFFKQSINKHEDWENFGFQFSDTSTYQDLSGFYREVEQQGYKITFRNISEDYINQLVDEGKLYLFQVYNKDFSPFSKGTPNMHTLYWRMLFSPENLQNVVYKLNGQAEVFFRKKSLNYTDETWQKGHHYDKLKNKFAYPIISKRRYALDKFQFHVPVTMNYKAVGNERINELVNQFIKNNGIEHIIGIDRGERHLLYLSLIDLNGKIVKQFSLNEIVNEYKDNIYKINYRDLLDKKETERDDARKSWNEIETIKELKEGYLSQVIHKITQLIIEYKAIVVLEDLNFGFMRGRQKVEKQVYQKFEKMLIDKLNYLVDKKKQVADEGGLLNAYQLTNKFESFKKEGKQNGFLFYVPAWNTSKIDPVTGFVNLFSVKYESVSKAQEFFKKFDCIRFNQIDDNNCRFDFYFDYKNFTDKAEGSQTKWTLCSSNDTRYRWNKSLNQGKGAQEEVKVTEALKLLFSDKDYNIAYGDGKDLRERISNQTSAKFFKELMSLLSTLLSMRHNNGKKCDEEQDFILSPVEPFFNSLHATDEHPKDADANGAYNIARKGLWAIEQIKRANDLKNVSLAISNKQWLQFVQQSFEL

SEQ ID NO: 106 - protein, 1249 aa, unidentified
  REGION 1..1249: note = Description of Unknown: uncultivated organism sequence
  REGION 1..1249: note = Category: MG13 effectors
  REGION 1..1249: note = Description: MG13-72 effector
MEQFTNLYPLSKTLRFELIPHEKTKELLERTDYLAQDEKRAESYKIVKGIIDRYHKSFIEDVLSKPIEDQGEKRPILKYAKESTKNCDSLEEFYELYSKSQKSETEKNTLEIIQNNLRKQIVYALTQDARFKNLDKKELIYQDIYAIAKPEEIPFIKEFEGFATYFVGFHENRMNMYSSEAKSTAIGNRLINENLPIFTDNMGTFQKLLNSPVSEHFDTICKDMEDILPYDNIEEIFMLHNYNDFLTQKQITVYNAIIGGRVLEDGTKIQGINEYVNLYNQQQPTRETRLPKLKTLFKQILSDKESVSWLAEEFTSDAEMLKSIRDYYTSFKNNASQQMIDILTNIKSYDIDHIFIPNDISLTTISKKVFKDWEAINKSIIKRLKEDNPQKGREKDENYEERMSKAFKSYDSFSLGLINSCTATDDVCIYFSKIAKTDEETGLSHNLLDNIEEAYDKAKEYLNNGYPSNLNLAQDKSTVQKIKTLLDSIKDLQKFIKPLLGSGTEAVKDERFYGDISLVWEIIDQITPLYNKVRNRMTRKAYSTEKIKLNFENSTLLAGWDLNKERDNTSIILKKDGLYYLAIMRKEFNKVFQNAPRQTSDEDSFEKMEYKLLPGANKMLPKVFFSKSRIDEFAPSDVLIEKYKKGTHKKGSNFNIDDCHNLIDFFKSSIQKHDDWSKFNFKFSPTNSYEDMSGFYREVEKMGYKITFKKIPADYIEELVTTGKIFLFKIYNKDFSQYSKGTPNLHTLYWKMVFDDNNLKDVVFKLNGEAEIFYRKKSLSYKSPTHPAHQPIRNKNPYNAKEESNFAYDLIKDKRYTLDKFHFHIPITINFKSEGVSNINSLVCKYLRENDDIHFIGIDRGERHLLYVSVIDSRGRIKEQFSLNQIINEYKGNSYSTDYHKLLEERDEKRAKERQSWDSIESIKELKQGYLSQVIHKIASLVVKYNAVVVLEDLNIGFKRGRQKVESSIYQQFEKALIDKFNYLVDKNVAPEQPGGLMKGYQLTNKFSSFRDMGKQNGFLFYIPAWNTSKIDPVTGFVDMLHPKYESVEKAREFFTKFNKISYNQEKGWFEFLFDYNDFTTKAEGTRTVWTLCTFGKRIETFRNKNKNSMWDNKEIDLTSAFISLCEKYNVPLSCDMKNDIVAQTEKDFYVELIRILRLTLQMRNSITGTDVDYLISPVADENGNFYDSRNADSTLPENADANGAYNIARKGLWAAMQIRSCTDPDLKVNLAISNKEWLTFAQTKPYTK

SEQ ID NO: 107 - protein, 1249 aa, unidentified
  REGION 1..1249: note = Description of Unknown: uncultivated organism sequence
  REGION 1..1249: note = Category: MG13 effectors
  REGION 1..1249: note = Description: MG13-73 effector
MKQFTNLYPVSKTLRFELQPIGKTKENIEKNGILMRDEKRAKDYKIVKEFIDDYHKQFIKERLWDFKLPLNSEGKLNSLEEYQALYELSKRDEVQEAEFTEVKDNLRSIIAKRLTESGSAYERIFKKELIREDLVDFLENEEDKDIVRQFADFTTYFSGFHENRHNMYVAEEKSTAIAYRLIHQNLPKFMDNMKAFAKIAETSVAEHFADIYEGWKEHLNVESIEEVFRLDYFSETLTQPHIEVYNYIIGKKILEDGTEIKGINEYVNLYNQQQKDKSKRLPFLVPLYKQILSDREKLSWLAEEFDSDEKMLSAINESYSHLHDLLMSNENESLRSLLLHLKEFNLSHINIANDLSLTDISQHLFSRYDVFTNGIKDELRIITPRKKKESDEDFEERITKIFKTIKSFSIDFLDNLPQPVMEDGKRRSIENYFMTLGAVNTETTQKENLFAQIENAYEDARNILQLKDTGDTLSQNKPAVAKIKALLDALKDLQHFIKPLLGSGEENEKDELFYGSFMMMWDELDTITPLYNKVRNWLTRKPFNTEKIKLNFDNAQLLGGWDVNKEPDCTGVLLRKDGFYYLGIMNKKSNRIFESEVTPSDGECYDKIDYKLLPGANKMLPKVFFSKSRIDEFAPSEAVVSSYKRGTHKKGANFNLSECHRLIDFFKQSINKHEDWSKFGFHFSPTDTYEDISGFYREVEQQGYMLSSHPVSSSYINQLVDEGKLYLFRIWNKDFSEFSKGTPNLHTLYWKMLFDERNLADVVYKLNGQAEVFYRKASIKPENRIIHKANQPIANKNELNEKRTSTFEYDIIKDRRYTVDKFQFHVPITINFKAAGQTNINPIVQDVIRQGGFSHIIGIDRGERHLLYLSLIDLKGNIIKQMTLNEIINEYKGQTYKTNYHTLLAKREGDRTNARRSWETIETIKELKEGYLSQVVHIISKMMVEYNAIVVLEDLNTGFMRGRQKIERQVYEKFEKMLIEKLNCYIDKHADPSEDAGLLHPLQLTSDIQKWKRSHQCGCLFYIPAWNTSKIDPVTGFVNLLDTRYDTREKARVFFSKFQRISFNTQKGWFEFAFDYNDFTTKAEGTRTQWTLCTQGERIRTFRNPQKNNQWDDERIVLTDAYKQLFDKYNIDINGNIKEAISAQTDAQFFKELLGLMKLLLQMRNSITNSEEDYLLSPVADNTGHFFDSREEIYSLPIDADANGAYNIARKGLWVIRKIQETPNGEKTSLSITNKEWLQFAQTKPYLND

SEQ ID NO: 108 - protein, 1249 aa, unidentified
  REGION 1..1249: note = Description of Unknown: uncultivated organism sequence
  REGION 1..1249: note = Category: MG13 effectors
  REGION 1..1249: note = Description: MG13-74 effector
MKQFTNLYPVSKTLRFELQPIGKTKENIEKNGILLRDEKRAEDYKIVKGFIDDYHKQFIKERLWSFKLPLNSEGHLNSLEEYQALYEVSKRNEVQEAEFSEVKDNLRSIIAKRLTESGSAYERIFKKELIREDLIDFLESKEDKDIVRQFADFTTYFSGFHENRKNMYVAEEKSTAIAYRLIHQNLPKFMDNMKTFAKIAETSVAEHFSDIYEGWKEYLNVGSIEEIFRLDYFSETLTQPHIEVYNYIIGKKILEDGTEIKGINEYVNLYNQQQKDKSKRLPFLIPLYKQILSDREKLSWLVEEFDSDEIMLAAINESYNHLHDLLMGRENESLRSLLLHIKDFDLSQISITNDLSLTDISQHLFSRYDVFTNGIKDELRIITPRKKKESDEDFEDRISKIFKTQKSFSIDFLDKLPQPVMEDGKTRSIEDYFMTLGAVNTETTQKENLFAQIENAYEDARFVLQLKDTGDTLSQNKSAVAKIKALLDALKDLQHFIKPLLGSGEENEKDDLFYGSFQMMWDELDTITPLYNKVRNWLTRKPFSTEKIKLNFDNSQLLGGWDVNKEPDCTGVLLRKDGLFYLGIMDKKSNHIFETDVIPTDGECFDKIDYKLLPGANKMLPKVFFSKSRIDEFAPSESIITSYKRGTHKKGVGFNLAECHRLIDFFKQSINKHEDWSKFGFHFSDTKTYEDISGFYREVEQQGYMLSSRPVSSSYIDTLVSEGKLYLFRIWNKDFSEFSKGTPNLHTLYWKMLFDERNLSDVVYKLNGQAEVFYRKASIKPENRIVHKANQPVANKNELNTKIASTFEYDIIKDKRYTVDKFQFHVPITINFKAAGQTNINTIVQDAIRQEEFSHIIGIDRGERHLLYLSLIDLKGNIVKQMTLNEIINEYKGQTYKTNYHDLLAKREGDRTNARRSWETIETIKELKEGYLSQVVHIISKMMVEYNAIVVLEDLNTGFMRGRQKIERQVYEKFEKMLIEKLNCYIDKQVSPTAKGGLLNPLQLTCDAQKWKRSHQCGCLFYIPAWNTSKIDPVTGFVNLLDTHYDTREKARVFFSKFQRISYNAQKGWFEFAFDYNDFTSKAEGTRTQWTLCTQGERIRTFRNPQKNHQWDDERIALTDAYKQLFDKYDIDINGNIKEAISAQTDAQFFKELMGLMKLLLQMRNSITNSEEDYLLSPVADDAGHFFDSREGISNLPIDADANGAYNIARKGLWIIRKIQETPSGERISLSITNKEWLQFAQTKPYFND

SEQ ID NO: 109 - protein, 1249 aa, unidentified
  REGION 1..1249: note = Description of Unknown: uncultivated organism sequence
  REGION 1..1249: note = Category: MG13 effectors
  REGION 1..1249: note = Description: MG13-75 effector
MKNFESFTNLYPLSKTLRFELRPIGRTLENIQANGLLEQDNHRAESYKLVKAIIDRYHKVFIDEALSHCVLPVENSGNKNSLSEVYQYLTTKDHSEKETDDFNKTQDNLRKMIVSALKKDTHFGRIFKKELIREDLLNNDLQGFDLNEEEYDLIKEFRDFTTYFVGFNENRANMYSEEAKSTAIGYRLIHENLPKFIDNMVIFQKVKVSPVSEYFANIETEMEDMLQGIKVEDIFDLNFFNQVLVQRFIDLYNAVIGGQVASEEDHRKGLNQYINEYNQVQKDKKDRLPKFKPLFKQILSDRIHASWQIDNFESDNEVLKAIENAYETLDEEVISRKDSNLPLLFASISDFDLSGIYVSAKAITDFSQQIFKDWNAIDSALEAACRRSNQPKKKETEEKYAERIKKQRSHIDSYSVGEIIESLVAFQPNPEKSILDYLGGMGRREDKPSIIESIKSAYRDVEELLKTEYPANKNLALDKDNISKVKALLDAIKELQFFIKPLLGTGKESGKDERFYGEFVDYWQTLDIITPLYNKVRNYATRKPYSTAKFKLNFENSTLLNGWDVNKEPDNTSVLLRKDGLYYLAIMKKSCNRVFAVDQYDTVGDCYEKIDYKLLPGANKMLPKVFFAKSRIDEFAPSREVLDIYKRGSFKKGEEFCKADLHTLIDFYKASITKHEDWKKFGFEFSPTSSYDDISGFYREVEQQGYQIRFRKVSCTYIDSLVDQGQIYLFQIYNKDFSPFSKGTPNMHTLYWKMIFDERNLKDVVYKLNGQAEIFFRKSSLPVETPTHPANQPIANKNPLNRKKESLFTYDIVKNRRYRYDKFQFHVPITMNFKSIGSEYINDQVQDYIRQSKDLHFIGIDRGERHLLYLTVIDSKGIIEEQFSLNVINNEYNGTTYSTNYHDLLEERGDDRTKARREWLAIESIKELKEGYLSQVVKKITDLMIKYNAIVVLEDLNMGFKRGRQKVESSAYQQFEHKLIDKLNYLAGKTAPIDKVGGLLKAYQLATPYQNEMGFQNGFVFYIPAWNTSKIDPVTGFTNLFDLHIETMEQAKKFFSKFDYIRWNAANNWFEFAFDYKNFTEKADGSRTQWTLCTQGTRIRTFRNPEKNSEWDNVEVDLTDQFLSLFKSKNIDIKSDLKTQILAQNEKDFFMSLLLCLKLTLQMRNSISNSEVDYLISPVADANGDFFDSRKVDSSLPANADANGAYNIARKGLWMARRIKKSRPEDKVSLKITNKEWLTFAQNKPYLTD

SEQ ID NO: 110 - protein, 1249 aa, unidentified
  REGION 1..1249: note = Description of Unknown: uncultivated organism sequence
  REGION 1..1249: note = Category: MG13 effectors
  REGION 1..1249: note = Description: MG13-76 effector
MKEFTNYYPVSKTLRFELQPIGKTKENIEKSGILARDEQRAKDYMIVKGFIDEYHKQFIKERLWNFELPLKSEGHLDSLEEYKTFYDLPKRSEAEEVSFTEIKNNLRSIITKRLTESGVAYDRIFKKELIREDLVDFLKDEEDKKIVRQFADFTTYFSGFHENRRNMYSSEEKSTAIAYRLIHQNLPKFMDNMKAFAKIAESTVSEHFADIYGGWKEYLNVERLEDVFQLDYFSETLTQPHIEVYNYIIGKKILEDGTEIKGINEYVNLYNQQQKDKGERLPLLVPLYKQILSDRDKLSWMAEEFDSDEKMLAAINDSYSHLRDLLMGEENESLRSLLFQIKDFDLDKINITNDISLTGISQHLFGRYDVLTNGIKEQLRVITPRKKKESDEDFEDRISKIFKTLKSFSIAFLNKLPQPVMEDGIPRKVEEYFMSLGAVNTETTQKENLFVQIENAYVDAGSILNTRDTGNKLSQNKQAVAKIKTLLDALKDLQRFIKPLLGSGEENEKDELFYGSFQMMWDELDTVTPLYNKVRNWLTRKPFSTEKIKLNFDNAQLLGGWDVNKEPDCTGVLLQKDGFYYLGIMNKKANRIFDTDVTPSDGDCYDKIDYKLLPGANKMLPKVFFSKTRIEEFAPSEAIVNSYKRGTHKKGADFSLSDCHRLIDFFKASIYKHEDWSKFNFHFSDTQTYEDISGFYREVEQQGYRLTSHPVSTSYINNLVEEGKLYLFRIWNKDFSEYSKGTPNLHTLYWKMLFNERNLADVIYKLNGQAEVFFRKASIKPENRIIHPAHCPIANKNELNEKRTSTFEYDIIKDRRYTVDKFQFHVPITINFKAIGQTNINPIVQDSIRRSGFSHIIGIDRGERHLLYLSLIDLKGNIVKQMTLNDIVNEHNGVTYKTDYHNLLVKREGDRTDARRSWDTIETIKELKEGYISQVIHIISKMMVEYNAIIVLEDLNIGFMRGRQKIERQVYEKFEKMLIEKLNCYIDKHAEPKEAGGLLQPLQLTSEAKNWKRSHQCGCLFYIPAWNTSKIDPVTGFVNLFDTRYDTREKAKLFFSKFQRISFNSKKDWFEFTFDYSDFTTKAEGTRTEWTLCTYGERIRTFRNPQKNHQWDDEHIILTVEFKQLFEKYNIDIRGNLKEAISTQSDAQFFRELLGLMKLLLQMRNSITNSEEDYLLSPVADGNGHFFDSRENIGTLPNNADANGAYNIARKGLLLIRKLQESKEGEKLSLAISNKEWLLFAQTKPYLSD

SEQ ID NO: 111 - protein, 1275 aa, unidentified
  REGION 1..1275: note = Description of Unknown: uncultivated organism sequence
  REGION 1..1275: note = Category: MG13 effectors
  REGION 1..1275: note = Description: MG13-77 effector
MKEFTNLYPVSKTLRFELQPIGKTKEHIEKNGILQRDEKRAEDYKIVKGFIDEYHKQFIKERLWSFKLPLHSEGRLDSLEEYQALYELSKRNDAQEAEFTEIKDNLRSIIAKRLTESGSAYERIFKKELIREDLIDFLESEEDKDIVRQFADFTTYFSGFHENRRNMYVAEEKSTAIAYRLIHQNLPKFMDNMKAFAKIAETSVAEHFKDIYEGWKEYLNVGSIEEIFRLDYFSETLTQIHIEVYNYIIGKKILEDGTEIKGINEYVNLYNQQQKDKSKRLPFLVPLYKQILSDRDKLSWLAEEFDSDEKMLAAINESYNHLHDLLMGNENESLRSLLLHIKDFNLSQINITNDFSLTDISQHLFGRYDVFTSGIKDELRIITPRKKKESDEDFEDRISKIFKTQKSFSIDFLDKLPQPVMEDGKPRRIEDYFTSLGAVNTKTTQKENLFAQIENAYEDARAILQMKDTGDTLSQNKSAVAKIKALLDALKDLQHFIKPLLGSGEENEKDELFYGSFQMMWDELDTVTPLYNKVRNWLTRKPFSTEKIKLNFESPTLLKNMAVPQTSSAAIFRDRQGYYYLGILDSNSRNCLNELLSLSADHSGFDFMQYHQGGDMGKNVQNLMVINGEVCKKNGRKERSGQFVGQNLILEKLKNEYLPKDVNEIRLKQSYLTSSSTFSKKDLVRFVEYYIPLVKAYYSEYSFVFKTPSEYKSFADFTDHINQQAYQLSFTPISKDSIDNLVEEGRLYLFRIWNKDFSKFSKGTPNLHTLYWQMLFDERNLQNVVYMLNGQGAEVFYRKASIKPENRIVHKANQPIANKNELNTKRASTFEYDIIKDKRYTVDKFQFHVPITINFKAAGQTNINPIVQDAIRQGGFSHIIGIDRGERHLLYLSLIDLKGKIIKQMTLNEIINEYKGQTYKTNYHDLLAKREGDRTDARRSWETIETIKELKEGYLSQVVYIISKMMVEYNAIVVLEDLNTGFMRGRQKIERQVYEKFEKMLIEKLNCYIDKQLSPTDEGGLLHPLQLTCDAQKWKRAHQCGCLFYIPAWNTSKIDPVTGFVNLINTSRYDTREKARGFFSKFQRISFNEKKDLFEFTLDYNDFDYIAKAEGTRTQWTLCTQGERIRTFRNPQKNHQWDDERIVLTDAFKQLFDKYDIDINGNLKEAISAQTDAQFFKELLGLTKLMLQMRNSITNSEEDYLLSPVADITGHFFDSREGISSLPIDGDANGAYNIARKGLLVIRKIQETPDGEKPSLTITNKEWLLFAQTKPYLND

SEQ ID NO: 112 - protein, 1252 aa, unidentified
  REGION 1..1252: note = Description of Unknown: uncultivated organism sequence
  REGION 1..1252: note = Category: MG13 effectors
  REGION 1..1252: note = Description: MG13-78 effector
MKQFTNLYQVSKTLRFELQPVGKTKENIEKGGLLEQDETLARNYLIVKGFIDEYHKQYIKDRLWNFELPLKSEGNHDSLEEYKTLYEVSQRNADQEEEFQEVKDNLRAIIAKRLTEKGSQFDRIDKKELIREDLLHFLTNEEDREIVSQFADFTSYFTGFHENRRNMYSSEEKSTAIAYRLIHQNLPKFMENMKAFAKIAQTPVAEHFIDIYTGWEEFLNVRSIEDMFRLEYFSQTLTQPHIEVYNYIIGKKIQEDGSEIKGINEYVNLYNQQQKDKTQRLPLLVPLYKQILSDREKLSWLADEFDSDAKMLTAISEIYAHLYDVLRGEETENLHSLITHLKDYNLSRIYVSNDLSLSDISQHIFGRYDVFSTGIKENLKTAYPQKNKENAEAYEERIGKLFKARKSFSLDELNNLPQPDMGDSKLRRLEDYFRTLGAVNSESVQKENLLAQIEIAYDEVLPVLQQSKNDNNLSQNKDAVAKIKKLLDALKDLQHFIKPLLGSGEENEKDELFYGLFQTIWDELDAVTPLYNKVRNWLTRKPYSTEKIKLNFENAQLLNGWDVNKEPDCTGVLLCKNGFYYLGIMNKKANHIFAYDSLTTNSDDSFEKIEYKLLPGANKMLPKVFFSKSRIDEFAPTPKIIENYKKGTHKKGSSFSLDDCHQLIEFFKDSISKHEDWSKFNFHFSDTDSYNDISEFYHEVEQQGYKLSTRPISATWINQMVEEGKLYLFRIWNKDFSEYSKGTPNLHTLYWKMLFDEKNLADVVYKLNGQAEIFFRKASINPKNRIVHPANQAIKNKNTLNEKQTSTFGYDIIKDRRYTVDKFQFHVPITINFKAAGQSNINPIVHETIRKNGFTHVIGIDRGERHLLYLSLIDLHGNIVKQMTLNEIINEYKGKKYVTNYHDLLAKREGERTDARRSWSTIETIKELKEGYLSQVVHIIARMMVEYNAIIVLEDLNMGFMRGRQKIERQVYEKFEKMLIEKLNCYIDKQADPEVEGGLLHPLQLTNEFKSFRKLGKQSGCLFYIPAWNTSKIDPVTGFVNLFDTRYETIGKSRSFFSSFKRIWFNSDKDWFEFSFDYNDFTAKAEGTRSQWTLCSYGTRIRNFRNPQKNNQWDNEEVVLTEQFKKLFAYYHIDVNSNLKEAIIGQTEAKFFQSLMGLMKLLLQMRNSKINSDVDYLLSPVADEDGRFFDSRSASESLPENADANGAFNIARKGLWVIRKIKNATASDEKLSLAVSNKEWLQFAQTKPYRND

SEQ ID NO: 113 - protein, 1252 aa, unidentified
  REGION 1..1252: note = Description of Unknown: uncultivated organism sequence
  REGION 1..1252: note = Category: MG13 effectors
  REGION 1..1252: note = Description: MG13-79 effector
MKQFTNLYQVSKTLRFELQPVGKTKENIEKGGLLEQDETLARNYLIVKGFIDEYHKQYIKDRLWNFELPLKSEGNHDSLEEYKTLYEVSQRNADQEEEFQEVKDNLRAIIAKRLTEKGSQFDRIDKKELIREDLLHFLTNEEDREIVSQFADFTSYFTGFHENRRNMYSSEEKSTAIAYRLIHQNLPKFMENMKAFAKIAQTPVAEHFIDIYTGWEEFLNVRSIEDMFRLEYFSQTLTQPHIEVYNYIIGKKIQEDGSEIKGINEYVNLYNQQQKDKTQRLPLLVPLYKQILSDREKLSWLADEFDSDAKMLTAISEIYAHLYDVLRGEETENLHSLITHLKDYNLSRIYVSNDLSLSDISQHIFGRYDVFSTGIKENLKTAYPQKNKENAEAYEERIGKLFKARKSFSLDELNNLPQPDMGDSKLRRLEDYFRTLGAVNSESVQKENLLAQIEIAYDEVLPVLQQSKNDNNLSQNKDAVAKIKKLLDALKDLQHFIKPLLGSGEESEKDELFYGLFQTIWDELDAVTPLYNKVRNWLTRKPYSTEKIKLNFENAQLLNGWDVNKEPDCTGVLLCKNGFYYLGIMNKKANHIFAYDSLTTNSDDSFEKIEYKLLPGANKMLPKVFFSKSRIDEFAPTPKIIENYKKGTHKKGSSFSLDDCHQLIEFFKDSISKHEDWSKFNFHFSDTDSYNDISEFYHEVEQQGYKLSTRPISATWINQMVEEGKLYLFRIWNKDFSEYSKGTPNLHTLYWKMLFDEKNLADVVYKLNGQAEIFFRKASINPKNRIVHPANQAIKNKNTLNEKQTSTFGYDIIKDRRYTVDKFQFHVPITINFKAAGQSNINPIVHETIRKNGFTHVIGIDRGERHLLYLSLIDLHGNIVKQMTLNEIINEYKGKKYVTNYHDLLAKREGERTDARRSWSTIETIKELKEGYLSQVVHIIARMMVEYNAIIVLEDLNMGFMRGRQKIERQVYENFEKMLIEKLNCYIDKQADPEVEGGLLHPLQLTNEFKSFRKLGKQSGCLFYIPAWNTSKIDPVTGFVNLFDTRYETIGKSRSFFSSFKRIWFNSDKDWFEFSFDYNDFTAKAEGTRSQWTLCSYGTRIRNFRNPQKNNQWDNEEVVLTEQFKKLFAYYHIDVNSNLKEAIIGQTEAKFFQSLMGLMKLLLQMRNSKINSDVDYLLSPVADEDGRFFDSRSASESLPENADANGAFNIARKGLWVIRKIKNATASDEKLSLAVSNKEWLQFAQTKPYRND

SEQ ID NO: 114 - protein, 1252 aa, unidentified
  REGION 1..1252: note = Description of Unknown: uncultivated organism sequence
  REGION 1..1252: note = Category: MG13 effectors
  REGION 1..1252: note = Description: MG13-80 effector
MKQFTNLYQVSKTLRFELQPVGKTKENIEKGGLLEQDETLARNYLIVKGFIDEYHKQYIKDRLWNFELPLKSEGNHDSLEEYKTLYEVSQRNADQEEEFQEVKDNLRAIIAKRLTEKGSQFDRIDKKELIREDLLHFLTNEEDREIVSQFADFTSYFTGFHENRRNMYSSEEKSTAIAYRLIHQNLPKFMENMKAFAKIAQTPVAEHFIDIYTGWEEFLNVRSIEDMFRLEYFSQTLTQPHIEVYNYIIGKKIQEDGSEIKGINEYVNLYNQQQKDKTQRLPLLVPLYKQILSDREKLSWLADEFDSDAKMLTAISEIYAHLYDVLRGEETENLHSLITHLKDYNLSRIYVSNDLSLSDISQHIFGRYDVFSTGIKENLKTAYPQKNKENAEAYEERIGKLFKARKSFSLDELNNLPQPDMGDSKLRRLEDYFRTLGAVNSESVQKENLLAQIEIAYDEVLPVLQQSKNDNNLSQNKDAVAKIKKLLDALKDLQHFIKPLLGSGEENEKDELFYGLFQTIWDELDAVTPLYNKVRNWLTRKPYSTEKIKLNFENAQLLNGWDVNKEPDCTGVLLCKNGFYYLGIMNKKANHIFAYDSLTTNSDDSFEKIEYKLLPGANKMLPKVFFSKSRIDEFAPTPKIIENYKKGTHKKGSSFSLDDCHQLIEFFKDSISKHEDWSKFNFHFSDTDSYNDISEFYHEVEQQGYKLSTRPISATWINQMVEEGKLYLFRIWNKDFSEYSKGTPNLHTLYWKMLFDEKNLADVVYKLNGQAEIFFRKASINPKNRIVHPANQAIKNKNTLNEKQTSTFGYDIIKDRRYTVDKFQFHVPITINFKAAGQSNINPIVHETIRKNGFTHVIGIDRGERHLLYLSLIDLHGNIVKQMTLNEIINEYKGKKYVTNYHDLLAKREGERTDARRSWSTIETIKELKEGYLSQVVHIIARMMVEYNAIIVLEDLNMGFMRGRQKIERQVYENFEKMLIEKLNCYIDKQADPEVEGGLLHPLQLTNEFKSFRKLGKQSGCLFYIPAWNTSKIDPVTGFVNLFDTRYETIGKSRSFFSSFKRIWFNSDKDWFEFSFDYNDFTAKAEGTRSQWTLCSYGTRIRNFRNPQKNNQWDNEEVVLTEQFKKLFAYYHIDVNSNLKEAIIGQTEAKFFQSLMGLMKLLLQMRNSKINSDVDYLLSPVADEDGRFFDSRSASESLPENADANGAFNIARKGLWVIRKIKNATASDEKLSLAVSNKEWLQFAQTKPYRND

SEQ ID NO: 115 - protein, 1202 aa, unidentified
  REGION 1..1202: note = Description of Unknown: uncultivated organism sequence
  REGION 1..1202: note = Category: MG13 effectors
  REGION 1..1202: note = Description: MG13-81 effector
MRQKYDGFESCYGISKVIRTGLIPQGATLEHIEKKGLLLLEAKRAEDYTKVKKIIDRYHRKYIDNQLKDAELSGVEESYSLYCKTNRTEKENTDLKKDLEKLRKQVSNFLTLSAEFKRIDKKELIEKDLLNFVQGDEEEEELVKSFKGFTTYFKGFHKNRKNMYSHEEKSTAIAYRVINQNMFRYFDNIRSISKFILANSENNIAELESIYSDKLNGKTLEEFFSVDNYSFFISQSGIDTYNMIIGGYSVDEKTKVKGINEYINLFNQENHEKFGTLKPLYKQILAERTTESFLPEKFENDKEVIESLAVFNHNISDTLSELMQIFSKMGEYDASGIYLKYDSLKDISTCVFSDWSAITNALWEQYDVQYTGKKKKETKAYFEEKRKYFKNLKSISASEINTAMGENVLIPYSDAAKSLFEKICVAEENIRELINLDYPDDKELSKDKAAVKDIKAYLDSVKALQHHMKPLLGNQDESGKNEFFYGNFSGLWDELDALTPLYNKVRNYVTKKPYSTEKIKLNFDNSTLLNGWDLNKEEANTAILMQREGFLYLGIMDKKHNKLFRNIANTDCEDCYQKMEYRQLPGAYKMLPKVFFSKKGIDTFKPPLKILEIYRSETFKKGTNFNIDDCHKIIDFYKKAINEHESWKRFKFKFSETKDYRDISEFYQEVDVQGYNISFKAIPKKIIDEYVEKGWLYLFKIWNKDFSEYSKGTPNLHTLYLKMLFDPRNLENAVYKLNGEAEIFYRKASIQPKDIIKHPANEAIKNKNPLNQKQSSTFKYDLIKDRRYTADKFEFHVPITLNFKARGKENINTEVREYIKRSKNLYVIGIDRGERNLLYVSVVDADGSIVEQYSLNDIVNEYKGVQYRTDYHALLDTKEKNRDKARKEWTEIQNIKELKEGYISQVVHKICELMMKYEAIIALEDLNGGFKNSRKKVEKQVYQKFEKMLIEKLNYLVDKKADINEPTGLLHALQLTSKFEGFNKLFGQSGFVFYVPAWNTSNIDPCTGFTNLFFSKDLRYSGVENSLEFWKRFDSVAYDDRKDMFAFAFDYNNFNQRAEGSKSKWTVYSYGDRLETFRNPDLNQQYDSREVKLTEAFKELFKKYGISYKSCEIKENILNCKERGFHEKLLHLFKLTLQLRNSKTGTMIDYMTSSVISVDGNFFDSRTASSKLPQDADANGAYNIARKGLWLIEKLQRCTKGT

SEQ ID NO: 116 - protein, 1278 aa, unidentified
  REGION 1..1278: note = Description of Unknown: uncultivated organism sequence
  REGION 1..1278: note = Category: MG13 effectors
  REGION 1..1278: note = Description: MG13-82 effector
MKKFTNKFQLSKTLRFELIPQGKTLENIKSKGLIAKDDQRAISYKKMKKSIDEYHKYFIGLALSNVKLSKLQDFADLYFETNADKKKEDAYKKSLEKIQTDLRKEIVKGFKEGDAKEIFGKLNKKELFTELLEEWKQEKGDFYFDEEFKTFTTYFTGFNKNRANMYSDEAKSTAIAFRLIHENLPKFLDNIKVFEKAKSIPQLQENCKLLYKEIEEYLNISKIDEVFELGYFNEALTQNDIDVYNLIIGGRTAKEGVQKIQGLNEYINLYNQKQDKKNRIPKLKVLYKQILSDRENISFLPEKFNDSNEVLEAIENFYKSNLLEFQTGDMEHSENVLASLKTLVGEIANFDTSKIYLRNDKSITDISQTIFGDWGIIKSALEFSFIQGLIIGKKGISIKQEVEKDKYLSKQSYYSIAEIENALMLYKDQNELLKELKPTDLPVANYFKNHFKIKVKKDDNSEKEFDLITNIEDKYRCIKGILANDYPEDKDLKSTNNPDTLNIKLFLDSLMEFLHFIKPLALPKDTVLEKDEHFYNPFVIGYEQMQLLIPLYNKVRNYATQKPYSEEKFKLNFENSTLLSGWDVNKEETNTSILFIKEGIYYLGVMDKDHNKIFRDIPKARSNSVYQKINYKLLPGASKMLPKVFFSDKNISFFNPSDEIQNIRNHGTHTKGGSPQEGYSKLDFNVNDCRKMIDFFKTSIEKHPEWKNFGFQFSDTSTFDSIDAFYREVEAQGYTISYSNLDKDYIDQLVSEGKLYLFKIYNKDFSSYSKGQPNMHTMYWKALFDKDNLKDVVYKLNGQAELFYRKKSINYDEKTMKQGHHYNELKDKFSYPIIKDKRFTEDKFHFHVPITLNFKASGNDYINADVLTYLKNNPDVNIIGLDRGERHLIYLSLINQKGEVLKDKNGNPIQYSLNEIINEHKGKTYPTNYQTLLDSKEKERDSARKNWGEIENIKELKEGFISQVVHKIAQLMIDFNAIVVMEDLNFGFKRGRFKVEKQVYQKLEKMLIDKLNYLVFKDKEPTEIGGIYNALQLTNKFKSFKEMGKQSGFLFYVPAWNTSKIDPTTGFVNLFNTKYETIEKAQEFFSKFNDIRFNEMENYFEFVVDDYTKFNLKAEGTRLDWTVYTNEDRILTFRNPETNNNWDNKKVVLTDEFVKFFTENQIEYKTNLQTQILEKTEGKFFKDLFHLYKLTLQKRNSITNSEVDYLISPVKNNDSYFYDSRKADNTLPQDADANGAYHIAKKGLWVLEQINQYEKDDNWKKLQLAISNKKWLNFVQKK

SEQ ID NO: 117 - protein, 1251 aa, unidentified
  REGION 1..1251: note = Description of Unknown: uncultivated organism sequence
  REGION 1..1251: note = Category: MG13 effectors
  REGION 1..1251: note = Description: MG13-83 effector
MKQFTNLFQVSKTLRFELQPVGKTKEHIEQGGILTRDEQRAENYKKVKGFIDEYHKQFIKDRLWTFQLPLSDEGRHDSLEEYQALYELSKRDEAQEAAFTEVKDNLRHIIAKRLTEKDSAYDRIFKKELIREDIVEFLDNEEDKDIVRQFADFTTYFTGFHENRKNMYSPDEKSTAIAYRLIHQNLPKFMDNMKSFAKIAQTAVAEHFIDIYEGWKEYLNVESLEAIFRLDYFSETLTQPHIEVYNYIIGKKILEDGTEIKGINEYVNLYNQQQKDKSQRLPLLVPLYKQILSDREKLSWLAEEFDSDEKMLAAINETYNHLHDLLMGEENESLRTLLAHLKDFDLTQINITNDQSLTDISQGMFGQYDVFTRGIKDELRQITPRKKKESDEDFEARISKIFKTQKSFSIDVLDRLPQPVMEDGKQRFIADYFMTLGAVNTDTIQKENLFAQIENAYEDVRPILQMSDTGGDTLSQNKSAVAKIKTLLDVFKDLQHFIKPLLGSGEENEKDELFYGGFQMIWDELDTVTPLYNKVRNWLTRKPYSTEKIKLNFDNAQLLGGWDVNKEPDCTGVLLRKDGFYYLGIMNKKANRIFDADITPSDGICYEKIDYKLLPGANKMLPKVFFSKSRIGEFAPSDAIVSSYKRGTHKKGADFSLSDCHRLIDFFKASINKHEDWSKFGFHFSDTQTYEDISGFYREVEQQGYRLTSHYVSQSYVDQMVDEGKLFLFRIWNKDFSEFSKGTPNLHTLYWRMLFDERNLADVVYKLNGQAEVFYRKASIKQENRIVHPAHQAIANKNELNPKDKSTFGYDIIKDRRYTIDKFQFHVPITINFKATGRDNINPIVHETIRQGGFTHIIGIDRGERHLLYLSLIDLQGNIIKQMTLNEIINEYNGLTHKTNYHDLLVKREGERTAARRSWDTIENIKELKEGYLSQVIHIISKMMVDYNAIVVLEDLNMGFMRGRQKIERQVYEKFEKMLIDKLNCYIDKQANPESVGGMLHPIQLANKFESFRKLGKQSGCLFYIPAWNTSKIDPVTGFVNLFDTRYETREKARLFFSRFQRIGYNAGNDWFEFSFDYDDFTTKAEGTRTQWTLCSYGTRIRNFRNPLLNHQWDDEEIVLTEEFKKLFCKYDVDFQGNLKEAINAQTDAQFFKDLMGLMKLLLQMRNSRSNSEVDYLLSPVADERGQFFDSRKGIASLPDNADANGAYNIARKGLWAIRKVQETPDGEKLSLAITNKEWLQFAQTKPYLND

SEQ ID NO: 118 - protein, 1063 aa, unidentified
  REGION 1..1063: note = Description of Unknown: uncultivated organism sequence
  REGION 1..1063: note = Category: MG13 effectors
  REGION 1..1063: note = Description: MG13-84 effector
MRDFNEFVGLYPISKTLRFELKPIGKTLEHIQRNELLEDDAVRADDYVKVKKIIDKYHKCLIDEALSGFTFDTEADGRSNNSLSEYYLYYNLKKRNEQEQKTFKTIQNNLRKQIVNKLTQSEKYKRIDKKELITTDLPDFLTNESEKKLVEKFKNFTTYFTEFHKNRKNMYSKEEKSTAIAFRLINENLPKFVDNIAAFEKVASSPLAEKINALYEDFKEYLNVEEISRVFRLDYYDELLTQKQIDLYNAIVGGRTEEDNRTQIKGLNQYINEYNQQQTDRSNRLPKLKPLYKQILSDRESVSWLPPKFESDKDLLIKIKECYDALSEREKVFDKLESILKSLSTYDLSKIYISNDSQLSYISQKMFGRWDIIGKAIREDCAKRNPQKSRESLEKFAERIDKKLKAIDSISIGDVDECLAQLGEPYVKRVEDYFAAMGASDMVEGQTDATSFKKNIEGAYKSVKELLNNADNITDNNLMQDKGNVEKIKTLLDAIKDLQRFIKPLLGKGDEADKDGVFYGEFTSLWTKLDQVTPLYNMVRNYLTSKPYSTKKIKLNFENSTLMDGWDLNKEPDNTTVIFCKDGLYYLGIMGKKYNRVFVDREDLPHDGECYDKMEYKLLPGANKMLPKVFFSETGIQRFRPSEELLGKYERGTHKKGAGFDLGDCRALIDFFKKSIERHDDWKKFDFKFSDTSTYQDISEFYREVEQQGYKMSFRKVSVDYIKSLVEEGKLYLFQIYNKDFSAHSKGTPNMHTLYWKMLFDEENLKDVVYKLNGEAEVFFRKSSITVRTPTHPANSPIKNKNKDNQKKESKFKYDLIKDRRYTVDKFLFHVPITMNFKSVGGSNINQLVKQHIRSATDLHIIGIDRGERHLLYLTVIDSRGNIKEQFSLNEIVNEYNGNTYRTDYHELLDTREGELTEARRNWQTIQNIRELKEGYLSQVIHKISELAIKYNAVIVLEDLNFGFMRSRQKVEKQVYQKIEKMLINKLNYLVDKKKPVAETGGLLRAYQLTGEFESFKTLGKQSGILFYVPAWNTSKIDPVTGIIVKTKSTSFQNEKYKKIPFS

SEQ ID NO: 119 - protein, 1205 aa, unidentified
  REGION 1..1205: note = Description of Unknown: uncultivated organism sequence
  REGION 1..1205: note = Category: MG19 active effectors
  REGION 1..1205: note = Description: MG19-2 active effector
MKGYKIHIKRINQSNGEIIRTIKYLLTPINQNNSQEIFFSNFIFDDLKVRGISSITDFIKHNSNYDLFDFWIDTLKAGVIFQPTKKSLEYFIKVIKNEKNDAELIFDKSSEIIKKYFKKEDFIQIIILSNAKRTRSKKSAFLNELFKMIKDEFKDNKNKIIVDKQLNDTVNFIINSFYNEDGDLKLEGEEKQIQFWKTNFAIDKTLLNKNKFKENSVGDITNFILPEIIKINESISIEELINIRINLAEKYLSLINRKTDKFNIVESFLGLGNDFNSLSNYLNNFYNYLLSKKIDEIIKSYKKIINLNEPEIAMIKEALKYLSDKAQLLEKPRFINKSWQEYRKVFGGKIQSWYSNYVNRLSKSSENYKKIIGNIDQIISIINKYKTTENENYLNKIIEKTLQLKDIMTKNTDILQVPYKFDIFSDLLADLKIDLNYFYQTYIKKNDDDQINKDPIFKFLFDEIEKPINFYGHSKKQILNKIVNQTAIRINEGFKIIRFLLEEYKNLRRSDFKKSFPELLENYFDKLAKKTVYSKFFYSKYKDILKNYILSTENINDIFNNPEKYTFFKNNFERQKSILIKTINIENNDYLILDLHEKFYNFLINIDQNLLINNPDTSIEYLETAKTFISFCIENNNKKEFQLESNLYNNFEGIKNYIKLFKQDKLNNKDYSKILNQYFFSELKGDLTLSSKKNYIAKYTLQIMNSDKVFPLIIKFKNNQISKNQLLTNSKEIINYPHQYFIVFDLGLKFKKINSEVEKTDTFLINKNGITPIKNLGFTNNLLYKISSSRYQIQFLDRLIYKPRNWQQIAIKIREPSFILEVNNNIKFDIINNKISLSEKSKKFYASIPFEIKSINNTSINANKNNKLYLGIDAGEYGVAYSLVDFENEKNPRIINSFYIKSKNIRRIKDHYQKIQEKSKKGVFLSSSNLLNKIRENSINEIRNNIHDIFLKYSPKMIVYEYSISNFETGSGRVTKIYDSIKKSDVHPDNEADKSIIKHIWGRDYNYIRIGTNASAYASSYTCTHCGRSIFSIIENINNNQIFITQRLTENGLKNIVEISTPYGKLYGYTSEKKYINGYLFKNTQESKKELKKILQNFARPPLDKSEVLLTFKKLDKNILRKIKIKRGNSSIFVCPFSDCLHVFDADLQASFIMAVRGYIKDINQNNKNLNIFEETLKYLKKIEDLNYKMLEIPDLASLPQSKNQ

SEQ ID NO: 120 - protein, 1240 aa, unidentified
  REGION 1..1240: note = Description of Unknown: uncultivated organism sequence
  REGION 1..1240: note = Category: MG19 active effectors
  REGION 1..1240: note = Description: MG19-3 active effector
MKIKGYRLHKERIKFTSGTTIRSIKLPIKEFSLNEDKKELILKIKKQVKNDDLLLKGDVNLNDYAQKGFRGNPSYNFFDFWVDSLRAGVIWKKTTNELIDFVNGKLSKKDIIGEILIKASDKFLKYFDIANQDLKNFFKLSEVRANKNKQSLSRSLVSYLKQDYKKKKDKYDYEIINSDAQNLINFIVNSFFDNQSLLKLKGPQKQNQFWLKNFGIDKTKLKQFRPQGELGNISFVIVPQLISIDKDINIVDLIEKRIHFLERLNLNNDNEIKSILGLENNFSALSNYLGIIFKKLYQGEIEEIFQALVFIYKDLEDYKNVAFKSLNFLKEKAKLLSPEPSLEFISNWADYRSLLGGKIESWLSNYLRRKKEINQQINDFFNGLDLTKKFLIENKNYKKELKDNDLDSILKIIKEINQFGNKDLNNKKNYEIFDSFLSILKSDLNLFYQKYLIDEKNEIKVDEFSPFEAIYKKIYKPVSFYGEIKRENNDKNLRLVLPIIKTGLEFSKLMINELTENFSFNDDDDAEIFFRKLLNFYHQKILTKSINSNDFKNFFIDILVHYISEEDKKNIFKKNRVFYKSDYSKGTQSLFKLINTEFSQEFKKLIFKIKDFLASFENDYILINKDLLLDWIETFKNLSSILIKFSINNDFDSKIFEPLLKNYLKIKIYYDVFNPPDFDKNLFTKLWQQFFLSEFKGAAILYSKKTYLARYVSQFIGSENKIKIFFYSSNQDLLEKINDFENIDNDVSKNLVNKRKYLISFDENLKLSTKRKLETDVCLIKLSKNLNQFKKVYIKKESFDNLFEITSSYYQLQFLDRLFYKPKDWRNVDIKLSEWNLILEQDYEINWKLEANKAEFIKKENSKKNKLYINIPFEISSKNLVIKFKQLDNNRFAYPICGIDVGEYGLAYCLIKVGGNQTNIIDKGFFEDKNIANIKDKFAKIQERSRKGIFNETDSTIVQVRENAIGALRNQIHDLVVKYNASPVYEYSISNFETGSGRTTKIYNSVKRSDVFEEGSEVSVFLKTQIWGIKKTIGRNVSSYASSYTCINCKRSLYELNFQKKHLENGEVIIVVQKRQGNIIYFQINNNLIICGYSDKNKFVNNYQLKTRQDLDDFNKALKDFTRPPVKSNSEVLVKFANDLTMKKLKKEDKELSFIDVFRKRRGNSSIFVCPFDDCHFVADADIQAAFIMAIRGYIKFLKGANNNNQNNDKNRQKIDYFKETLIFLKKLQLQEDIFYPSID

SEQ ID NO: 121 - protein, 1256 aa, unidentified
  REGION 1..1256: note = Description of Unknown: uncultivated organism sequence
  REGION 1..1256: note = Category: MG19 active effectors
  REGION 1..1256: note = Description: MG19-4 active effector
MTKRKSSLAGYRLHRERILFSGGQVIRTIKFPLTPLNPSKETALFLKDFEKAIIADDLKIRGDLNINDYFVYTAKWKPPYTLFDFWVDSLRAGVIWMPKVTKLIDFLTSQYNITSPFDMVWEKASHRIAVIFQKDKFKDIFLSAPIRNTSTRNSFYERILKSLKDDLVRKNDIISTDAKKEVDLIVNSFFNDDGKLILKGKDQLDFWKREYNLDRSTIESLKPKGAYTDITFVNIPELMHNLDAKQSFEELINKREIWISDKKLLSSILGLSDNFNGFSNYLGVVLKGLQKKDGDIEALYEAQKTIFPRLGNYEDEILNALDFLSQKAKLLGETSLPLVNGWHDYRSVFGGKLQSWFTNSQNRKKELNGQISQFREGLSQVKNYLQKGNFGEEADKEKKDILSFLSLLENFFTDEQKSIKVEVNYQLFESLLALIRRRLNFFYQKYIQKEGNETKVNKYKEFEGLYKTIYKPVAFYGYTAKRANEKFVNKTIPILEDGVENTIKLISYLRDSFSVQKTFESVKQEKEKVDDLYRKFLQFFWNKYVDASINSRLFLEKYEKIIKENIEDSKWKEISDKNRKGRYVFYKSPYAKGSLEKIQIKTNDYLQQLQASVLELAEFILSFKKDTLLSDAILLLDWIELSKNTISLLIRFNTKETYKLDGLLLDIFSQAKRYKELFRRENYPRNEFSFIIQSLILSEIRGAATLYSKKEYIASYSVQVIGADDRYKLYYIPKKEISINADTIKSKPSSIERKQLMKSHNFAIALDKVYEKNKNKTFNAILLSKSGITAVYLPSESLQKLFRLSSSPYQLQFLDKYIYLPDGWENIDISLSEWSFIVEKRYKIDWDLQTKKPTLLPITGSEQAKKNKIYLAIPFNLIPNKQAVQSAPLKVIAKGKETIEKDFSRLNFPILGIDVGEYGIAYCLVRFIFDKNTYKITGVELGSYKEEILGFIEDKNIGNIKDKFAEIQQKARQGAFDEEDNVVARIRENAIGHLRNKIHVIVTQEKSSSVYEDSITNFETGSGRTTKIYNSVKRADTESNTEADKQIHNHVWGEKTKWIGRNIGAYASSYTCLSCLKSLYQIKKEDLAKMIINQKEGRVVTISSRHGNIKGYVSKEEKYDMGYQFKGTDEDLKKIRKIVQDFARPPVTNHSEVLEKYAKKILETGRIEEWRKSRGNSSIFVCPFCQYVADADKQAAFMMAVRGYLRFSGIVPSQSSKKKQGQEEEKTTGESFLEQTQKQLKDIDRSGIKNAFSVRI

SEQ ID NO: 122 - protein, 1222 aa, unidentified
  REGION 1..1222: note = Description of Unknown: uncultivated organism sequence
  REGION 1..1222: note = Category: MG19 active effectors
  REGION 1..1222: note = Description: MG19-5 active effector
MKKVRGYRLHLKRILFSGGEIVRTIKFPIVARNLSKNDNDYLEIFKKNLIEDDIKIRGDLNLNDYLLYTSSNKHIYTLLNFWIDSLKSGIIWADKAASLIDFINDLYQFEDSPVDIIWNNASEDIKKFFDKDKFKEIIISDPLRATTKKESFKKRLISYLNNIYLEKNHEIKSKEAELLIEKIINNFFDEKGNLILDGKGQNDFWLRNFNLDKSIIDNAKPKGELADITFIIIPELIEDLNCYYTVEYLVKKRIDFLSEKINTSKKLEFILGLSNNFNGYSNFFGKGLRLFQERKINIIFDSMAKVNPFLNRSEYKDKVINSLKFLSDKSKNIPNEPSVPNIGNWANYRSFFGGKIQSWYTNGQKRKTELRQQLYNLEYSLNKAFDFIEKNFSSKEKDEEKEYFFESIKQSIERLKQIIVKFINFLDKGKSQEDIYSLFYDVFSSFKLDLNLYFHKYLKSEENETIDKNQYFSGIFKKIYKPVNFFGESKKEYNKKIIEKTIVTIEHGIDIVFNLLKKLKDSFVPKEKIGEKENSEIIFRDFLDFYWNKLKNKMINSSYFIDLITKIINESLINCNLEKINQKRNWNRYTFKINEYQKGTLVVFELKKINYLDVFEDKVFEIIDFLISFEKNRLLSDKNILIDWIEVSKNIISKLIKFNRSETFDLDQFNFNLENFPKAANYISIFQLKKLNKKDFLFFIQSLIFSEFKGAAVVFSKEKYLAKYTIQVIDTDEKFKLLYKPKDNKIDKNVDRKGLLKLHEYFICLDEVKNINKKNHQFNFIILEKNNFKPTFIDDNYLSKIYKIESSKYQIQFLDKFLSMPDKYKNIGVKLSEWGFILEQEYKIIWDLEKKRPKFQLIENSRRNKLYLSIPFIFYFKGEKSKVLLHSVLNNSTKYPVLGIDVGEYGLAYALVDFSQKNIIKILKIGFIEDRNIANIKDKFTQIQLKSRRGIFNEADNIVSQVKENAIGNLRNQVHFVLTDGMGASLIYEHSISNFETGSGRVTKIYNSVKRADTKFESKADEQIHNHVWGKNTKYIGKELSAYASSYTCVSCYNSIYQFKKEDLNDINIVKREGNIIFFSSSSYKKTFCGYSKEKKYQPGFKFENKEKNFNTFLKICKDFARPPIGKDKSEVLEKYFIFNQERRNKIEDFRKKRGNSAIFVCPFCQFVADADIQAAFIMAIRGFLKFSEKENLKEKKELIFEKTIKFLKATGFRPQEQFSPF

SEQ ID NO: 123 - protein, 1264 aa, unidentified
  REGION 1..1264: note = Description of Unknown: uncultivated organism sequence
  REGION 1..1264: note = Category: MG19 effectors
  REGION 1..1264: note = Description: MG19-6 effector
MAKRKNRLAGYRLHKERVLFSGGKVIRTIKYPLVPLGPSEETAQFLKDFERAIIADDLKIRGDLNINDYLACTVEGKSLYTLFDFWVDSLQAGIIWMPKGTKLIDFLASQYNTASPFDGVWKKASPRITAIFKKDKFKGIFLSDPIRNTSTKNSFYKRILESLKDDLVKENIIISTDAKEEVELIVNSFFNNDGQLILDGESQFDFWEKEYNLDKGIIESAKPKGKYTDITFVIIPELISNLNTKQTLEDLINKRATWLSNRELDEDNKLLASILGFSDNANGFSNYLGVVLRGLQEEDGDKEALYEAQKTIFPRLENYRDKVLESLDFLSQKAKLLGETSLPLVNCWHDYRSVFGGKLQSWFTNFQKRKEELDGQISQFKESLFKAKSYLQKENFGEEADKEKEDILSFLSLLGNFFTDEQKSIKIEENYQLFEPLIALIRRRLNFFYQKYIQKEGDETKVNKFKEFEGLYKTIYKPVAFYGYSAKRANEKFVNKTVPILEDGIENIKKIIFYLQDSFSVQKTFEDVKQEREEIDDPYRKFLQFFWNKYLDASINSYLFLGKYEEIIKENVEDNKWKEISDKNKKGRYVFYKSPYTKGTLEKIPIKANSYLDKLQVSVLELVEFILSFKKDTLLSDSALLLDWVELSKNIISLLLKFNTKETYKLDGLLLENFSQAKKYQELFKREDYPKNEFSFIIQSLVLSEIRGAATLYSKREYIASYSVQVVNSDEKFKLYYIPKEEIPITPDTIKSKPDSIERKQLMKPHCFVVALDKVSEEKKNQNFNAILLSKSNTTAVFLPDESLQKLCKLSSSPYQLQFLDKYLFRPAGWENIDISLGEWNFVVEKGYKINWDLQTKKPKLLPITDSEQAKKNKIYLAIPFNLSPNNQIKQSAPLKSIAKGNEKKEKDLSRLNYPILGVDVGEYGLAYCLVKFDFDKNTYKITGIKLGSDEKETFGFIEDKNIGNIKDKFSEIQQKARQGAFDEEDTIVARVRENAIGHLRNRIHIVVTQEKSSSVYEDSITNFETGSGRTTKIYNSVKRSDTESGTKADEQIHNHILGEKTKLVGRNVSAYASSYICVNCLKSLYQIKKEDLTKMTITQKDGRSRVVTISSPYGDIKGYVSKEEKYDVGYQFRGNDEDLKKLRKIVQDFARPPVSNRSEVLEKYAKPILETGRIEEWRKRRGNSSIFVCPFCQYVADADIQAAFMMAVRGYLRFSGIVPSLSNKNKQDQEKEKTAGESFLEQTQKQLKNIDINKIKSAFSIRI

SEQ ID NO: 124 - protein, 1194 aa, unidentified
  REGION 1..1194: note = Description of Unknown: uncultivated organism sequence
  REGION 1..1194: note = Category: MG19 effectors
  REGION 1..1194: note = Description: MG19-7 effector
MKSYKIHIKRLKTTKGETTRSIKFLLKPVNQTDAYEKIIENFVNDDHKVRGIANLIDIKSENQYSLLDFWVDTLKCGIVFQSKGKKIRYFIQSIRGKKTMEEIIFDQADEKIKNYFKKVDFIKNIIISDAKRSSSTKKSFFNTLFDILNNEFKNEKEKIIINSDANKLVNFITNSFYDEEGKLILDSEEKQNQFWKNNFNIDKNLLNGKTNNELGELTSFILPELIRLNGDIKLEELINLRFDLVKKYLKINSIEPNEKIINEQTASLLGLSDNFNAFSNYFNNFFNVLLEGNIEVIINYYKTIIDLSNQEEEKIKESLIYLAEKSRLLGKPKFISYSWQEYRSVFGGKLESWFSNYLNRLTKSQENYNKIKGEISKIIAYFDRLQILDKKFSEDNDFQKSKLKIKNQLVNLKNLLEQNPDLLNIPGKYSIFSDYLAEIKTDLNFFYQKYLKISEDDMINNDKNFKFLYEKFEKPINFYGQSKKESLLKIIEKSKLKVIDGFKIIRILLDESKSLKDNDFKKTLSEILNVFFEKLSKKILSNQSIFFNDYKKIIDYYISEENNKKEIYNQPQKYAFYISKFSNNNSLKIIKIKNFDNQDSQITNLIRSLYSFLKNINHNLLLKDVQSAIEYLEITKSFLSFVIENNKKNEFIVDKNLFSNFEGVLNFINLHKSNCLINQEFNRLLNQYFFADLKGTLNILSKKYDLAKYTLQILKSDERFPILINFKDIKVSLKQLLTESKKIINYSHRYLIVIGDKINDYFEFKKLNQEDQTDYFIITKQGIRPILITNLNKNHVFQIHSSRHQLQFLDRLIYKPYYWQNISISISEPSFILEIKHQIDLEKFVFKKESQNLYLSLPFQINSEEPQKKLNEKIYLGIDAGEYGVAYCLTDFTEDIPKIIESSYIKNKNVRKIRDKFEIIKQRARGGVFIQSENVVRKVRENAINEIRNQIHKVFLKYKVPIIYEYSISNFETGSGRITKIYNSIKKSDVDSKANKPIIKHIWGSNSINIGLNLSAYASSYTCSVCGRSIFEVVNDFDTSQATVVSRLKTDGLKNVIEIKTTHGNLYGYTQNKKFIENYRFQNTKQEKEEFLKIIKNFARPPLEKSEVLLTLKKLDPLKLKEIKKQRGNCAVFICPFVDCGKIFDADLQAAFNMSVRGYVKNNLKNNQEVNIFEETIRYLKNHKPINYKMLEIV

SEQ ID NO: 125 - protein, 1069 aa, unidentified
  REGION 1..1069: note = Description of Unknown: uncultivated organism sequence
  REGION 1..1069: note = Category: MG20 active effectors
  REGION 1..1069: note = Description: MG20-1 active effector
MANISLKKALQQFPQTTLSKVTNPKTGKVQTRNVLKTMQCGLAISLTPKQRKVELEELSPDKKKLLDEYIDTFENKKQLILEDFYHYYEKSIWDFLIYCSRIKDTTETTYIVIPELPEITTKIKKSDGTYLKVKAYKGISNTTGNIHKTLYWFADDIDTKDGCTKVQFQYTEQRKEYITTDNYEKYNFDPALFELQPDTQQISNRISFFYMTNAQKKDKNGIYHETPKYQEYKKKGISIKGIVDDIEIDIKEPLRTKTAAVLKAFVDKLQESIKEIESVISEKNERIALLNKEDPKNNFPEFFVTNLKEDDKKLLSELTQLQIEDRDVKKFSELYNTLAKSFNQILNNAIQTYISIKLKESKIKQSDKEQEGKRLWDTYHLNHLKGIPSFPQMKNESQGKITAEMIYHFIQEQLQQYKNFSAFDHLLLDKNDFIFTDQKRKLSEDTVEQEQEWKEQWKTIKEKENNSFILTLRKILWRKNNIPGKKLMHYAHYLVQQGKITTNSAIVKALIEYALQELLKKQEHLSCEQFSSDQKAKREFCDYARIIISFIAYQLKKEEKRKEARNLELQIDDMSGNYKGTAFDLLKKGESNILPLSGFDFDNHGTKKGACLVFRNTTDHGNIRTHWYFALNLYNKIHFEEFDQQYDHPLEYPVDQYFVLASKGNDKTVSHHIYQLSPKEFDPGSKTMLIPLLLGTRQLREYITNFEISPFKNLLYFNSAEIQRIRNHKEEQYFLNLVTTRPEVEAYELTQEKKKGLIGIDRGENTVAWAALVNTQGNPLFEGKDERNFIELAPKFGKKFREEYKEISKRQSHGSVKKLNIQGRVKKVIEGVGAKIISNALEYGLQIVLENLDRGFGRHGKNTFVGVRQFTHLQKFIESKLKQNNISFKKDSILQTVPAAYTSKMCSNCGVINSLTGKEDFIAAVIEQFKDHPQQKDPKISCNKLCINLDQEITSWDRNKKREVVENSFEKIKAIFSNTKIQKHEAYVEIILKKLLNPRKEKADLFKCNFCGHTCHADKQAALNIARFSLLPYRSESEKKKGITAISKLEEEYQQRLNDGIFQRGSLIL

SEQ ID NO: 126 - protein, 845 aa, unidentified
  REGION 1..845: note = Description of Unknown: uncultivated organism sequence
  REGION 1..845: note = Category: MG26 effectors
  REGION 1..845: note = Description: MG26-2 effector
ENKKDITLQKKYWDFIIDEETWRYKKQNKNYMTMWTLWNKNFIRPYFEELLTNNLNSNKKLENLNRQENLLARKSDISFEIQKINSKDFLWNLYILLEWWYLDHKNDVNVIKELKKQLSKIKELINDLLLLLKPSQSFWIVVDNISLNYYTRKKTPKDYDEEIRKKEVWLKNKYNWKLWKLYWINENQWIKELYEEMKTFKANQKSVFLQLLQDKSSYIDFTKLFLEKEDKNKKYFTFKDNKEIEHKNFELKLFDDISKENYDKMLNLTNQIEKESDKQKRTKLKEKRGRHFMSKSSCAKYINFCNEYKKVAMEYGKRKALVLSLQREQIESQKERWWGIISTDWKNHFLNTISIKNTEIAKNIFQKEIYRKQDEIKYYTFSSITLRALEKLCFKKESKFISNIINSLNTEFKVFVDFWKEKKDILNFDFINESEKNKIDFLNNILENQNTLWIIYRDLEKSKDILKKSKTIDEFEINLKKETYVLDTYFMSKIDFEENIKKIDWKVYEITSWDLIEKRNNSEFQTKTWFEFWSKENKENKFPIRINPEINIWYIEKNETWQKEEKNKNQTNNRRNRNRFLMMSTVSYKADKKYINNAFIKDEERIDNIQKFNEIFNENNKYDYFYWLDKWVLELVTLWIYKKVKDKIEPIKLDKINIYKITERWFNFEKNITNKNWDIKTHYLKNNPSIFIEEYINDNAIFEKLNITSCIWDLSCAKVIKWNIILNADINTYNKLQEINIKRLLYKAITEWKCISDNINYDKEKNIFSYTFENRWKNEERIISCYWKNINIEIFEKDLNNYMQFVRNKNSDTDVSITKINNLKNAICANIVWVIIELQKNILDL

SEQ ID NO: 127 - protein, 1086 aa, unidentified
  REGION 1..1086: note = Description of Unknown: uncultivated organism sequence
  REGION 1..1086: note = Category: MG26 effectors
  REGION 1..1086: note = Description: MG26-3 effector
HSIPDYELELSELLDSYKGLIENLINFFYSEKEVVESKKSKFSNLKWFKEAFANFDFDEAEEKVFDLKNKEFSKMPRFKHMFFKENFKEDWYAIKDRLIKKNKTKNYEILDSLPFFQKVLKDFFEKSEQLYKELDEIISSPDNASKRKSDLRFVLQKISWNEVFKKIIKLFSLWFVDHKNDVEIVWKISEELWEFSEKIQNAIELLRVNDSFWFPVEYLSLNYYTINKTPKEYDKEITEKQNNLEKLYEWGLSELYWIDKNQTIEQLRNDMKMFKARQKSAFLQQLQNWVPFEEFQKLDFTDNKWELHKDYEILLFNDIGNDKYGEMLEITEKIAKEQDKDKRKGLKEKRWKYFIHHCKKYNKFCDEFKKVAIQYMKLKAEKLSLEREREQARFERWLAILSKDLDWNYYINSFSNNDSKNAFEKLKNINSTSGDYSYFIMKSITLRALQKLCWKENFKKTVVNKISEKFTKVNENDTGRQVRKFKSFEEIGNNIVEFYVDILDKQRTLDVSYRSWYEEWLKKLKWAKDLDELEILLKQETYTLEEHKISKNDFEEILEDYNWNSYKITSEDLEKNIETNNFTKWWNIFWTTENKEHKYISRLNPELVISLRAWEKVFKDRKKHRKSDKSFLLTMSYSHYTDKSYIDDAFIKDEERKSSLEQFNKHYNENHKFDYIYWLDKWTNELVTLWIFKKVWDKLEKVNISEKIPVYRITEKWLKYSKKYSTIVEWLNWEREIFLYKNPSLFIDEIDNEELFEKVDIDSCIWNLNCAKLIKWNIILNWDINWFLSLSKIAAKRKLYLAITEWKIRWDTVVFGYENGNKYIWYKYENRWKIDENPVFFLESFTDIVSEREFEIEFNEYIKLVKNHNSKEDVSISWINKKRVAISWNIVWIMMKLQEFFPWYIAWEAITIKTNEEDSKKNHSFLWNMVNDKIYQKLMLSLDVPPILKKYRSEIKDKEYLQHGKIFYVNKESTSSACPNCNNTLTITNNWWQFEDKTEEYVSKLFWHISQYENEMHHINDKSDQNYEKKWESWILEDGSICDYNMKHNPKWFDFIRSWDDLATYNIAKKAKEYLEFLEKQKNNNS

SEQ ID NO: 128 - protein, 996 aa, unidentified
  REGION 1..996: note = Description of Unknown: uncultivated organism sequence
  REGION 1..996: note = Category: MG26 effectors
  REGION 1..996: note = Description: MG26-4 effector
LRFVLQKISWNEVFKKIIKLFSLWFVDHKNDVEIVWKISEELWEFSEKIQNAIELLRVNDSFWFPVEYLSLNYYTINKTPKEYDKEITEKQNNLEKLYEWGLSELYWIDKNQTIEQLRNDMKMFKARQKSAFLEFLQMKNEFSELEELKTYLNDIEKKYKQKKWSKYNFYEELQNNTFELDSSDVDTDIDKVFKAFSLILFLETEKDDYEKLLNLTKKIEKSSTLSERTSYKIERWEFFKGKNENWIFSEDRDTSYDWFCSEFKKVAISYWRLKAEKLSLEREREQARFERWLAILSKDLDWNYYINSFSNNDSKKAFEKLKNINSTSGDYSYFIMKSITLRALQKLCWKENFKKTVVNKISEKFTKVNENDTGRQVRKFKSFEEIGDNIVEFYVDILDKQRTLDVSYRSWYEEWLKKLKWAKDLDELEILLKQETYTLEEHKISKDDFEGILEDYKWNSYKITSEDLEKNIETNNFTKWWNIFWTIENKEHKYISRLNPELVISLRAWEKVFKDRKKHRKSDKSFLLTMSYSHYTDKSYIDDAFIKDEERKSSLEQFNKHYNENHKFDYIYWLDKWTNELVTLWIFKKVWDKLEKVNISEKIPVYRITEKWLKYSKKYSTRVDWLGWEREIFLYKNPSLFIDEIDNEELFEKVNIDSCIWNLNCAKLIKWNIILNWDINWFLSLNKIAAKRHLYDAITKGFMLKDKITFDEVKNNFYYEHTLAWKKFNKVVFYLDSFESITTKDEIEKELNNYIKLVIEHKSEEDVSIDWINKKRVAISWNIVWIILKLQEKFPWYIVWEALNLDQNNKNISSNHAFLWNLINDKIYQKLMISLDVPPILKKYRSELTKDTLTQHGKVFYINENLTSKACPSCNDTLTIEVNWTLKEKDPNKHKVKVYQLFWHLTEYENEMHHLTDEEYDNLYDNDKNFKKFHSNDKWNKKQNSYLAWENCDYNMKHNPKWFDFIRSWDDLATYNIAKKAKEYLEFLEKQKNNNS

SEQ ID NO: 129 - protein, 1187 aa, unidentified
  REGION 1..1187: note = Description of Unknown: uncultivated organism sequence
  REGION 1..1187: note = Category: MG26 effectors
  REGION 1..1187: note = Description: MG26-5 effector
MEKFKNLYEVRKTIRFNLLPVKHNYKKITDGQFKSDLKSFLKKYKQVVDNLSELVFIQNEDDDQILNENTRVSIAWLKEYEKQEFHKNKEKLVKRNKRGNKTGNYVSLRDTDFLLEKFQLWILRNWQEKNEEGKKIGILNNLEILSGQPLESQERNADFAYHIHQIYRRTNFEFIYEFFKNAQGAKSDALIIEIIPVLEDCKNLLKNLENYLRPKQSFGHVIEQSSLNYYTVNKKPKDYPREIKKWEEKKDEKYLSLSFYDSNVGKKKNFFFPDDFQSHLENLIESLNEEKNDEKKIKKEFGDISEINNWKLEQTYKNFKLYKAKQKSQFYEYVYQILEKYDADSEYVFFESHLQDIPTPLFANITDDKFKNLVEESKIIRDKSTKYNNSKDKKLKEAIISLKKKRGDTYFNVQNKPCPFSRYETFCGLFKEIAMTYGKIKAEVRSLEKEQIEAERLQSWAILLEKENQHYVMTIPRDRKILINNKNEYQLPSVYKKIKQLKDTTYSEYWTLFLFESLTLRALEKLCFGMDKNTFITDTNLINELKKKFKNFFITNKRGRQNLKRKDQFLEDGKELIKFYQAVLSLEETKKMILVEEYLPNEITKENICDGEFESLRDFQIALEKTCYIRQEIKISDHKKEELENKYGANVYQITSYDLFEKRKSEKEHTKIWKKFWKQDKNSGYTTRLNPQFSISYVEKREDSIKDKSGNEVERNRRKQAEYILSTTISENNDKPKFDMAFADKDRIKQNIEDFNKEFNKKAKSDPYSLYYYGIDRGQEELLTLGLFKFENQDITFTHPSDSSKSGTYKKPLPVDLEVWELPKGKLLEVVPYETKNGTKFTEAYKSISYAEKAGILEKKIISSCIDLTSAKLVNGKIVLNGDVSTLINLKLENAKRKILEIVNSLALVKKNKKGIMPAKIIFREKNKSNPERFVVNINVDGETIEKNIYFPSSNFFDFEKGQVEDGLNKILNESLQKIKEQGYCSINIPITKINHLRDAICANAVGILNFLQQKYFGIISFEDLPIDGGGSKNEHFSQNNANLGSRIEFMLLNKFKTLGLVPPNYKMVMSMQSKKEIEQLGIITYIKTEGTSSNCPHCSQGIDKKTQREHKWKHHKFKCCNNGKSCGFNTYSQEEIDKNKSSDKWNFTADKKGLDFLNSSDDVATYNIAKRGLQFIKSSNSKDKTS

SEQ ID NO: 130 - protein, 882 aa, unidentified
  REGION 1..882: note = Description of Unknown: uncultivated organism sequence
  REGION 1..882: note = Category: MG26 effectors
  REGION 1..882: note = Description: MG26-6 effector
MLENFKDLYEVRKNASFRLEPQENAVTNENLYNQDVDLSEILNKYKNFVYDLKNLLYIEGEKVTEEESDEEPSFTSKPFSRIFANLDLWVLQSNTENKEKDNDLSVDKLDSSNVVHINHKYLSKYFSKEFFENYDRIVKRNKHWAKTKNWTTIGNNDFLEVFFRSFFNDAFENINKLQELIDTKENEQKRKADIAFEVRRLLSRNHLWKIFPLFKGGYLTHKNDIKTIPELTDQAKELKELLDNAKIYFLEDSNFWVQVEHISLNYYTRNKTQKEYDELIKGKKKLLDSPYNKDISKLYWIDRNLPIKQLYEEMKMFKARQKSAFFQQLQNKTPFEKFKEPFTFIDNEWIKHKEFRTELFFDVEEKYYNEMLSLTKKIEKSGSKELKKERWNFLMFQDKWIKSFKWWSWFCSEYKKVAMEYWKRKAESLSLEREKILAEQERWWWVFSKVNNEFYINTFPIDKVKDAYQSLSKKQNDWELSYFILSSITLRALNKLCFSKDSKFINKEILIKLDNEFLKEKEYNNKTKEIVLRKKSDLTELELIKLYYNVLELQDSLWISYINKDSLSKLKSSKNLEEFELNLKNETYKLEEIKTTEDEFNKILKSNEWKSYKIINKEKWNFEKWWKNFWNSSKDWEIRINPELNISLRKWNEDYNDKISFHRKKDDVYLLNVNFSHFANRSYIDSSFIEDDHRKENLKKFNNLYNENIILNYFYWLDKWTNELITLGLFKKEWGKINSVNISKEIPVYRITKKWLLHSKITLKKAPKEWQNPETIHTLYKNPSLFIDELDNEEIFEKVNIESCLWNLNSAKLIKWNIILNWDILTNLNLHKLSAKRQLYIAITEWKTIIENIWFDEKEQENWAFFYEYINKGKTEKNMFFI

SEQ ID NO: 131 - protein, 1151 aa, unidentified
  REGION 1..1151: note = Description of Unknown: uncultivated organism sequence
  REGION 1..1151: note = Category: MG26 effectors
  REGION 1..1151: note = Description: MG26-7 effector
MLENFKDLYEVRKNASFRLEPQENAVTNENLYNQDVDLSEILNKYKNFVYDLKNLLYIEGEKVTEEESDEEPSFTSKPFSRIFANLDLWVLQSNTENKEKDNDLSVDKLDSSNVVHINHKYLSKYFSKEFFENYDRIVKRNKHWAKTKNWTTIGNNDFLEVFFRSFFNDAFENINKLQELIDTKENEQKRKADIAFEVRRLLSRNHLWKIFPLFKGGYLTHKNDIKTIPELTDQAKELKELLDNAKIYFLEDSNFWVQVEHISLNYYTRNKTQKEYDELIKGKKKLLDSPYNKDISKLYWIDRNLPIKQLYEEMKMFKARQKSAFFQQLQNKTPFEKFKEPFTFIDNEWIKHKEFRTELFFDVEEKYYNEMLSLTKKIEKSGSKELKKERWNFLMFQDKWIKSFKWWSWFCSEYKKVAMEYWKRKAESLSLEREKILAEQERWWWVFSKVNNEFYINTFPIDKVKDAYQSLSKKQNDWELSYFILSSITLRALNKLCFSKDSKFINKEILIKLDNEFLKEKEYNNKTKEIVLRKKSDLTELELIKLYYNVLELQDSLWISYKNKDSLSKLKSSKNLEEFELNLKNETYKLEEFKTTEDEFNKILKSNEWKSYKIINKEKWNFEKWWKNFWNSSKDWEIRINPELNISLRKWNEDYNDKISFHRKKDDVYLLNVNFSHFANRSYIDSSFIEDDHRKENLKKFNNLYNENIILNYFYWLDKWTNELITLGLFKKEWGKINSVNISKEIPVYRITKKWLLHSKITLKKAPKEWQNPETIHTLYKNPSLFIDELDNEEIFEKVNIESCLWNLNSAKLIKWNIILNWDILTNLNLHKLSAKRQLYIAITEWKTIIENIWFDEKEQENWAFFYEYINKGKTEKKHVFYINEEFLTIISLDELKNELNEYIKYIKNEPNEYKKYMWNNALDTDISILAINKIKNALCANIIGIIMKLQEKFPGYVCFESLSNDNNNRDMEKEHSFLWNLINDKLYSKLNINVSVPPILKKFRSELKNSYYQYGQVIYVNEDSTSSACPVCNDKFIKWINKKWNLEEYEKNKLYGHLTESESSMHHLTDDEYNKKYDNNEKFREKHTNDKGKKKDNIYGSWNWCNYHMKDNPKWFDFIKSWDDLATYNIAKKALEYLEYLKSLNSDETK

SEQ ID NO: 132 - protein, 906 aa, unidentified
  REGION 1..906: note = Description of Unknown: uncultivated organism sequence
  REGION 1..906: note = Category: MG26 effectors
  REGION 1..906: note = Description: MG26-8 effector
MLENFKDLYEVRKNASFRLEPQENAVTNENLYNQDVDLSEILNKYKNFVYDLKNLLYIEGEKVTEEESDEEPSFTSKPFSRIFANLDLWVLQSNTENKEKDNDLSVDKLDSSNVVHINHKYLSKYFSKEFFENYDRIVKRNKHWAKTKNWTTIGNNDFLEVFFRSFFNDAFENINKLQELIDTKENEQKRKADIAFEVRRLLSRNHLWKIFPLFKGGYLTHKNDIKTIPELTDQAKELKELLDNAKIYFLEDSNFWVQVEHISLNYYTRNKTQKEYDELIKGKKKLLDSPYNKDISKLYWIDRNLPIKQLYEEMKMFKARQKSAFFQQLQNKTPFEKFKEPFTFIDNEWIKHKEFRTELFFDVEEKYYNEMLSLTKKIEKSGSKELKKERWNFLMFQDKWIKSFKWWSWFCSEYKKVAMEYWKRKAESLSLEREKILAEQERWWWVFSKVNNEFYINTFPIDKVKDAYQSLSKKQNDWELSYFILSSITLRALNKLCFSKDSKFINKEILIKLDNEFLKEKEYNNKTKEIVLRKKSDLTELELIKLYYNVLELQDSLWISYKNKDSLSKLKSSKNLEEFELNLKNETYKLEEFKTTEDEFNKILKSNEWKSYKIISKEKWNFAKWWKNFWNSSKDWEIRINPELNISLRKWNEDYNDKISFHRKKDDVYLLNVNFSHFANRSYIDSSFIEDDHRKENLKKFNNLYNENIILNYFYWLDKWTNELITLGLFKKEWGKINSVNISKEIPVYRITKKWLLHSKITLKKAPKEWQNPETIHTLYKNPSLFIDELDNEEIFEKVNIESCLWNLNSAKLIKWNIILNWDILTNLNLHKLSAKRQLYIAITEWKTIIENIWFDEKEQENWAFFYEYINKGKTEKKHVFYINEEFLTIISLDELKNELNEYKIY

SEQ ID NO: 133 - protein, 1119 aa, unidentified
  REGION 1..1119: note = Description of Unknown: uncultivated organism sequence
  REGION 1..1119: note = Category: MG26 effectors
  REGION 1..1119: note = Description: MG26-9 effector
MLESFKDLYEVRKNASFRLEPQENAATNENLYNQDVDLSEILSKYKNFVYDLKNLLYIEGEKVTEKEKDNDLSVDKLDSSNVVHINHKYLSKYFSKEFFENYDRIIKRNKHWAKTKNWTTIGNNDFLEVFFRSFFNNAFENINKLQELIDTKENEQKRKADIAFEIRRLLSRNHLWKIFPLFKGGYLTHKNDIKTIPELTNQAKELKELLDNAKIYFLEDSNFWVQVEHISLNYYTRNKTQKEYDELIKGKKKLLDSPYNKDISELYWIDRNLPIKQLYEEMKMFKARQKSAFFQQLQSKTPFKKFKEPFTFTDNEWIKHKEFRTELFFDVEEEYYNKMLDLTKKIEKSGSNKFKKERWDFLLFQDKWTKSFKWWSWFCSEYKKVAMEYWKRKAESLSLEREKILAEQERWWWVFSKVNNEFYINTFPIDKVKDAYQSLSKKKNDWELSYFILSSITLRALNKLCFSKDSKFINKEILIKLDNEFLKEKEYNNKTKEIVLRKKSDLTELKLIKLYYNVLELQNSLRISYKNSDSFDKLKSSKNLEEFELNLKNETYKLEEFKTTEDEFNKILKSNEWKSYKIINKEKWNFEKWWKNFWNSSKDWEIRINPELNISLRKWNEDYNDKISFHRKKDDVYLLNVNFSHFANRSYIDSSFIEDDKRKENLKKFNDLYNKNIKLNYFYWLDKWTNELITLGLFKKEWGKIKSVNISKEIPVYRITRKWLLHSKVTFKKAPKEWQNPKTIHTLYKNPSLFIDELDNEEIFEKVNIESCLWNLNSAKLIKWNIILNWDILTNLNLHKLSAKRKLYIAITEWKTIIKNIWFDEKEQENWAFFYEYINKGKTEKEPVFYINEEFLTIVSLDELKNELNEYIKYIKNEPNEYKKYMWNNALDTDISMLAINKIKNALCANIIGIIMKLQEKFPGYVCFESLSNDNNNRDMEKEHSFLWNLINDKLYSKLNINASVPPILKKFRSELKNSYYQYGQVIYVNEDSTSSACPVCNDKFIKWINKKWNLEEYKKNKLYGHLTESESSMHHLTDDEYNKKYDNNDKFREKHTNDKGKKKDNIYRSWNWCNYHMKDNPKWFDFIKSWDDLATYNIAKKALEYLEYLESQNNDETK

SEQ ID NO: 134 - protein, 1151 aa, unidentified
  REGION 1..1151: note = Description of Unknown: uncultivated organism sequence
  REGION 1..1151: note = Category: MG26 effectors
  REGION 1..1151: note = Description: MG26-10 effector
MLESFKDLYEVRKNASFRLEPQENAVTNENLYNQDVDLSEILSKYKNFVYDLKNLLYIEGEKVTEEESDEEPSFTSKPFSRIFANLDLWVLQSNTENKEKDNDLSVDKLDSSNVVHINHKYLSKYFSKEFFENYDRIIKRNKHWAKTKNWTTIGNNNFLEVFFRSFFNDAFENINKLQELIDTKENEQKRKADIAFEIRRLLSRNHLWKIFPLFKGGYLTHKNDIKTIPELTNQAKELKELLDNAKIYFLEDSNFWVQVEHISLNYYTRNKTQKEYDELIKGKKKLLDSPYNKDISELYWIDRNLPIKQLYEEMKMFKARQKSAFFQQLQNKTPFEKFKEPFTFIDNEWIKHKEFRTELFFDVEEKYYNEMLILTKKIEKSGSKELKKERGNFLMFQDKWTKSFKWWSWFCSEYKKVAMEYWKRKAESLSLEREKILTEQERWWWVFSKVNNEFYINTFPIDKVKGAYQSLSEKQNDWELSYFILSSITLRALNKLCFSKDSKFINKEILIKLDNEFLKEKEYNNKTKEIVLRKKSDLTELVLIKLYYNVLELQNSLRISYKNSDSFDKLKSSKNLEEFEINLKNETYKLEEFKTTEDEFNKILKSNEWKSYKIINKEKWNFEKWWKNFWNSSKDWEIRINPELNISLRKWNEDYNDKISFHRKKYDVYLLNVNFSHFANRSYIDSSFIEDDKRKENLKKFNDLYNKNIKLNYFYWLDKWTNELITLGLFKKEWGKIKSVNISKEIPVYRITRKWLLHSKVTFKKAPKEWQNPKTIHTLYKNPSLFIDELDNEEIFEKVNTESCLWNLNSAKLIKWNIILNWDILTNLNLHKLSAKRKLYIAITEWKTIIKNIWFDEKEQENWAFFYEYINKGKTEKEPVFYINEEFLTIVSLDELKNELNEYIKYIKNEPNEYKKYMWNNALDTDISMLAINKIKNALCANIIGIIMKLQEKFPGYVCFESLSNDNNNRDMEKEHSFLWNLINDKLYSKLNINASVPPILKKFRSELKNSYYQYGQVIYVNEDSTSSACPVCNDKFIKWINKKWNLEEYKKNKLYGHLTESESSMHHLTDDEYNKKYDNNDKFREKHTNDKGKKKDNIYRSWNWCNYHMKDNPKWFDFIKSWDDLATYNIAKKALEYLEYLESQNNDETK

SEQ ID NO: 135 - protein, 1112 aa, unidentified
  REGION 1..1112: note = Description of Unknown: uncultivated organism sequence
  REGION 1..1112: note = Category: MG26 effectors
  REGION 1..1112: note = Description: MG26-11 effector
MNKFTKPYEVRKSIKFKLIPEIQKRPHSIPDYELELSELLDSYKGLIENLINFFYSEKEVVESKKSKFSNLKWFKEAFANFDFDEAEEKVFDLKNKEFSKMPRFKHMFFKENFKEDWYAIKDRLIKKNKTKNYEILDSLPFFQKVLKDFFEKLEQLYKELDEIISSPDNASKRKSDLRFVLQKISWNEVFKKIIKLFSLWFVDHKNDVEIVWKISEELWEFSEKIQNAIELLRVNDSFWFPVEYLSLNYYTINKTPKEYDKEITEKQNNLEKLYEWGLSELYWIDKNQTIEQLRNDMKMFKARQKSAFLQQLQNWVPFEEFQKLDFTDNKWELHKDYEILLFNDIGNDKYGEMLEITEKIAKEQDKDKRKGLKEKRWKYFIHHCKKYNKFCDEFKKVAIQYWKLKAEKLSLEREREQARFERWLAILSKDLDWNYYINSFSNNDSKNAFEKLKNINSTSGDYSYFIMKSITLRALQKLCWKENFKKTVVNKISEKFTKVNENDTGRQVRKFKSFEEIGNNIVEFYVDILDKQRTLDVSYRSWYEEWLKKLKWAKDLDELEILLKQETYTLEEHKISKNDFEEILEDYNWNSYKITSEDLEKNIETNNFTKWWNIFWTTENKEHKYISRLNPELVISLRAWEKVFKDRKKHRKSDKSFLLTMSYSHYTDKSYIDDAFIKDEERKSSLEQFNKHYNENHKFDYIYWLDKWTNELVTLWIFKKVWDKLEKVNISEKIPVYRITEKWLKYSKKYSTIVEWLNWEREIFLYKNPSLFIDEIDNEELFEKVDIDSCIWNLNCAKLIKWNIILNWDINWFLSLSKIAAKRKLYLAITEWKIRWDTVVFGYENGNKYIWYKYENRWKIDENPVFFLESFTDIVSEREFEIEFNEYIKLVKNHNSKEDVSISWINKKRVAISWNIVWIMMKLQEFFPWYIAWEAITIKTNEEDSKKNHSFLWNMVNDKIYQKLMLSLDVPPILKKYRSEIKDKEYLQHGKIFYVNKESTSSACPNCNNTLTITNNWWQFEDKTEEYVSKLFWHISQYENEMHHINDKSDQNYEKKWESWILEDGSICDYNMKHNPKWFDFIRSWDDLATYNIAKKAKEYLEFLEKQKNNNS

SEQ ID NO: 136 - protein, 1112 aa, unidentified
  REGION 1..1112: note = Description of Unknown: uncultivated organism sequence
  REGION 1..1112: note = Category: MG26 effectors
  REGION 1..1112: note = Description: MG26-12 effector
MNKFTKPYEVRKSIKFKLIPEIQKRPHSIPDYELELSELLDSYKGLIENLINFFYSEKEVVESKKSKFSNLKWFKEAFANFDFDEAEEKVFDLKNKEFSKMPRFKHMFFKENFKEDWYAIKDRLIKKNKTKNYEILDSLPFFQKVLKDFFEKSEQLYKELDEIISSPDNASKRKSDLRFVLQKISWNEVFKKIIKLFSLWFVDHKNDVEIVWKISEELWEFSEKIQNAIELLRVNDSFWFPVEYLSLNYYTINKTPKEYDKEITEKQNNLEKLYEWGLSELYWIDKNQTIEQLRNDMKMFKARQKSAFLQQLQNWVPFEEFQKLDFTDNKWELHKDYEILLFNDIGNDKYGEMLEITEKIAKEQDKDKRKGLKEKRWKYFIHHCKKYNKFCDEFKKVAIQYWKLKAEKLSLEREREQARFERWLAILSKDLDWNYYINSFSNNDSKNAFEKLKNINSTSGDYSYFIMKSITLRALQKLCWKENFKKTVVNKISEKFTKVNENDTGRQVRKFKSFEEIGNNIVEFYVDILDKQRTLDVSYRSWYEEWLKKLKWAKDLDELEILLKQETYTLEEHKISKNDFEEILEDYNWNSYKITSEDLEKNIETNNFTKWWNIFWTTENKEHKYISRLNPELVISLRAWEKVFKDRKKHRKSDKSFLLTMSYSHYTDKSYIDDAFIKDEERKSSLEQFNKHYNENHKFDYIYWLDKWTNELVTLWIFKKVWDKLEKVNISEKIPVYRITEKWLKYSKKYSTIVEWLNWEREIFLYKNPSLFIDEIDNEELFEKVDIDSCIWNLNCAKLIKWNIILNWDINWFLSLSKIAAKRKLYLAITEWKIRWDTVVFGYENGNKYIWYKYENRWKIDENPVFFLESFTDIVSEREFEIEFNEYIKLVKNHNSKEDVSISWINKKRVAISWNIVWIMMKLQEFFPWYIAWEAITIKTNEEDSKKNHSFLWNMVNDKIYQKLMLSLDVPPILKKYRSEIKDKEYLQHGKIFYVNKESTSSACPNCNNTLTITNNWWQFEDKTEEYVSKLFWHISQYENEMHHINDKSDQNYEKKWESWILEDGSICDYNMKHNPKWFDFIRSWDDLATYNIAKKAKEYLEFLEKQKNNNS

SEQ ID NO: 137 - protein, 1112 aa, unidentified
  REGION 1..1112: note = Description of Unknown: uncultivated organism sequence
  REGION 1..1112: note = Category: MG26 effectors
  REGION 1..1112: note = Description: MG26-13 effector
MNKFTKPYEVRKSIKFKLIPEIQKRPHSIPDYELELSELLDSYKGLIENLINFFYSEKEVVESKKSKFSNLKWFKEAFANFDFDEAEEKVFDLKNKEFSKMPRFKHMFFKENFKEDWYAIKDRLIKKNKTKNYEILDSLPFFQKVLKDFFERSEQLYKELDEIISSPDNASKRKSDLRFVLQKISWNEVFKKIIKLFSLWFVDHKNDVEIVWKISEELWEFSEKIQNAIELLRVNDSFWFPVEYLSLNYYTINKTPKEYDKEITEKQNNLEKLYEWGLSELYWIDKNQTIEQLRNDMKMFKARQKSAFLQQLQNWVPFEEFQKLDFTDNKWELHKDYEILLFNDIGNDKYGEMLEITEKIAKEQDKDKRKGLKEKRWKYFIHHCKKYNKFCDEFKKVAIQYWKLKAEKLSLEREREQARFERWLAILSKDLDWNYYINSFSNNDSKNAFEKLKNINSTSGDYSYFIMKSITLRALQKLCWKENFKKTVVNKISEKFTKVNENDTGRQVRKFKSFEEIGNNIVEFYVDILDKQRTLDVSYRSWYEEWLKKLKWAKDLDELEILLKQETYTLEEHKISKNDFEEILEDYNWNSYKITSEDLEKNIETNNFTKWWNIFWTTENKEHKYISRLNPELVISLRAWEKVFKDRKKHRKSDKSFLLTMSYSHYTDKSYIDDAFIKDEERKSSLEQFNKHYNENHKFDYIYWLDKWTNELVTLWIFKKVWDKLEKVNISEKIPVYRITEKWLKYSKKYSTIVEWLNWEREIFLYKNPSLFIDEIDNEELFEKVDIDSCIWNLNCAKLIKWNIILNWDINWFLSLSKIAAKRKLYLAITEWKIRWDTVVFGYENGNKYIWYKYENRWKIDENPVFFLESFTDIVSEREFEIEFNEYIKLVKNHNSKEDVSISWINKKRVAISWNIVWIMMKLQEFFPWYIAWEAITIKTNEEDSKKNHSFLWNMVNDKIYQKLMLSLDVPPILKKYRSEIKDKEYLQHGKIFYVNKESTSSACPNCNNTLTITNNWWQFEDKTEEYVSKLFWHISQYENEMHHINDKSDQNYEKKWESWILEDGSICDYNMKHNPKWFDFIRSWDDLATYNIAKKAKEYLEFLEKQKNNNS

SEQ ID NO: 138 - protein, 752 aa, unidentified
  REGION 1..752: note = Description of Unknown: uncultivated organism sequence
  REGION 1..752: note = Category: MG26 effectors
  REGION 1..752: note = Description: MG26-14 effector
NIMEKMQNLYEVRKSLRFELKPISDNIKFLESNKSIVLDNFGTLILEHKKFINLLSETLFYKEVENLIEKEEKIQNVFWKFFSENNFEINKEIEENKQEDFSEYEIYKTVYFKYQWVQKIFKSEWIENKKDITLQKKYWDFIIDEETWRYKKQNKNYMTMWTLWNKNFIRPYFEELLTNNLNSNKKLENLNRQENLLARKSDISFEIQKINSKDFLWNLYILLEWWYLDHKNDVNVIKELKKQLSKIKELINDLLLLLKPSQSFWIVVDNISLNYYTRKKTPKDYDEEIRKKEVWLKNKYNWKLWKLYWINENQWIKELYEEMKTFKANQKSAFLQLLQDKSSYIDFTKLFLEKEDKNKKYFTFKDNKEIEHKNFELKLFDDISKENYDKMLNLTNQIEKESDKQKRTKLKEKRGRHFMSKSSCAKYINFCNEYKKVAMEYGKRKALVLSLQREQIESQKERWWGIISTDWKNHFLNTISIKNTEIAKNIFQKEIYRKQDEIKYYTFSSITLRALEKLCFKKESKFISNIINSLNTEFKVFVDFWKEKKDILNFELINESEKNKIDFLNNILENQNTLWIIYRDLEKSKDILKKSKTIDEFEINLKKETYVLDTYFMSKIDFEENIKKIDWKVYEITSWDLIEKRNNSEFQTKTWFEFWSKENKENKFPIRINPEINIWYIEKNETWQKEEKNKNQTNNRRNRNRFLMMSTVSYKADKKYINNAFIKDEERIDNIQKFNEIFNENNKYDYFY

SEQ ID NO: 139 - protein, 1283 aa, unidentified
  REGION 1..1283: note = Description of Unknown: uncultivated organism sequence
  REGION 1..1283: note = Category: MG26 effectors
  REGION 1..1283: note = Description: MG26-18 effector
MSHLFNRFTNLYSLSKTLRFELKPVGETQKMLEDAKIFEIDKVRKEKYEATKPYFDRLHREFVEKALENAEISNLSGYFEIFKKWKKDKKAHEKELQNKEKTLRKEVVSLFDAQAKSWTEKYPGLKKKDIGILDEEGVFEQILKVRYGSEDESFLREADGNFILDDEGEKISIFDEWKGFTGYFKKFFETRKNFYKSDGTSTALATRIIDQNLKRFCDNMENFEKIKKKIDFSEVEKDFGESMNEVFSVSFYNSCLLQEGIDFYNKVLGGETLKNGEKLKGLNELINKYRQDHKGEKIPFFKLLDKQILSEKEKFIDEIERDDQLLEVLKDFYQSAEQRTKVLKALFKDLVSHEKNYDLSQVYLSKEALNTISHKWTGETELFEGQLYEVLRKSKEDSVKPKKKDRGYSFPDFIPLCYIQEALQKISAKKFWKERYYNEISGFSEENIWKQFLAILDFEFSSLFKRKVTNSETGEVMQLGYDVFKNDFKPLLQNFKNDQKAKVIIKNFADEVLRIYQMAKYFALEKKRKWERKWVGDDHKPGNFYDDPDFGFKINFYDNAYEEIVQPYNKLRNYVTKKPYSEEKWKLNFENPTLADGWDKNKESDNSAVILKKGEKYFLGLMAKGYNKIFDDRFSEEFSENITQEKYEKMNYKLLPGANKMLPKVFFGKSNIDFYNPSEKVLEIRNHSSHTKSGAPQKGFEKKEFNLNDCHILIDFFKKSIAKHPDWKVFDFHFSETSKYSDISDFYREVEEGGYKISFQDISGAYINQKNEAGELYLFQIKNKDWNEGSTGRKNLHTLYFESLFSKENIQQNFPFKLNGQAEIFYRPKTDVQKLGTKKDKRGKEVINHKRYNENKIFFHVPLTLNRTQGDARQFNSKINQFLANNPQINIIGVDRGEKHLAYYSVINQKGGILDSGSLNKITGVNYAEKLEEKAKSREQARKDWQTVEGIKDLKKGYISQVVRKLADLAIEHNAIIVFEDLNMRFKQIRGGIEKSVYQQLEKALIEKLNFLVNKGEKDPNQAGHLLKAYQLAAPFTTFKEMGKQTGILFYTQAAYTSKIDPITGWRPHLYLKYASAEKAKKDIDKFSKIEFKQGRFEFTYDIKKFRELKKSPKNTIWTVCSNVERFRWNRHLNNNKGDYDHFKGVTDKLMKLFNEYKIDFQRGDILGQVDSLETKGNEKFFKDFIFLFNLICQIRNTDDSEKAKREGKDDFILSPVEPFFDSRKENGANLPKNGDDNGAYNIARKGVILLNKLSEHLKKDPDFKKYPELYISNTEWDDFARK

SEQ ID NO: 140 - protein, 1302 aa, unidentified
  REGION 1..1302: note = Description of Unknown: uncultivated organism sequence
  REGION 1..1302: note = Category: MG26 effectors
  REGION 1..1302: note = Description: MG26-19 effector
MKKEKQFSPFEKFTNLYSLSKTLRFELRPTEETKTMLEEAQVFAKDEVIQKKYEATKPYFNRLHREFVDEALLNVKINGLSYYFQTLQEWQKDKKNKDSKKIYEKKTQELRKQIVKFFDDKANEWASYYDKRQIEYADKKAIKIKFVDDSGKKISGTKIFSSKGVLGILLDKFPEAKNDLYVFCDGFFGYYDKFKKTRENFYKDDGTSTALATRMIDQNLKRFCDNLALFENIKEKVDFSEVEQNFGVVLTQVFSLEYYNQCLLQNGIDGYNDILGGKPLKNGKKKKGLNECINLYKQKTGEKLSFFKTLDKQILSEKERFLDEIKSDEKLLEVLKNFEKTAEEKIPLLKNLFADFVENNENYDLSQIYIEKKQFDPNSCKWIDKSSIDNFQQSLYEVMKKEKLAKYDKKEESYKFPDFIALSYIKTALENGKSEGNFWKEKYYEISGFSEKTFWEQFLAIFSFEFSSLLGREITNQETGEKKMTGYNPFKRTFEALLQNFKVDQNAKIVIKDFADSVLTVYQMAKYFAVEKKRAWLAEYDLDSFYTHPEMGHLKFYDNAYEDIVQVYNDLRNYLTKKPYSEEKWKLNFENPTLANGWDKNKESDNSAIILRKNGEYYWGLMVKGYNKIFDDRYQEKFTDGLNEGKYEKIVYKFFPDQAKMFPKVCFSAKGLEFFKPSEEIWNIYQNDEFKNGDTFSVQSMQKFIDFYKDCLAKYEGWECYDFCHLKSTKSYQDNIGEFFRDVAEDGYKITFQDISEKYINEKNQKGELYLFEIRNKDWNLDKAREGKIKTTQKNLHTLYFESLFSAENIARNFPMKLNGQAEIFYRPKTEQGKLGIKKDKQGKEVTNHKRYNENKIFFHIPLTFNRTKNDPYRFNAQVNNFLAQNPSINIIGVDRGEKHLAYYSVITQNGEILDSGSLNSIGGVNYAEKLEEKAKNQEQAQKDWQAVEGIKDLKKGYISQVVRKLADLAIKHNAIIVFEDLNMRFKQIRGGIEKSVYQQLEKALIEKLSFLVNKGETNATKAGHLLKAYQLSAPFTTFQDVGKQTGIIFYTQAAYTSRIDPISGWRPHLYLKYSSADKAKEDILKFSKIEFINNRFEFTYDIKKFQQAKEYPKNTVWTVCSNIERFRWDKNLNNNKGGYTHYPNITDGKSENRNPKSTKPNNFKELFEKYVIDIARDIKEQIRLLEPKGNEKFFEHFIFFFNLICQIRNTDDSEQAKKTGKDDFIFSPIVPFFDSRKENEKNLPKNGDDNGAYNIARKGILILQKISEFYKEKGGCEKMNWGNLYVSNNDWDDFIKIKPHN

SEQ ID NO: 141 - protein, 1293 aa, unidentified
  REGION 1..1293: note = Description of Unknown: uncultivated organism sequence
  REGION 1..1293: note = Category: MG28 effectors
  REGION 1..1293: note = Description: MG28-1 effector
MKAFENFTGLYSLTKTLRFELKPIGKTLEYIEKNGLLDRDRHRANSYVEVKKIIDRYHKQFIEDSLRNFKLTYENEGKKDSLEEYFYHYKLRNRDDKQKKDFDEIQKNLRKQIASQFKKQDRFKRIDKKELIKEDLLEFVDNNEKKFIDEFRDFTTYFTGFHENRQNMYSEEEKSTAIAYRLIHENLPKFIDNISVFERVAVTDVANCFVQIYSDFEEYLNVNDISEIFRLDYYTEILTQAQIDVYNLIIGGCSQGDVKIKGLNEYINLYNQQQKDKSQRLPKLKPLFKQILSDRNAISWLPESFKSDNELLENLENCYQSYNEANVDKKSIFLRLKELLVSMSNYEIDKIFVRNDSQLTDISQKMFGNYNVISKSLLEDLKRSEPRKSKKETDESFEERLRNIIKNEESFKIERINSSLQKMDIDEYKKSVCDYYAGLAVDDKGNDIFDRIEKAYSEVKDLLNSPYPSDKNLIQEDKDIDKIKNLMESIKELHRFVKPLCGKGNEPDKDDRFYGEFTILYEELDKITPLYNMVRNYLTRKPYSTEKVKLFFENNGAMLNGWVDSKTENSDNGTQYGGYLFRRKNGIEEYDYYLGISSDVKLFRKDTIIAEHDKSDFERLDYYQLKSQTFYGSAYKGDYELETQNVIKAIDNFISKNGETDISEKIISDRANKNSKTGTAKGYLNFIKNTSIYDDLLNDDIFKNANDQLINSLKKTLMSFERLSTARKIANDNFNLFSDLMDAVDVLMQEKVFTYNAVSINEFESTINRDKKPLLLFKITNKDLSFADTFLSGKRKSRGVENLHTLYFKALMSGKQNVFDIGTGSVYFREKSIRYSEEKMKYGHHYDMLKDKFQYPIISNKRYVYDKFQFHLSMVQNYNGNKNLDINTIANDYIKKSDDLHVIGIDRGERHLLYLTVIDMKGNIKKQFSLNEIVNNYNGNTYRTNYRDLLDDREKKRDEERKSWRTIETIKELKEGYLSQVIHKISELMIEYNAIIVLEDLNLEFMRGRQKVEKSVYQKFEKMLIEKLNYLADKKKDPEDLGGILKAYQLTNELKKDGKQSGFLFYTQAWNTSKIDPVTGFVNLFDTRYENIAKSKTFFEKFDSIRFNTEKNWFEFSFDYNEFTTKAEGTKTKWTICTYGKRIESYRNPDKNLQWDGKEINLTEEFKLFFEKYGININSNLQSEIVKQDKKDFFEGLLHLLKLTLQMRNSKTGTDIDYMQSPVADENGIFYNSDECGKSMPENADANGAYNIARKGLMIIDKIKKSKDIKKIDLKISNKEWLSFAQNKPYLND

SEQ ID NO: 142 - protein, 846 aa, unidentified
  REGION 1..846: note = Description of Unknown: uncultivated organism sequence
  REGION 1..846: note = Category: MG28 effectors
  REGION 1..846: note = Description: MG28-2 effector
DSFSMAQINNWLTDYMGDTYKSIESYFIALGAEDDGNTQKPNLFIRIENAYTEAKSLLTKVYPKDRKLSQDKINVEKIKNLLDAIKNLQHFVKPLLGRGTESEKDSRFYGDFTPLWETLEQITPLYNMVRNRMTEKPYSDEKIKLYFDNNGSFLNGWVDSKTESDNATQYGGYLFRKLNSIGEYDYYLGVSAATKLFRSFNPVADNDKSCFERLDYYQLKGKTFYGALYKGDYETESANIRHSIDDVVCRSGSTLIKEKINIERQKKQPKISTAIGYLKFIRQQDGELYSTLLKDDIFEEANQAIMVSMKATLSSLDRIPFAKEYALRHYILFADMMDDIEVLLQGKVFSYFPISQNELDEAVTRISKPLYLFKITNKDLSFAETHEKGLRKSRGIENLHTMYFKALMSGCQDVFDIGSGSVFFREHKISYTDEQMKRGHHYEMLKDKFNYPIISNKRYAIDKFQFHISITMNYNADKSKDINYITNAYLKKSNDTHIIGIDRGERHLLYLSLIDLQGNIIDQFSLNEIVKEYNGKTYCTNYHALLDAKENQRDEARRSWQTIENIKELKEGYMSQVIHKIVDLMIKYNAIVVLEDLNLGFKRGRQKVEKQVYQKFEKMLIDKLNYLVDKKLDANEAGGVLRAFQLTNKFESFQKLGKQSGFLFYIPAWNTSKMDPTTGFVNLLDTRYENMAKAKAFFGKFKSIRFNNSKNWFEFSFDYNDFTTKAEGTKTQWTICTYGTRIENKRDPMQNNNFVSEEFELTNRFKDLFANTKYNIDLNGNLIEQICSQSDASFFKELLHLMNLTLQMRNSVVGTLIDYMISPVSNANGEFYDSRKCGKNLPENAD

SEQ ID NO: 143 - protein, 898 aa, unidentified
  REGION 1..898: note = Description of Unknown: uncultivated organism sequence
  REGION 1..898: note = Category: MG28 effectors
  REGION 1..898: note = Description: MG28-3 effector
LKSRIFEGDDSLRNLLKNLGEYDLEHVFIPVDIHLTEISQKYYGNWSLIKKAMEDDVKAKNPQKRNETTEKYEERIEKLLKTNESCSLAQINRLMKFYLGDEFKPIELYFVGLGAEDNENGQKPNVFVLIENAYAEASSLLTSPYPTDRKLSQDKISVDKIKTLLDAIKDLQHFVKPLLGKGGESEKDNRFYGEFTPLWEILDQITPLYNMVRNRMTQKPYSEEKVKLNFDNSTLLAGWDLNKEADNTCTILRKDGNYYLAIMDKKYNKVFRQECLVASGDCYEKMEYKLLPGANKMLPKVFFSKSRINEFNPSDKLMQNYEKETHKKGENFNVDDCRALIDFFKKSIDKHEDWSKFDFHFSDTKKYDDLSGFYREVEQQGYKISFRNVSVAYINRLVDEGKIYLFQIYNKDFSTYSKGTPNLHTMYWKMLFDERNLADVVYKLNGEAEVFFRKHSIDVDKPTHPANVPIDNKNKLNAKKSSVFEYDLIKDRRYTVDKFQFHVPITLNHKAAGYSSINSLVNTYLKESKATHIIGIDRGERHLLYLSLIDMNGNILEQYSLNEIVNEYKGNTYRTNYHDLLDAKEKQRDEARRSWQTIENIKELKEGYMSQVIHKVAELMVKYNAIVVLENLNTGFMRGRQKVEKQVYQKFEKMLIDKLNYLVDKKCDPNELGGVLNAYQLTNKFESFQKVGKQSGFLYYIPAWNTSKMDPTTGFVNLLDTRYENLPKAKSFMGKFKSIRFNPTKNWFEFAFDYNDFTTKAAGTRTQWTLCTYGTRIETKRDPKQNNMFVSEEFDLTNRFKQLFADMDLNGNLMEQISSQNDVAFYKELLHLLHLTLQMRNSITGTEVDYMISPVMNDQGEFYDSRNCGKSLPENADANGAYNIARKGLWIIDQIKRA

SEQ ID NO: 144 - protein, 779 aa, unidentified
  REGION 1..779: note = Description of Unknown: uncultivated organism sequence
  REGION 1..779: note = Category: MG28 effectors
  REGION 1..779: note = Description: MG28-4 effector
LWETLEQITPLYNMVRNRMTEKPYSDEKIRLYFDNNGSFLNGWVDSKTDSDNANQYGGFLFRKLNSIGEYDYYLGVSAATKLFRSFNPIDDSDKSCFERLDYYQLKGKTFYGALYKGDYETESANIRHSIDDVVCRSGSTLIKEKINIERQKKQPKISTAIGYLKFIRQQDDELYNILLKDDIFEEANQAIMVSMKATLSSLDRIPFAKEYALRHYILFADMMDDIEVLLQGKVFSYFPISQNELDEAVTRISKPLYLFKITNKDLSFAETHEKGLRKSRGIENLHTMYFKALMSGCQDVFDIGSGSVFFREHKISYTDEQMKRGHHYEMLKDKFNYPIISNKRYAFDKFQFHISITMNYNADKSKDINYITNAYLKESNATHIIGIDRGERHLLYLSLIDLQGNIVEQFSLNEIVKEYNGNTYCTNYHALLEAKENQRDYARRSWQTIENIKELKEGYMSQVIHKIVDLMIKYNAIVVLEDLNLGFKRGRQKVEKQVYQKFEKMLIDKLNYLVDKKLDANEAGGVLRAFQLTNKFESFQKLGKQSGFLFYIPAWNTSKMDPTTGFVNLLDTRYENMAKAKAFFGKFKSIRFNNSKNWFEFAFDYNDFTTKAEGTKTQWTICTYGTRIENKRDPMQNNNFVSEEFELTNRFKDLFANTKYNIDLNGNLIEQICSQSDASFFKELLHLMNLTLQMRNSVVGTTIDYIISPVANANGEFYDSRNCGKNLPENADANGAYNIARKGLWIINQIKQTEDLTKVKLSISNKEWLQYAQKQINNT

SEQ ID NO: 145 - protein, 1303 aa, unidentified
  REGION 1..1303: note = Description of Unknown: uncultivated organism sequence
  REGION 1..1303: note = Category: MG28 effectors
  REGION 1..1303: note = Description: MG28-5 effector
MHTYSEFTGLYQLSKTLRFELKPIGKTKENIERNGILERDKERDVAYKKVKKVIDEYHKAFIEQMLDDFELNLKNEGNMDSLEEFYFLYHLPTTDPKRKDDLNNVQEALRKQISERFTKSEQYKRLFGKELIREDLINEFVNTTKGSAYIRAQNGNETLGDDEVLQKQEELATEVARFKDFTGYFDGLKKNRENMYVADDETTSIAHRMITENLPKFIDNMDVFEKIVASEVATHFDEVYKVFEPYMNVYSINEMFRLDYFSMVLTQKQIDVYNAIIGELNKHTNLYNQQQKNNNLPKLKPLFKQILSERNAISWLPDEFGSDNEMLQSIGKCYQDLKERVFGSLKTLLENIKDYELEQIYLPNDLQLTDIAQKHFGSWEVIKNAVREETKKLNPQKNRESTEKYEERIGKLLKANESYSIGFINSLLKNRIDDFKPLEEYFTEMGAEDNGNEQKLNHFSRIENAYTEVKTLLNVDYPEGKTLSQDKANVEKIKNLLDAIKDLQHFVKPLLGKGTESEKDPLFYGEFVPLWESLDQITPLYNMVRNRMTQKPYSDEKIRLYFDNNGYFLRGWVDSKTESDKATQYGGYLFRRRNSIGEYDYYLGVSSATKLFRSFNLVTEEDKSSFERLDYYQLKGNTFYGSLYKGNYEQESSNIKHALDVFVSKHGCAFVKQKINVEKGKKQPKVSTASGYLKFIEQLDIELYDSLLKDEVFKKSNQEIMSSLRATLLSLDRIPSAKEYAHKKFTVFSEMMDDIDIMLRGKVFSYFPISRKELDEAVNRKTKPLYLFKITNKDLSFAETYEKGLRKSRGAENLHTMYFKALMSGNQNVFDIGSGSVYFREHKIDYSEEQLKKGHHYEMLKDKFAYPIISNKRYAYDKFQFHLSVTMNYNADKNKDINPLVNAYLKESKATHIIGIDRGERHLLYLSLIDLKGNIVEQYSLNEIVNEYNGGFYRTNYHDLLDSKEKQRDEARRSWQTIENIKELKEGYMSQVIHKIAQLMVKYNAIVVLEDLNPGFMRGRQKVEKQVYQKFEKMLIDKLNFLVDKKLDAEEIGGVLNAYQLTNKFESFQKQGKQSGFLFYIPAWNTSKMDPTTGFVNLLDTRYENMEKTKVFFGKFDSIKYNSAKDWFEFAFDYDNFTTKAEGTKTKWTLCTYGTRIETKRDPKQNNSFVSKELDLTSRFKELFADNHIDLNSNLKEHICSQSDAAFFKGLLNLVHLTLQMRNSITGTETDFLISPVMNAKGEFYDSRKCGKNLPENADANGAYNIARKGLWIIEQIKQTEDLSKLKLAISNKEWMRYTQGLE

SEQ ID NO: 146 - protein, 780 aa, unidentified
  REGION 1..780: note = Description of Unknown: uncultivated organism sequence
  REGION 1..780: note = Category: MG28 effectors
  REGION 1..780: note = Description: MG28-6 effector
MKEFTKLYPLSKTLRFELKPIGKTKDNIEKNGILERDSERAVAYKAVKKVIDEYHKSFIELKLADFELMQSQLEEFYLLYLLPTSEQKRKTDLPKVQESLRKQISDRFTKDDYYKRLFGKELIREDLTEFVNTPYYENIIRSIPGNEQLTDEEVKEIQENTQREISQFNDFTTYFVGFYDNRRNMYVAEDKATSIAHRMIDENLPKFVDNMDVFEKIAASDVAQHFGELYKAMEPYLNVCEIADLFKLNYFSMVLTQTQIDVYNAIIGGKTLDDGTKIQGLNEYVNLFNQQQKDKANRLPKLKPLFKQILSERNAISWLPDEFENDNEMLQSIEKCYQDLKAQVFEGEHSLKILLGSIGDYDLEHIYLPNDLQLTDISQKHFGSWSAIKNAVVEDIQSANPKKKTESGEKYDERISKLLKENDSFSIAYINRLMHSALDDSKPIESYFAQMGAEDNENCQKLNHFARIENAYTEIKSLLNTEYPSGKSLSQDKANVEKIKNLLDAIKDLQHFVKPLLGSGRESEKDNRFYGEFVPLWETLDQITPLYNMVRNRMTKKPYSEEKIKINFDNSTLLAGWDLNKESDNTCTLLRKDGNYYLAIIDKRHNKVLKPENLISDGECYEKMEYKLLPGANKMLPKVFFSKSRIAEFNPSETLVKNYENETHKKGDKFNLDDCHALIDFFKESIKKHEDWSKFGFKFSDTSSYEDLSGFYREVEQQGYKITFRNVSARYIDQLVDEGKIYLFQIYNKDFSPFSKGTPNMHTLYWKALFDERNLTDVVY

SEQ ID NO: 147 - protein, 1339 aa, unidentified
  REGION 1..1339: note = Description of Unknown: uncultivated organism sequence
  REGION 1..1339: note = Category: MG28 effectors
  REGION 1..1339: note = Description: MG28-7 effector
MKNLKQFVGLYPVSKTLRFELKPVGNTKENIERNGILEKDNQRAVGYKAIKKVIDEYHKAFIEQMLNEFELNLSNDGNLDSLEEFFLLYHLSSNDPTRDNITKVQESLRKKISERFTKSEQYKRLFGKELIREDLAQFVETPRYESFIRSQKGNENLSDDEVRQIQNEIIQEIGQFRDFTTYFSGFYENRKNLYVADDKATSIANRMINENLPKFIDNMDVFEKIAASEVAIHFDTLYKEMEAYLNVKSIEEMFQLDYFSIVLTQKQIDVYNSIIGGKTLEDGTKILGLNEYVNLYNQQQNNKDNRLPKLKPLFKQILSERNAISWLPDEFASDNEMLESIERCYQDLRKQVFEGENSLKELLKGIVDYDLEHIYLPDDLQLTNISQKHYGNWSVIKKAHEEYLRKEMQENLMVNKPQRRNESDENYQERIQELLKTKKYEESIEKQLKVNDSFSLAQINRLMSIYQGEDSKPIELYFATMGAEEIGNEKKPNLFIRIENAYTEVKTLLTTAYPKDRKLSQDKANVEKIKNLLDAIKNLQHFVKPLLGKGTEGEKDNHFYGEFTPLWEALDQITPLYNMVRNRMTQKPYSDEKIKLYFDNNGSFLNGWVDSKTESDNATQYGGYLFRKRNSIGEYDYFLGVSAATKLFRSFNSVEASDRSSYERLDYYQLKGKTFYGTLYKGNYETESANIRHAIDNLVYHAGSISIKEKINAERMKKQPKVSTAIGYLKYIMQQDCELYDILLKDDTFEKSNQAIMASMKATLLSLDRIPSAKEYAQRNYKLFSEMMDDIDMLLQGKVFSYFPVSQRELDETVNRTTKPLYLFKITNKDLSYAETHEKGLRKSRGSDNLHTMYFKALMSGCQDVFDIGSGSMFFREHKLVYTEDQLKKGHHYDMLKDKFNYPIVSKKRYAFDKFQFHLSVTMNYNSNKSKDINPMVNDYLKESNATHIIGIDRGERHLLYLSLIDLNGNIIEQYSLNKIANEYKGNIYRTDYHELLDAKEKQRDEARRSWMSIENIKELKEGYMSQVIHKIAELMVKYNAIVVLEDLNLGFMRGRQKVEKQVYQKFEKMLIDKLNYLVDKKIDANVLGGVQKAYQLANKFESFQKLGKQSGFLFYIPAWNTSKMDPTTGFVNLLDTRYENMAKAKAFFAKFKSIQFNAIKGWFEFAFDYDDFTTKAVGTKTQWTLCTYGTRVETKRDAKQNNMFVSEEFNLTSKFKELFVLYKIDLNENLREQICSQSEAIFFQKLLHLLRLTLQMRNSITGTEVDYLISPVMNASGGFYDSRKCGKNLPENADANGAYNIARKGLWIIEQIKQSNDLSKLKLAISNKEWLRYAQGVD

SEQ ID NO: 148 - protein, 1339 aa, unidentified
  REGION 1..1339: note = Description of Unknown: uncultivated organism sequence
  REGION 1..1339: note = Category: MG28 effectors
  REGION 1..1339: note = Description: MG28-8 effector
MKNLKQFVGLYPVSKTLRFELKPVGNTKENIERNGILEKDNQRAVGYKAIKKVIDEYHKAFIEQMLNEFELNLSNDGNLDSLEEFFLLYHLSSNDPTRDNITKVQESLRKKISERFTKSEQYKRLFGKELIREDLAQFVETPRYESFIRSQKGNENLSDDEVRQIQNEIIQEIGQFRDFTTYFSGFYENRKNLYVADDKATSIANRMINENLPKFIDNMDVFEKIAASEVAIHFDTLYKEMEAYLNVKSIEEMFQLDYFSIVLTQKQIDVYNSIIGGKTLEDGTKILGLNEYVNLYNQQQNNKDNRLPKLKPLFKQILSERNAISWLPDEFASDNEMLESIERCYQDLRKQVFEGENSLKELLKGIVDYDLEHIYLPDDLQLTNISQKHYGNWSVIKKAHEEYLRKEMQENLMVNKPQRRNESDENYQERIQELLKTKKYEESIEKQLKVNDSFSLAQINRLMSIYQGEDSKPIELYFATMGAEEIGNEKKPNLFIRIENAYTEVKTLLTTAYPKDRKLSQDKANVEKIKNLLDAIKNLQHFVKPLLGKGTEGEKDNHFYGEFTPLWEALDQITPLYNMVRNRMTQKPYSDEKIKLYFDNNGSFLYGWVDSKTESDNATQYGGYLFRKRNSIGEYDYFLGVSAATKLFRSFNSVEASDRSSYERLDYYQLKGKTFYGTLYKGNYETESANIRHAIDNLVYHAGSISIKEKINAERMKKQPKVSTAIGYLKYIMQQDCELYDILLKDDTFEKSNQAIMASMKATLLSLDRIPSAKEYAQRNYKLFSEMMDDIDMLLQGKVFSYFPVSQRELDETVNRTTKPLYLFKITNKDLSYAETHEKGLRKSRGSDNLHTMYFKALMSGCQDVFDIGSGSMFFREHKLVYTEDQLKKGHHYDMLKDKFNYPIVSKKRYAFDKFQFHLSVTMNYNSNKSKDINPMVNDYLKESNATHIIGIDRGERHLLYLSLIDLNGNIIEQYSLNKIANEYKGNIYRTDYHELLDAKEKQRDEARRSWMSIENIKELKEGYMSQVIHKIAELMVKYNAIVVLEDLNLGFMRGRQKVEKQVYQKFEKMLIDKLNYLVDKKIDANVLGGVQKAYQLANKFESFQKLGKQSGFLFYIPAWNTSKMDPTTGFVNLLDTRYENMAKAKAFFAKFKSIQFNAIKGWFEFAFDYDDFTTKAVGTKTQWTLCTYGTRVETKRDAKQNNMFVSEEFNLTSKFKELFVLYKIDLNENLREQICSQSEAIFFQKLLHLLRLTLQMRNSITGTEVDYLISPVMNASGGFYDSRKCGKNLPENADANGAYNIARKGLWIIEQIKQSNDLSKLKLAISNKEWLRYAQGVD

SEQ ID NO: 149 - protein, 756 aa, unidentified
  REGION 1..756: note = Description of Unknown: uncultivated organism sequence
  REGION 1..756: note = Category: MG28 effectors
  REGION 1..756: note = Description: MG28-9 effector
MKQFTNLYQVQKTLRFELRPVGRTKENIEKNGILERDNLRAIGYKSIKKVIDEYHKAFIEMMLNDFKLNMADSGQFNSLEELYMLYHLPSNDPARKEKMVKVQEALRKSISDLFTKSEQYKRLFGKELIREDLEPFVRTLQFEEYIRSQKGNENLSDEEVHQIQDEVVQDIAQFRDFTTYFAGFYENRKNMYVADDKATSIANRMINENLPKFIDNMDIFEKIAASDVAKNFDVLYKEMEAYLNVNSIAEMFRLDYFSMVLTQRQIDVYNAIIGGKTEKDGRKIQGLNEYINLYNQQQKDKANRLPKLKPLFKQILSERNAISWLPDEFSSDNEMLESIGKCYQDLKAQVFDGESSLKALLKKINEYDLEHIYLPNDLQLTNVAQRWYGSWSVIQNAYTESLKTANPPKRNETTEKYEARIEKLQKAIDSLSLAQINRLMNGYLGEEYKPVEQYFSTMGAEDDGDVQKPNLFIRIENAYTEVQSLLRTSYPEGRSLSQDKANVEKIKNLLDAIKDLQRFVKPLMGRGTESEKDNRFYGDFAPLWETLDQITPLYNMVRNRMTQKPYSDEKIKLNFDNSTLLAGWDLNKETDNTCTLLRKDGLYYLVIINKQHNRVLMAENLSADGDCYEKMVYKQLGQISQQLPRIAFSNSWQQRISIPADVLRIKKTESFKTNNEDLQKLIAFYKYFISQHEEWNTFFKIKFTDKADYKNLPEFYSEVDSLFYSLNFSKVSVAYINQLVDEGKIYLFQIYNKDFS

SEQ ID NO: 150 - protein, 1271 aa, unidentified
  REGION 1..1271: note = Description of Unknown: uncultivated organism sequence
  REGION 1..1271: note = Category: MG28 effectors
  REGION 1..1271: note = Description: MG28-10 effector
MKSYSDFTGLYLLSKTLRFELKPIGKTKENIERNGILERDNQRAVGYKAIKKVIDEYHKTFIEQMFDSFELKLEDEGRMNSLEEFYFLYHLPITDTKRKDNLSKVQEALRKQISERFTKSEQYKRLFGKELIREDLAEFVKTPKYEEIIRSQQGNENLTEEEIRKIQEEVEKTIDQFYDFTTYFVGFYDNRKNMYVADDKATSIAHRMIGENLPKFIDNMDVFEKIAASDVATHFEALYKAMEPYLNVNSISEMFQLGYFSMVLTQKQIDVYNAIIGGMVLDDGAKIQGLNEYVNLYNQQQKDKSNRLPKLKPLFKQILSECNAISWLPDEFESDNNMLESIEKCYQDLKNQVFEGENSLKNLLKNIGEYDLEHIYLPDDLQLTDIAQKHYGNWSMIKKALEEDVKAKNPQKRNETVEKYEERIEKLLKANECYSLAQINRLMKVYLGDEYKPIETYFAALGAEDNENGQKPNLSIRIENAHTEASNLLISTYPVDRKLSQDKANVERIKNLLDAIKDLQHFVKPLLGKGTESEKDNRFYGEFVPLWERLDQITPLYNMVRNRMTQKPYSEEKIKINFDNSTLLAGWDLNKEADNTCIILRKDGNYYLAIMDKRNNKVFETKNLVSEGDCYEKMEYKLLPGANKMLPKVFFSKSRMDEFKPSAQLLRNYERGTHKKGDNFSLDDCHALIDFFKESIEKHEDWSKFGFKFSDTKTYEDLSGFYREVEQQGYKISFRNVSVEYINRLVDEGKIYLFQIYNKDFSTYSKGTPNLHTLYWKMLFDERNLADVVYKLNGEAEVFFRKHSIEAEKPTHLANKPIENKNKLNEKKTSVFEYDLVKDRRYTVDKFQFHVPITMNFKAAGLNNINPLVNVYLKESNVTHIIGIDRGERHLLYLSLIDLQGNIVEQYSLNEIVNEYKGNTYRTNYHDLLDAKERQRDEARRSWQTIENIKELKEGYMSQVIHKIAELMVKYNAIVVLEDLNFGFMRGRQKVEKQVYQKFEKMLIDKLNYLVDKKCEADEMGGVFNAYQLTNKFESFQKLGKQSGFLFYIPAWNTSKMDPTTGFVNLLDTRYENMAKAKAFFGKFRSIRYNAAKGWFEFAFDNDDFNTKATGTRTQWTLCTYGTRIETKRDPKQNSNFVSEEFDLASRFKDLFDQYDIDLKGNLMEQICSQNDAAFFKELLHLLHLTLQMRNSITGTEVDYLISPVMNDNGEFYDSRKCGKNLPLNADANGAYNIARKGLWIIEQIKQTEDLSKLKLAISNKEWMRYAQGLE

SEQ ID NO: 151 - protein, 1271 aa, unidentified
  REGION 1..1271: note = Description of Unknown: uncultivated organism sequence
  REGION 1..1271: note = Category: MG28 effectors
  REGION 1..1271: note = Description: MG28-11 effector
MKSYSDFTGLYLLSKTLRFELKPIGKTKENIERNGILERDNQRAVGYKAIKKVIDEYHKTFIEQMFDSFELKLEDEGRMNSLEEFYFLYHLPITDTKRKDNLSKVQEALRKQISERFTKSEQYKRLFGKELIREDLAEFVKTPKYEEIIRSQQGNENLTEEEIRKIQEEVEKTIDQFYDFTTYFVGFYDNRKNMYVADDKATSIAHRMIGENLPKFIDNMDVFEKIAASDVATHFEALYKAMEPYLNVNSISEMFQLGYFSMVLTQKQIDVYNAIIGGMVLDDGAKIQGLNEYVNLYNQQQKDKSNRLPKLKPLFKQILSECNAISWLPDEFESDNNMLESIEKCYQDLKNQVFEGENSLKNLLKNIGEYDLEHIYLPDDLQLTDIAQKHYGNWSMIKKALEEDVKAKNPQKRNETVEKYEERIEKLLKANECYSLAQINRLMKVYLGDEYKPIETYFAALGAEDNENGQKPNLSIRIENAHTEASNLLISTYPVDRKLSQDKANVERIKNLLDAIKDLQHFVKPLLGKGTESEKDNRFYGEFVPMWETLDQITPLYNMVRNRMTQKPYSEEKIKINFDNSTLLAGWDLNKEADNTCIILRKDGNYYLAIMDKRNNKVFETKNLVSEGDCYEKMEYKLLPGANKMLPKVFFSKSRMDEFKPSAQLLRNYERGTHKKGDNFSLDDCHALIDFFKESIEKHEDWSKFGFKFSDTKTYEDLSGFYREVEQQGYKISFRNVSVEYINRLVDEGKIYLFQIYNKDFSTYSKGTPNLHTLYWKMLFDERNLADVVYKLNGEAEVFFRKHSIEAEKPTHLANKPIENKNKLNEKKTSVFEYDLVKDRRYTVDKFQFHVPITMNFKAAGLNNINPLVNVYLKESNVTHIIGIDRGERHLLYLSLIDLQGNIVEQYSLNEIVNEYKGNTYRTNYHDLLDAKERQRDEARRSWQTIENIKELKEGYMSQVIHKIAELMVKYNAIVVLEDLNFGFMRGRQKVEKQVYQKFEKMLIDKLNYLVDKKCEADEMGGVFNAYQLTNKFESFQKLGKQSGFLFYIPAWNTSKMDPTTGFVNLLDTRYENMAKAKAFFGKFRSIRYNAAKGWFEFAFDNDDFNTKATGTRTQWTLCTYGTRIETKRDPKQNSNFVSEEFDLASRFKDLFDQYDIDLKGNLMEQICSQNDAAFFKELLHLLHLTLQMRNSITGTEVDYLISPVMNDNGEFYDSRKCGKNLPLNADANGAYNIARKGLWIIEQIKQTEDLSKLKLAISNKEWMRYAQGLE

SEQ ID NO: 152 - protein, 1270 aa, unidentified
  REGION 1..1270: note = Description of Unknown: uncultivated organism sequence
  REGION 1..1270: note = Category: MG28 effectors
  REGION 1..1270: note = Description: MG28-12 effector
MNDLTQFTNLYSLSKTLRFELKPVGKTQENIEKNGILERDNQRAVGYKSVKKVIDEYHKAFIERILNDYERKLDDLQRSVWEDSLNEFYRLYHLPTSTPKRKDDLSKVQETLRKQISDCFKKDRQYGRLFGKELIREDLAEFVTTPLFEDYIISQKDNENLSADEIRKIQEGIIQDLSQFNDFTVYFSGFHENRRNMYVPDSKTTSIAHRMIDENLPKFIDNMDVFEKIAASEVAQHFGVLYKEMEPYLNVNEIPELFKLPYFSMVLTQNQIDVYNAIIGGMVLDDGTKIQGLNEYVNLYNQQQKDKTKRLPKLKPLFKQILSERNAISWLPDEFNSDNEMLQGIEKCYQDLREHVFEGDHSLKALLHNIGDYDLAHIYIPNDLQLTDISQKHFGSWSLIKAAIEEDLKSRTPVKRNESGEKYDERVAKTLKGIDSFSIADINRMMQAKVDDFKPVEAYFAQMGAEDNGNGQKLNHFARIENAYTDVKALLNTEYPKGKALSQDKKNVEKIKNLLDAIKDLQHFVKPLLGSGSESEKDSQFYGEFTPLWEMLNDITPLYNMVRNRMTSKPYSEEKIKVNFDNSTLLAGWDLNKEVDNTCTLLRKEGNYYLAIINKRHSRVLLPEYLVAEGDCYEKMVYKQLGQISQQLPRIAFSNSWQQKIKIPEEILKIKKTESFKTDKDDLQKLIAFYKFFLSQHEEWNSFFNIHFSNKTYYNNLAEFYSEVDSLFYSLSFTNVSVSYINQLVEEGKLYLFQIYNKDFSPYSKGTPNMHTLYWKMLFDERNLADVVYKLNGGAEVFFRKHSIKVDKPTHPANHPIANKNTQNKKKESVFAYDLIKDRRYTVDKFQLHVPITVNYKAIGLNNINPVVNAYLKDSKATHIIGIDRGERHLLYLSLIDLKGNIVEQYSLNEIVNEYNGNTYRTNYHDLLDAKEGKREEARRSWMEIENIKELKEGYMSQVIHKIAQLMVKYNAIVVLEDLNMGFMRGRQKVEKQVYQKFEKMLIDKLNYLVDKQCDAAELGGVLNAYQFTNKFESFQKMGKQSGFLFYIPAWNTSKMDPTTGFVNLLDTRYENMAKAKAFFGKFKSIRYNAKKVLFEFTFDYDDFTTKAADTRTQWTLCTYGTRIETKRDPKQNNNFVSEEFDLTDKFKELLAKHNIGIDGNLLEKICSQSDAAFFKELLHLLHLTLQMRNSITGTDTDYLISPVMNANGEFFDSRKCGKNLPENADANGAYNIARKGLWIIDQIKHSDDLSRLKLAISNKEWLQYAQKMV

SEQ ID NO: 153 - protein, 1280 aa, unidentified
  REGION 1..1280: note = Description of Unknown: uncultivated organism sequence
  REGION 1..1280: note = Category: MG28 effectors
  REGION 1..1280: note = Description: MG28-13 effector
MNNFTNLYPVDLTLRNSLIPIGETFKNMTMHSYIEHDEQRAEAYKLVKGIIDDYHRAFIDSRLASFEFRIESHGTLDSIEEFTTLYNIKRDEKRDKEFTTVKQNLRKAISQRLTKCDAFARINKRELIREDLPYFIDSLDISEEEKAEKKKLVEQFAKFATYFSNFHTNRANMYVADEKSTSIAYRLINQNLPVFLDNMKVFAMLKALGFEDALSIIYSDMKEKLNVLSLDELFQQDYYSMLLTQRQITVYNEVIGGRSTKDGEKIKGLNEYINQYNQEHPIARIPFLRPLYKQILSDRVSMSWLPDSFINDEEMIRAINIFYQNIHPLLWGPMEDAGEPLKNILSQIDTFDTEHIFITNDSALTNISQRLFGQYNVITDALLSRLSQEMPRKRGRKPESDEAYNERLRKTFKAIKSFSISEINESLKSYMDEGTYIDISSYFRAMDERNDEYIQQANMFIRIENAYTEAKPFLNELRASNSSYNQDDDAIKYIKVLLDAYKSLQRFINPLVGSGEESSKDDMFYGEFMPIVEELKNLTPLYNKVRNWLTRKPYSDEKFKVNFDNSSFLSGWPQDYETKGGYIVEHNGLYYLFINEVKLDEAQVKFLCDHPDADNATRILLDFQKPDNKNIPRLFIRSKGENFAPAVEKYALPIASVLDIYDQGKFKTEYRSVNPDDYYRSLHKLIDYFKLGFTRHESYKHYSFQWKPTNEYKDISQFYHDVEVSCYQLKRVPINWNHLQELVIQGSVYLFQIYNKDFSTRSKGKGTPNLHTLYWRMLFDERNTKDLVYKLNGQAEIFFRRASIKPENQVIHQANQPIENKNPLRKAIKPNSTFSYKITKNRRFTLDHFEFHAPITMNFKAPGITNINPLVIDKIRKSEITHVIGIDRGERHLLYLSLIDLKGNIIKQMTLNTITNKWAGGEIATDYQALLDQKEGDRLEARRNWKTIENIKELKEGYLSQAIHLIAQLIVENKAILVLEDLNTHFMHGRQKVEKQVYQRFERQLITKLNYYVDKKKDADAAGGLLHALQLTNKFESFEKLGKQSGFLFYVPAWNTSKIDPVTGFVNLLNLHYETREKASLFFSKFKCISFNTEKNWFEFVMDYNEFTKKADGTRTNWTLCTFGERIETFRNPQANLQWDNRTINLTQAFKDLFQDYGIDIYGNLKNQICSQQKAKFFEQLLHLMKLMLQMRNSKKNSTSAEDDYILSPVADDNGVFYDSRFCSESLPRDADANGAYNIARKGLWIIKKIQASSADERLNLTITNKEWLNFVQIKQYLND

SEQ ID NO: 154 - protein, 1280 aa, unidentified
  REGION 1..1280: note = Description of Unknown: uncultivated organism sequence
  REGION 1..1280: note = Category: MG28 effectors
  REGION 1..1280: note = Description: MG28-14 effector
MNNFTNLYPVDLTLRNSLIPIGETLKNMTMHSYIEHDEQRAEAYKLVKGIIDDYHRAFIDSRLASFEFRIESHGTLDSIEEFTTLYNIKRDEKRDKEFTTVKQNLRKAISQRLTKCDAFARINKRELIREDLPYFIDSLDISEEEKAEKKKLVEQFAKFATYFSNFHTNRANMYVADEKSTSIAYRLINQNLPVFLDNMKVFAMLKALGFEDALSVIYSDMKEKLNVLSLDELFQQDYYSMLLTQRQITVYNEVIGGRSTKDGEKIKGLNEYINQHNQEHPTARIPFLRPLFKQILSDRVSMSWLPDSFINDEEMIRAINIFHQNIYPLLWGPMEDAGEPLKNILSQIDTFDTEHIFITNDSALTNISQRLFGQYNVITDALLSRLSQEMPRKRGRKPESDEAYNERLRKSFKAIKSFSISEINESLKSYMNEGTYIDISSYFRAMDERNDEYIQQANMFIRIENAYTEAKPFLNELRASNSSYNQDDDAIKYIKVLLDAYKSLQRFINPLVGSGEESSKDDMFYGEFMPIVEELKNLTPLYNKVRNWLTRKPYSDEKFKVNFDNSSFLSGWPQDYETKGGYIVEHNGLYYLFINEVKLDEAQVKFLCDHPDADNATRILLDFQKPDNKNIPRLFIRSKGENFAPAVEKYALPIASVLDIYDQGKFKTEYRSVNPDDYYRSLHKLIDYFKLGFTRHESYKHYSFQWKPTNEYKDISQFYHDVEVSCYQLKRVPINWNHLQELVRQGSVYLFQIYNKDFSTRSKGKGTPNLHTLYWRMLFDERNTKDLVYKLNGQAEIFFRRASIKTENQVIHQANQPIENKNPLRKAIKPNSTFSYKITKNRRFTLDHFEFHAPITMNFKAPGITNINPLVIDKIRKSEITHVIGIDRGERHLLYLSLIDLKGNIIKQMTLNTITDKWAGGEIATDYQALLDQKEGDRLEARRNWKTIENIKELKEGYLSQAIHLIAQLIVENKAILVLEDLNTHFMHGRQKVEKQVYQQFEKQLITKLNYYVDKKKDADTAGGLLHALQLTNKFESFEKLGKQSGFLFYVPAWNTSKIDPVTGFVNLLNLHYETREKASLFFSKFKCISFNTEKNWFEFVMDYNEFTKKADGTRTNWTLCTFGERIETFRNPQANLQWDNRTINLTQAFNDLFQDYGIDIYGNLKNQICSQQKAKFFEQLLHLMKLMLQMRNSKKNSTSAEDDYILSPVADDNGVFYDSRSCSESLPRDADANGAYNIARKGLWIIKKIQASSADERLNLTITNKEWLNFVQTKQYLND

SEQ ID NO: 155 - protein, 1280 aa, unidentified
  REGION 1..1280: note = Description of Unknown: uncultivated organism sequence
  REGION 1..1280: note = Category: MG28 effectors
  REGION 1..1280: note = Description: MG28-15 effector
MNNFTNLYPVDLTLRNSLIPIGETLKNMTMHSYIEHDEQRAEAYKLVKGIIDDYHRAFIDSRLASFEFRIESHGTLDSIEEFTTLYNIKRDEKRDKEFTTVKQNLRKAISQRLTKCDAFARINKRELIREDLPYFIDSLDISEEEKAEKKKLVEQFAKFATYFSNFHTNRANMYVADEKSTSIAYRLINQNLPVFLDNMKVFAMLKALGFEDALSVIYSDMKEKLNVLSLDELFQQDYYSMLLTQRQITVYNEVIGGRSTKDGEKIKGLNEYINQHNQEHPTARIPFLRPLYKQILSDRVSMSWLPDSFINDEEMIRAINIFHQNIHPLLWGPMEDAGEPLKNILSQIDTFDTEHIFITNDSALTNISQRLFGQYNVITDALLSRLSQEMPRKRGRKPESDEAYNERLRKTFKAIKSFSISEINESLKSYMDEGTYIDISSYFRAMDERNDEYIQQANLFIRIENAYTEAKPFLNELRASNSSYNQDDDAIKYIKVLLDAYKSLQRFINPLVGSGEESSKDDMFYGEFMPIVEELKNLTPLYNKVRNWLTRKPYSDEKFKVNFDNSSFLSGWPQDYETKGGYIVEHNGLYYLFINEVKLDEAQVKFLCDHPDADNATRILLDFQKPDNKNIPRLFIRSKGENFAPAVEKYALPIASVLDIYDQGKFKTEYRSVNPDDYYRSLHKLIDYFKLGFTRHESYKHYSFQWKPTNEYKDISQFYHDVEVSCYQLKRVPINWNHLQELVIQGSVYLFQIYNKDFSTRSKGKGTPNLHTLYWRMLFDERNTKDLVYKLNGQAEIFFRRASIKPENQVIHQANQPIENKNPLRKAIKPNSTFSYKITKNRRFTLDHFEFHAPITMNFKAPGITNINPLVIDKIRKSEITHVIGIDRGERHLLYLSLIDLKGNIIKQMTLNTITDKWAGGEIATDYQTLLDQKEGDRLEARRNWKTIENIKELKEGYLSQAIHLIAQLIVENKAILVLEDLNTHFMHGRQKVEKQVYQQFEKQLITKLNYYVDKKKDADTAGGLLHALQLTNKFESFEKLGKQSGFLFYVPAWNTSKIDPVTGFVNLLNLHYETREKASLFFSKFKCISFNTEKNWFEFVMDYNEFTKKADGTRTNWTLCTFGERIETFRNPQANLQWDNRTINLTQAFNDLFQDYGIDIYGNLKNQICSQQKAKFFEQLLHLMKLMLQMRNSKKNSTSAEDDYILSPVADDNGVFYDSRSCSESLPRDADANGAYNIARKGLWIIKTIQASSADERLNLTITNKEWLNFVQTKQYLND

SEQ ID NO: 156 - protein, 1259 aa, unidentified
  REGION 1..1259: note = Description of Unknown: uncultivated organism sequence
  REGION 1..1259: note = Category: MG28 effectors
  REGION 1..1259: note = Description: MG28-16 effector
MNYSDFTGLYPLSKTLRFELKPIGKTKENIEKHGILERDSERAIAYKAVKKVMDEYHKVFIDSMLNDFELDMSTLDEFYYLYHLPSADQKRKTDLSKIQETLRKQISERFTKSEQYKRLFGKELIREDLAEFVKTPQYENVIREMPGNENLTDEAVKRFQESLQKDIAQFDDFTTYFVGFYDNRKNMYVADDKATSIAHRMIDENLPKFVDNMDVFDKIAASDVAMHFEELYKAMEPYLNVNEIAEMFRLDYFSTVLTQKQIDVYNAIIGGKVLNDGTKVQGLNEYVNLFNQSQKDKSKRLPKLKPLFKQILSERNAISWLPDEFESDNEMLHSIEKCYQDLKEHVFDLLKTLLGSVKDYNLEHIYLPNDLQLTDIAQKHFGSWSVIRNAVVEDLKANNPQKRKEDVEEYEKRMAKLHDSYSIAYLNGIMQGKVEDFKPIEDYFEGMGAEDNDNGQKLNHFARIWNAYTEIKSLLNTDYPKDKNLSQDKANVEKIKNLLDAIKDLQHFVKPLLGSGTESEKDSQFYGEFVPLWETLDQITPLYNMVRNRMTQKPYSNEKIKLNFDNSTLLAGWDLNKEADNTCTLLRKDDNYYLVIIDKRNNKVLKPENLVSEGDCYEKMEYKLLPGANKMLSKVFFSKSRIDEFKPSESVLRNYKNETHKKGDNFNLDDCHALIDFFKKSINKHEDWSKFGFRFSDTSSYEDLSGFYREVEHQGYKISFCNVSVDYINHLVEEGKIYLFQIYNKDFSPYSKGTPNMHTLYWRMLFDERNLADVVYKLNGKAEVFFRKRSIKVDQPTHPANKPIANKNFQNEKKESVFSYDLVKDRRYSVDKFQFHVPITMNFKAVGLNSINPLVNDYLKGSNATHIIGIDRGERHLLYLSLIDMKGNIVEQYSLNEIVNEYKGNTYRTNYHDLLDAKEKQRDEARRSWQTIENIKELKEGYMSQVIHKIAELMVRYNAIVVLEDLNMGFMRGRQKVEKQVYQKFEKMLIDKLNYLVDKKLDADEMGGVLNAYQLTNKFESFQKLGKQSGFLFYIPAWNTSKMDPTTGFVNLLDTRYENMEKSRVFFGKFDSIQYNSVKGWFEFVLDYNRFTTKAEGTRTRWTLCTYGTRIETRRNSEKNNEFDSVEFDLTTRFKELFSKYQIDLNGNLKEHICNQRDAAFFKEMLHLLHLTLQMRNSRINSDVDYLLSPVMNASGEFYDSRTCGKNLPENADANGAFNIARKGLWIIEQIKKTRDVDLAKIKLAISNKEWLRYAQGQD

SEQ ID NO: 157 - protein, 1256 aa, unidentified
  REGION 1..1256: note = Description of Unknown: uncultivated organism sequence
  REGION 1..1256: note = Category: MG28 effectors
  REGION 1..1256: note = Description: MG28-17 effector
MSDFKEFIGLYPLSKTLRFELIPQGKTLQNFKASGILERDEHRAESYKKMKDIIDEYHRFVIDESMNCFKLKLDNVGKYDSLEDYYTYYVIGKKSETEKKKFTDIQSNLRKQIVDQLKSNPHFGNLFKKELIKNDLIEYLGEDNENLPTVKEFADFTTYFSGFNQNRANMYSSEEKSTSIAYRLINQNLPRFVDNIGVYDRIKTTSIAEELNKVYSSFVEYLNVNKLDELFQLSYYNTLLTQRQIDVYNAVVGGRVTQDGEKILGLNELINLYNQKKEKKDRVPKFKILYKQILSEREAISFLPQVFSSDQETLAAVKDFYNAVKVVVIDKIKDMLSNIDSYDMSHVFIKNDNMFLSEISQKLYSDWGYINKSIIAYYKSVNAQKGKESFEKYESRISKLIKVRDSFSLRELDEYIHKLNPSYPKVESYFSSLGAINNVEQQKEDIFLQIENAYSESETLLNNPYPAENNLASDKKNVELLKDLLDRIKALQWFVKPLLGNGDEFGKDATFYGEFDPLYKELNDITPVYDKVRNRMTRKPYSDEKIKLNFDNSMLLGGWDQNKEKDYMSIILEKDGLFYLGIMNKIHNKVFLQSEIKTEGPCYKKMVYKLIPGPNKELPHVFLSAKGINIYKPSQEMLENYEKGTHKKNSDNFNINDCRKLIDYFKASIEKNNDWNKFEFCFSDTSSYKDISEFYKEVHDQAYKMSFCDVAVSYVDKLVNEGKLFLFKIYNKDFSTYSKGTPNMHTLYWKSVFSPDNLKSIVYQLNGQAELFYRKSSIKGNDMIIHPSGKGIANKNISNEKRESKFNYDIIKDKRYTVDKFQFHVPITINYKGRDQLINESANQYIKDNNIKHIIGIDRGERNLLYLSLIDMNGHIVKQFSLNEIINDYADNKYIVDYHNLLDVKEGDREEARRNWQTIEGIKELKEGYLSQVIHRICNLMIDYNAIVVLENLNIGFMRGRQKVEKQVYEKFEKMLIDKLNYLVDKKVSPISDGGVLKGYQLTNKFVSFKAMGDQNGFLFYIPAWNTSKMDPVTGFVNLFDTHYENIDKTRSFFSKFDVILYNKEKNYFEFKFDYKNFTDRAEGTKSNWTLCTQGKRVETFRNPEKNSKWDSKNVNLTEQFKTLFGQYKIDYTGNLKESISLQSEKLFFEELLHLFRLTVQMRNSVSNSDIDYLISPVTNSNGNFFNSEVERKKGKDSKGDWISKLPVDADANGAYNIARKGLWVINQIKQANSGDKIKLAISNKEWLSFAQHFNG

SEQ ID NO: 158 - protein, 1256 aa, unidentified
  REGION 1..1256: note = Description of Unknown: uncultivated organism sequence
  REGION 1..1256: note = Category: MG28 effectors
  REGION 1..1256: note = Description: MG28-18 effector
MSNFKEFIGLYPLSKTLRFELIPQGKTLQNFKASGILERDEHRAESYKKMKDIIDEYHRFVIDESMNCFKLKLDNVGKYDSLEDYYTYYVIGKKSETEKKKFTDIQSNLRKQIVDQLKSNPHFGNLFKKELIKNDLIEYLGEDNENLPTVKEFADFTTYFSGFNQNRANMYSSEEKSTSIAYRLINQNLPRFVDNIGVYDRIKTTSIAEELNKVYSSFVEYLNVNKLDELFQLSYYNTLLTQRQIDVYNAVVGGRVTQDGEKILGLNELINLYNQKKEKKDRVPKFKILYKQILSEREAISFLPQVFSSDQETLAAVKDFYNAVKVVVIDKIKDMLSNIDSYDMSHVFIKNDNMFLSEISQKLYSDWGYINKSIIAYYKSVNAQKGKESFEKYESRISKLIKVRDSFSLRELDEYIHKLNPSYPKVESYFSSLGAINNVEQQKEDIFLQIENAYSESETLLNNPYPAENNLASDKKNVELLKDLLDRIKALQWFVKPLLGNGDEFGKDATFYGEFDPLYKELNDITPVYDKVRNRMTRKPYSDEKIKLNFDNSMLLGGWDQNKEKDYMSIILEKDGLFYLGIMNKIHNKVFLQSEIKTEGPCYKKMVYKLIPGPNKELPHVFLSAKGINIYKPSQEMLENYEKGTHKKNSDNFNINDCRKLIDYFKASIEKNNDWNKFEFCFSDTSSYKDISEFYKEVHDQAYKMSFCDVAVSYVDKLVNEGKLFLFKIYNKDFSTYSKGTPNMHTLYWKSVFSPDNLKSIVYQLNGQAELFYRKSSIKGNDMIIHPSGKGIANKNISNEKRESKFNYDIIKDKRYTVDKFQFHVPITINYKGRDQLINESANQYIKDNNIKHIIGIDRGERNLLYLSLIDMNGHIVKQFSLNEIINDYADNKYIVDYHNLLDVKEGDREEARRNWQTIEGIKELKEGYLSQVIHRICNLMIDYNAIVVLENLNIGFMRGRQKVEKQVYEKFEKMLIDKLNYLVDKKVSPISDGGVLKGYQLTNKFVSFKAMGDQNGFLFYIPAWNTSKMDPVTGFVNLFDTHYENIDKTRSFFSKFDVILYNKEKNYFEFKFDYKNFTDRAEGTKSNWTLCTQGKRVETFRNPEKNSKWDSKNVNLTEQFKTLFGQYKIDYTGNLKESISLQSEKLFFEELLHLFRLTVQMRNSVSNSDIDYLISPVTNSNGNFFNSEVERKKGKDSKGDWISKLPVDADANGAYNIARKGLWVINQIKQANSGDKIKLAISNKEWLSFAQHFNG

SEQ ID NO: 159 - protein, 1261 aa, unidentified
  REGION 1..1261: note = Description of Unknown: uncultivated organism sequence
  REGION 1..1261: note = Category: MG28 effectors
  REGION 1..1261: note = Description: MG28-19 effector
MSNLGQFTGLYPLSKTLRFELKPIGKTQENIEKHGVLERDNERAIAYESVKKVIDEFHKSYIETKLSRLQLELSLLEEFYELYHHQIFDQNRKNKILNVQDSLRKQISDCFTKDDYYKRLFGKELIREDLTEFVNTPYYENVIRSVPGNEHLTDKEIKQIQENKQKEIDQFGAFTTYFVGYYDNRKNMYVPEDKATSIAHRMINENLPKFVDNMDVFEKISKSEVAANFETLYKAMESYLNVNSIEEMFKLDYYSMVLTQKQIDVYNSIIGGMVLEDGTKIKGLNEYVNLFNQQQKDKTRRLPKLKPLFKQILSERNAISWLPEEFENDNEMLQSIEKCYRELKTKVFDGENSLKTLLNNLEDYDLRHIYLPYDLQLTDIAQKHYGNWSLIKKALEDNLKKENPIKRLESNENYEERIARLLKANESVSLAQINSMMGDGNKSIESYFTTMGAEDNEDGKKPNLFVRIETAYLEAEKLLNSTYPIDKSLSQDKDNVDKIKNLLDAIKDLQHFVKPLLGQGTESEKDPRFYGEFVPLWETLDQITPLYNMVRNRMTKKPYSEKKIKINFDNSTLLAGWDLNKEADNTCSILRKEGLYYLVIMDKQHNRVLKPENLPADGECYEKMEYKLLPGANKMLPKVFFSKSRIGEFKPSERIVRNYKNDTHKKGSNFNLDDCHALIDFFKESINKHEDWSKFGFKFSDTETYKDLSDFYHEVEQQGYKISFRKVSVDYINQLVEEGKIYLFQIYNKDFSPYSKGTPNLHTLYWRALFDEKNLADVVYKLNGEAEVFFRKHSLVAKKPTHPANQPIANKNAKNEKKESTFAYDIIKDRRYTVDKFQFHVPITMNFKAAGISNINPLVNAYLKESDAIHIIGIDRGERHLLYLSIIDLEGNIVDQFSLNEIVNEYKGNAYRTNYHDLLDTKEKQRDEARKSWQTIESIKELKEGYVSQVIHKIAELMVKYNAIVVLEDLNFGFIRGRQKVEKQVYQKFENMLIDKLNYLVDKKLDVTEAGGVLNAYQLTNKFESFQKLGKQSGFLFYIPAWNTSKMDPTTGFVNFFDTRYENVEKARLFFGKFKDICYNAKDNWFEFAFDYEDFTTKAAGTKTQWTLCTQGTRVETRRDPTQNNKFVSKELDLTSKFNELFAKYNIDFNGDLKGQICSQNEAQFFRDLLHLLHLTLQMRNSIAGTEEDYLISPVKNANGEFYDSRKCCDNLPINADANGAYNIARKGLWIVDQIKQSDDITKIRLAISNKEWLRYVQGVK

SEQ ID NO: 160 - protein, 1309 aa, unidentified
  REGION 1..1309: note = Description of Unknown: uncultivated organism sequence
  REGION 1..1309: note = Category: MG28 effectors
  REGION 1..1309: note = Description: MG28-20 effector
MSNLNQFIGLYPLSKTLRFELKPIGKTKENIEKNGILERDTQRAVGYKVVKKVIDEYHKAFIERILNDFENKLGDDERNDWKNSLQEFYSLYLSPVSDNGRKDKLAKTQERLWKQIANAFKKDWQYNKLFADELIRKDLAEFVSTPFFENYIRSQKGNEDIPDSEVRAIQETITQDINCFRDFTTYFTGFNKNRENMYMADGKATSIAHRMINENLPKFIDNVEVFKKIADCDEIKIHFATLYKAMEQYLNVLTINEMFLLEYFPMVLTQKQIDVYNAVIGGLNEYINLYNQQQKDKSKRLPKLKPLFKQILSERNAISWLPDEFESDNEMLESIEKCYQDLTIQVFCGENSLKSLLINIRDYDLDHIYLPNDSSISTISQKLYGGWSIVGNAITEDIKVSNPQKKKESDEEYEERISKIRKGIECYSVGYLNGVLRDKIKIDNFKPIEDYFLLMGATDDKSDQKPNLFVRIEDAYAEARAILTSPYPEERNLSQDEESIEKIKNLLDTIKELQHFIKPLLGSGSESDRDNNFYGEFIPLWESLDQITALYNMVRNRMTQKPYTDEKIKLYFDNNATFLRGWVDSKTESSDNGTQYGGYLFRRQNAIGEYDYYLGVSKDIKLFRRFKEVEESDKSTYERLDYYQLKSKTFYGTLYKGNYEIESANIKRAIDNVVYLIGSAATKEKVNNEKGKRQPKINTAIGYLKFLQQQDKELYNILLKDKSFQECNKAIIASMKSTLLSLNRIPSAKDYAQKNYVLFSVMMDDIDTLLQEKIFTYFSVSKCELDNAVGRDLRPLYLFKITNKDLSFAETYENGLRKNRGTENLHTMYFKALMSGTQNVFDIGSGAIYFREHKISYTEEQLKRGHHYEMLKGKFSYPIISNKRYAFDKFQFHLSVNLNYNADKNVNINTLVNSYLKESNSTHIIGIDRGERNLLYLSLIDLHGNIVEQYSLNEIGDEYNRTNYHELLDKKENQRKEARLSWQTIESIKELKEGYMSQVIHKIVELMVKYNAIVVLEDLNGGFKRGRQKVEKQVYQKFEKMLIDKLNYLVDKKLAVTEPGGVLKAYQLANKFESSQKRDKQNGFLFYVPAWNTSKMDPTTGFVDLFDTRYVNIAKAKAFFGKFKSIRYDAEKGWIEFAFDYNDFTTKASGTRTQWTLCTQGTRIETKRDPSQNNQFISEEFDLTSRFIELFSQFKIDPDGNLMEQICSQTEATFYKSILHLLHVTLQMRNSKTGTDVDYLISPVMNSHGEFYDSRHCGKDLPNNADANGAYNIARKGLWIIEQIKQSEDFAHLKLAISNKEWLQYAQKE

SEQ ID NO: 161 - protein, 886 aa, unidentified
  REGION 1..886: note = Description of Unknown: uncultivated organism sequence
  REGION 1..886: note = Category: MG28 effectors
  REGION 1..886: note = Description: MG28-21 effector
MSNLNQFIGLYPLSKTLSFELKPIGKTKENIEKNGILERDTQRAVGYKVVKKVIDEYHKAFIERILNDFENKLGDDERNDWKNSLQEFYSLYLSPVSDNGRKDKLAKTQERLWKQIANAFKKDWQYNKLFADELIRIDLAEFVSTPFFENYIRSQKGNEDIPDSEVRAIQETITQDINCFRDFTTYFTGFNKNRENMYMADGKATSIAHRMINENLPKFIDNVEVFKKIADCDEIKIYFVTLYKAMEQYLNVLTINEMFLLEYFPMVLTQKQIDVYNAVIGGLNEYINLYNQQQKDKSKRLPKLKPLFKQILSERNAISWLPDEFESDNEMLESIEKCYQDLRSTVFDGNHSLQSLLSSINDYDLNHIYISNDSSISLISQKQYGGWGVIGNAIMENAKAANPQKRNESNEKYEERISKIQKGIDSYSIGYLNDVLRNKLDDFKPIEDYFLKMGGAVDNETEQKPTFFTRIENAYTEAHTLLTSPYPESRQLSQDKKNVEKIKNLLDAIKELQHFVKPLLGQGAESEKDNNFYGEFIPFWELLDQITVLYNMVRNRMTQKPYTDEKIKLYFDNNATFLRGWVDSKTESSDNGTQYGGYLFRRQNAIGEYDYYLGVSKDIKLFRRFKEVEESDKSTYERLDYYQLKSKTFYGTLYKGNYEIESSNIKRAIDNVVNSVGSTSIKGKLYNEKSKRQPKTATAIGYLKFIKQQDEELYNILLKDKSFQECNKAIIASMKSTLLSLNRIPSAKDYAQKNYVLFSAMMDDIDILLQEKIFSYFPVSQRELDEVVERNLRPLYLFKITNKDLSFAENYENGLRKNRGTDNLHTMYFKALMSGAQSVFDIGSGAIYFREHKISYTEEQLKRGHHYEILKDRFSYPIISNKRYAF

SEQ ID NO: 162 - protein, 1261 aa, unidentified
  REGION 1..1261: note = Description of Unknown: uncultivated organism sequence
  REGION 1..1261: note = Category: MG28 effectors
  REGION 1..1261: note = Description: MG28-22 effector
MSNLVQFTGLYPLSKTLRFELKPIGKTQENIEKHGVLERDNERAIAYESVKKVIDEFHKSYIETKLSRLQLDLSLLEEFYELYHHQIFDQNRKNKILNVQDSLRKQISDCFTKDDYYKRLFGKELIREDLTEFVNTPYYENVIRSVPGNEHLTDKEIKQIQENKQKEIDQFRDFTTYFVGYYDNRKNMYVPEDKATSIAHRMINENLPKFVDNMDVFEKISKSEVAANFETVYKAMESYLNVNSIEEMFKLDYYSMVLTQKQIDVNNSIIGGMVLEDGTKIKGLNEYVNHFNQQQKDKTCRLPKLKPLFKQILSERNAISWLPEEFENDNEMLQSIEKCYRELKTKVFDGENSLMTLLNNLEDYDLRHIYLPYDLQLTDIAQKHYGNWSLIKKALEDNLKKENPIKRFESNEKYEERIAILLKANESVSLAQINSMMGDGNKPIESYFTTMGAEDNEDGKKPNLFVRIETAYLEAEKLLNSTYPIDKSLSQDKDNVDKIKNLLDAIKDLQHFVKPLLGQGTESEKDPRFYGEFVPLWETLDQITPLYNMVRNRMTKKPYSEKKIKINFDNSTLLAGWDLNKEADNTCSILRKDGLYYLVIMDKQHNRVLKPENLPADGECYEKMEYKLLPGANKMLPKVFFSKSRIGEFKPSERIVRNYKNDTHKKGSNFNLDDCHALIDFFKESINKHEDWSKFGFKFSDTETYKDLSDFYREVEQQGYKISFRKVSVDYINQLVEEGKIYLFQIYNKDFSPYSKGTPNLHTLYWRALFDEKNLADVVYKLNGEAEVFFRKHSLVAKKPTHPANQPIANKNAKNEKKESTFAYDIIKDRRYTVDKFQFHVPITMNFKAAGISNINPLVNAYLKESDAIHIIGIDRGERHLLYLSIIDLEGNIVDQFSLNEIVNEYKGNAYRTNYHDLLDTKEKQRDEARKSWQTIESIKELKEGYVSQVIHKIAKLMVKYNAIVVLEDLNFGFIRGRQKVEKQVYQKFENMLIDKLNYLVDKKLDVTEAGGVLNAYQLTNKFESFQKQGKQSGFLFYIPAWNTSKMDPTTGFVNFFDTRYENVEKARSFFGKFKDICYNAKDNWFEFAFDYEDFTTKAAGTKTQWTLCTQGTRIETRRDPTQNNKFVSEELDLTSKFNELFAKFNIDFNGDLKGQICSQNEAQFFRDLLHLLHLTLQMRNSITGTEEDYLISPVKNANGEFYDSRKCCDNLPINADANGAYNIARKGLWIVEQIKQSDDITKIRLAISNKEWLRYVQGVK

SEQ ID NO: 163 - protein, 1265 aa, unidentified
  REGION 1..1265: note = Description of Unknown: uncultivated organism sequence
  REGION 1..1265: note = Category: MG28 effectors
  REGION 1..1265: note = Description: MG28-23 effector
MTMYTNFTRLYSLSKTLRFELKPIGKTKENIEKNGILKRDNERAVAYKAVKKVIDEYHKAFIEMMLNDFELQYEMLEEYNRLYQISNSSEPKKKEKLQKIQENLRKQISDRFTTSEQYKRLFGQELIKEDLSEFVNTSQFEHYIRTQKGNDLSDEEVRQIQKRTLEDIDQFKDFTTYFSGFHQNRKNMYVADDKATAIAHRVVMENLPKFIDNMNTFAEIAESDVAGHFADLYKEMEAYLNVNDIQEMFQLDYFSMVLTQKQIDVYNAIIGGKTLDDGTKIKGLNEYVNLYNQQQTRKEDRLPKLKPLFKQILSERNAISWLPEEFENDNEMLQSIEKCYQDLNAQVFGPLKDLLKNIKDSDLEHIYLPNDLQLTDISQKHFGSWAVINKAVEEDLKTANPQKNRESGEKYEERIAKLLKNTDSYSIGYINGLLKDRIEDFEPLEVYFSNIGAEDDGKQQKLNHFSRIENAYTEAKSLLTAEYPDDKRLSQDKGNVEKIKNLLDAIKDLQHFVKPLLGSGSESDKDSQFYGEFTSLWETLDQITPLYNMVRNRMTQKPYSIEKVKLNFDNSTLLSGWDLNKETDNTCTLLRKGGNYYLAIIDKRNNKVLKPENLVSSGDCFEKMEYKQIALPMGVGAFVRKCYGTAQNYGWRCPKNCLNKEGKIIIKDAEAQPNLIDIIDCYKDFFEKYEKDGFKYKDFRFKFSESSKYERLSDFFGDVESQGYIIRFKNVSVDYINQLVEEGKIYLFQIYNKDFSPYSKGTPNMHTLYWKMLFDEKNLADVVYKLNGEAEVFFRKSSVKENRPTHPANKPIANKNKQNEKKESTFAYDLIKDRRYTVDKFQFHVPITMNFKAKGMNDINLLVNQCLKESVETHIIGIDRGERHLLYLSLIDLQGNIVEQYSLNEIVNEYNGNIYRTNYHDLLDAKEKQRDEARSSWQTIENIKELKEGYMSQVIHKIAQLMLKYNAIVVLEDLNFGFMRGRQKVEKQVYQKFEKMLIDKLNYLVDKKRATNELGGVLNALQLTNKFESFQKLGKQSGFLFYIPAWNTSKMDPTTGFVNLLDTRYENMEKAKAFFGKFDSIRYNPQQDWFEFAFDYNSFHNKAEGTRTQWTLCTYGTRIETKRDAAQNNNFVSTEVDLTQKFKELFTEHQIDINGNLKDQICSQTDVAFFKSLLNLLRLTLQMRNSITGTETDYLISPVQNAKGEFYDSRKCGKNLPENADANGAYNIARKGLWVIEQIKQADDLSNIKLAITNKEWLWFAQRLK

SEQ ID NO: 164 - protein, 1266 aa, unidentified
  REGION 1..1266: note = Description of Unknown: uncultivated organism sequence
  REGION 1..1266: note = Category: MG28 effectors
  REGION 1..1266: note = Description: MG28-24 effector
MTSFSKFCGLYPLSKTLRFELKPIGKTKENIEKNGILERDSERATAYKAVKKVIDEFHKSFIELQLNDFELEQSKLEEFYHLYHLPTSDQKRKNDLPKVQESLRKLISERFTKNDYYKRLFGKELIREDLTDFVNTPYYENIIRNVPGNEQLSDEKVKQIQENTIREISQFNDFTTYFVGFYDNRKNMYVAEDKATAIAYRMINENLPKFIDNMDVFEKIAASDVAQHFGELYKEMEPYLNVSEIAEMFHLNYFSTVLTQTQIDVYNAIIGGKTLDDGTKIQGLNEYVNLYNQQQKDKSKRLPKLKPLFKQILSERNAISWLPDEFKNDNEMLQSIEKCYQDLKEQVFGALKQLLTTIKDYNLQHIYLPNDLQLTDISQKQYGSWSVIKNAIIEDLKKTNQPKKKEDAEDFENRLSKLADSYSIAYINQVTGSNIENFKPIEDYFAKMGAEDNENGQKLNHFARIENAYTEIKQLLNSEYPTGKSLSQDKANVEKIKNLLDAIKDLQHFVKPLLGSGTESEKDNSFYGEFTPLWENLDQITPLYNMVRNRMTKKPYSEEKIKINFDNSTLLAGWDLNKEADNTCTLLRKDGNYYLAIIDKRHNKVLKAENLSSDGECYEKMEYKLLPGANKMLPKVFFSKSRIAEFKPSEKIIRNYENETHKKGDKFNLADCHALIDFFKESIKKHEDWSKFGFNFSPTNSYEDLSGFYREVEQQGYKISFRNISVNYINKLVDEGKIYLFQIYNKDFSPFSKGTPNMHTLYWKALFDEKNLADVVYKLNGEAEVFFRKHSLNGAKPTHPANQPIANKNAQNEKKQSTFAYDLIKDRRYTVDKFQFHVPITMNFKAAGINNINPLVNEYLKESNATHIIGIDRGERHLLYLSLIDLKGNIVEQYSLNEIVNEYNGNTYRTNYHNLLDAKEKQRDEARRSWQTIENIKELKEGYMSQVIHKIAELMVKYNAIVVLEDLNLGFMRGRQKVEKQVYQKFEKMLIDKLNYLVDKKLDADATGGVLNAYQLTNTYKVFHDQYKKQQNTIGKQCGFLFYIPAWNTSKMDPTTGFVNLFDTRYENMEKAKAFFGKFDSIRFNSVKGWFEWAFDYDKFTTKAEGTQTKWTLCTYGTRIETKRNPEKNNEFDSVEFDLTERIKELFAKYQIDANGNLKEQICSQTDATFFKELLHLLHLTLQMRNSITGTETDYLISPVMNAKGEFYDSRVCGKDLPENADANGAYNIARKGLWVIEQIKHADDLTKPKLAISNKEWMRYAQGLK

SEQ ID NO: 165 - protein, 1262 aa, unidentified
  REGION 1..1262: note = Description of Unknown: uncultivated organism sequence
  REGION 1..1262: note = Category: MG28 effectors
  REGION 1..1262: note = Description: MG28-25 effector
MVKYSDFTGLYPLSKTLRFELKPIGKTKENIERNGILERDNKRAVGYKAVKKVIDEYHKAFIDMMLDDFKLNLTDKGKLDSLEEFYAIYHLSSNDTLRKVNITKVQDSLRKQISDRFTKSEQYKRLFGKELIREDLIEFVQTPQYNAFIRAQQGNDNLSDNDIQQIKEEIIQDISRFKDFTTYFIGFYENRRNMYVADDKATSIGHRMITENLPKFVDNIDVFEKIAASDVASSFKVLYKDMEPYLNVNSLDEMFRLDYYSMVLTQKQIDVYNAIIGGMVLDDGTKIKGLNEYVNLYNQQQKDKANKLPKLKLLFKQILSERNAISWLPEEFESDNDMLKSISQCYQDLKSQVFEGEGSLRVLLQNLNDYDLEHIYLPDDLKLTDIAQKLYGNWSVVKRALEEDFKTKNPQKKNETNEKFEERIDKLLKSNESFSIAQINNLVRASLGEDYKPLESYFMSLGEPNLFVRIQDAYTEVKSLLKTSYPEDKKLSQDKANVERIKNLLDAIKDLQHFVKPLLGKGNESEKDNRFYGEFTPLWEALDQITPLYNMVRNRMTQKPYSEEKVKLNFDNSTLLAGWDLNKEADNTCTILRKDDNYYLAIMDKKNNKVFMQENIVATGDCYEKMEYKLLPGANKMLPKVFFSKSRIGEFKPSDVLMQNYKKETHKKGENFNIDDCHALIDFFKKSIDIHEDWSKFDFHFSDTKKYEDLSGFYREVEQQGYKITFRNVSVDYVNSLVDEGKIYLFQIYNKDFSTYSKGTPNLHTMYWKMLFDERNLADVVYKLNGEAEVFFRKHSIEAVKPTHPANKPIENKNKLNAKKTSVFDYDLIKDRRYTVDKFQFHVPITMNFKASGLNNINPLVNAYLKESNVTHIIGIDRGERHLLYLSLIDMKGNIVEQYSLNEIVNEYKGNTYRTNYHDLLDAKERQRDEARRSWQTIENIKELKEGYMSQVIHKIAELMVKYNAIVVLEDLNLGFMRGRQKVEKQVYQKFEKMLIDKLNYLVDKKRDARETGGVLKAYQLTNKFESFQKLGKQSGCLFYIPAWNTSKMDPTTGFVNLFDTRYENMAKAKAFFSKFKSIRYNAAKDWFEFAFDYDDFTTKAAGTKTKWTLCTYGTRIETKRDPKQNNMFVSEEFKLTDRFKDLFAQYRIDLNENMMEQISLQNDATFFKELLHLLHLTLQMRNSITSTEIDYLVSPVMNAAGEFYDSRRCGKNLPENADANGAYNIARKGLWIIDQIKQADDLSKLKLAISNKEWMRYAQGV

SEQ ID NO: 166 - protein, 957 aa, unidentified
  REGION 1..957: note = Description of Unknown: uncultivated organism sequence
  REGION 1..957: note = Category: MG28 effectors
  REGION 1..957: note = Description: MG28-26 effector
NMDVFEKIAASEVAIHFDTLYKEMEAYLNVKSIEEMFQLDYFSIVLTQKQIDVYNSIIGGKTLEDGTKILGLNEYVNLYNQQQNNKDNRLPKLKPLFKQILSERNAISWLPDEFASDNEMLESIERCYQDLRKQVFEGENSLKELLKGIVDYDLEHIYLPDDLQLTNISQKHYGNWSVIKKAHEEYLRKEMQENLMVNKPQRRNESDENYQERIQELLKTKKYEESIEKQLKVNDSFSLAQINRLMSIYQGEDSKPIELYFATMGAEEIGNEKKPNLFIRIENAYTEVKTLLTTAYPKDRKLSQDKANVEKIKNLLDAIKNLQHFVKPLLGKGTEGEKDNHFYGEFTPLWEALDQITPLYNMVRNRMTQKPYSDEKIKLYFDNNGSFLNGWVDSKTESDNATQYGGYLFRKRNSIGEYDYFLGVSAATKLFRSFNSVEASDRSSYERLDYYQLKGKTFYGTLYKGNYETESANIRHAIDNLVYHAGSISIKEKINAERMKKQPKVSTAIGYLKYIMQQDCELYDILLKDDTFEKSNQAIMASMKATLLSLDRIPSAKEYAQRNYKLFSEMMDDIDMLLQGKVFSYFPVSQRELDETVNRTTKPLYLFKITNKDLSYAETHEKGLRKSRGSDNLHTMYFKALMSGCQDVFDIGSGSMFFREHKLVYTEDQLKKGHHYDMLKDKFNYPIVSKKRYAFDKFQFHLSVTMNYNSNKSKDINPMVNDYLKESNATHIIGIDRGERHLLYLSLIDLNGNIIEQYSLNKIANEYKGNIYRTDYHELLDAKEKQRDEARRSWMSIENIKELKEGYMSQVIHKIAELMVKYNAIVVLEDLNLGFMRGRQKVEKQVYQKFEKMLIDKLNYLVDKKIDANVLGGVQKAYQLANKFESFQKLGKQSGFLFYIPAWNTSKMDPTTGFVNLLDTRYENMAKAKAFFAKFKSIQFNAIKGWFEFAFDYDDFT

SEQ ID NO: 167 - protein, 1102 aa, unidentified
  REGION 1..1102: note = Description of Unknown: uncultivated organism sequence
  REGION 1..1102: note = Category: MG28 effectors
  REGION 1..1102: note = Description: MG28-27 effector
QYKILFRKQLIRQDLAEFLKTPRCDAYIRSKNSKEILSEDEMKQIQDNIIQEIAQFRDFTTYFSGFYENRRNMYVPDAKATSIANRMINENLPKFVDNIDEFEKIASSEVATHFDTLYKEMEAYLNVNSIAEMFQLDYFSMVLTQKQIDVYNAIIGGKTLEDGTKIQGLNEYVNLFNQQQNEKANRLPKLKLLFKQILSERSAISWLPDVFESDTQMLDSIKKCYQDLRENVFEGRNSLKELLRGISDYDLEHIYLPNDVQLTNIAQKQYGDWSVIKRAFEKITKAQNPQRRNESNEKYEARIVKLQKTYDSFSMAQINNWLTDYMGDTYKSIESYFIALGAEDDGNTQKPNLFIRIENAYTEAKSLLTKVYPKDRKLSQDKINVEKIKNLLDAIKNLQHFVKPLLGRGTESEKDSRFYGDFTPLWETLEQITPLYNMVRNRMTEKPYSDEKIKLYFDNNGSFLNGWVDSKTESDNATQYGGYLFRKLNSIGEYDYYLGVSAATKLFRSFNPVADNDKSCFERLDYYQLKGKTFYGALYKGDYETESANIRHSIDDVVCRSGSALIKEKINFERQKKQPKISTAIGYLKFIRQQDGELYSTLLKDDIFEEANQAIMVSMKATLSSLDRIPFAKEYALRHYILFADMMDDIEVLLQGKVFSYFPISQNELDEAVTRISKPLYLFKITNKDLSFAETHEKGLRKSRGIENLHTMYFKALMSGCQDVFDIGSGSVFFREHKISYTDEQMKRGHHYEMLKDKFNYPIISNKRYAFDKFQFHISITMNYNADKSKDINYITNAYLKESNATHIIGIDRGERHLLYLSLIDLQGNIVDQFSLNEIVKEYNGNTYCTNYHALLEAKENQRDEARRSWQTIENIKELKEGYMSQVIHKIVDLMIKYNAIVVLEDLNLGFKRGRQKVEKQVYQKFEKMLIDKLNYLVDKKLDVKEAGGVLRAFQLTNKFESFQKLGKQSGFLFYIPAWNTSKMDPTTGFVNLLDTRYENMAKAKAFFGKFKSIRFNNSKNWFEFAFDYNDFTTKAEGTKTQWTLCTYSTRIETKRDPMQNNKYVSEEFELTNRFKDLFANTKYNIDLNGNLIEQICSQSDA

SEQ ID NO: 168 - protein, 829 aa, unidentified
  REGION 1..829: note = Description of Unknown: uncultivated organism sequence
  REGION 1..829: note = Category: MG28 effectors
  REGION 1..829: note = Description: MG28-28 effector
SFYHLPSSDLTRKANLTKIQDALRKEISDHFIKSEQYKRLFGKDLIREDLAEFVLTPRFEAYIRSKKSKEILSKDEVKRIQDNFIQEIAQFRDFTTYFSGFYENRRNMYVPDAKATSIANRMINENLPKFVDNIDVFERIASSEVATHFDTLYKEMEAYLNVNSIAEMFQLDYFSMVLTQKQIDVYNAIIGGKTLEDGTKIQGLNEYVNLFNQQQNEKTNRLPKLKILFKQILSERSAISWLPDVFESDTQMLESIKMCYQDLKENVLEGRNSLKELLSGISEYDLEHIYLPNDVQLTNIAQNQYGDWSVIKKAFENITKAQNPQRRNESNEKYETRIEKLQKTHDSFSMAQINNWLIDYMGDTYKSIESYFIALGAEDDGNTQKPNLFIRIENAYTEAESLLTKVYPKDRKLSQDKVNVEKIKNLLDAIKNLQHFVKPLLGRGTESEKDSRFYGDFTPLWETLEQITPLYNMVRNRMTEKPYSDEKIRLYFDNNGSFLNGWVDSKTDSDNATQYGGYLFRKLNSIGEYDYYLGVSAATKLFRSFNPVADNDKSCFERLDYYQLKGKTFYGALYKGDYETESANIRHTIDNVVRHSGSALIKEKINFERQKKQPKISTAIGYLKFIRQQDGELYSTLLKDDIFEEANQAIMVSMKATLSSLDRIPFAKEYALRHYILFADMMDDIEVLLQGKVFSYFPISQSELDEAVTRISKPLYLFKITNKDLSFAETHEKGLRKSRGIENLHTMYFKALMSGCQDVYDIGSGSVFFREHKISYTDEQMKRGHHYEMLKDKFNYPIISNKRYAFDKFQFHISITMNYNADKSKDINY

SEQ ID NO: 169 - protein, 881 aa, unidentified
  REGION 1..881: note = Description of Unknown: uncultivated organism sequence
  REGION 1..881: note = Category: MG28 effectors
  REGION 1..881: note = Description: MG28-29 effector
TDYMGDTYKSIESYFIALGAEDDGNTQKPNLFIRIENAYIEAKSLLTKVYPKDRKLSQDKINVEKIKNLLDAIKNLQHFVKPLLGRGTESEKDSRFYGDFTPLWETLEQITPLYNMVRNRMTEKPYSDEKIKLYFDNNGSFLNGWVDSKTESDNATQYGGYLFRKLNSIGEYDYYLGVSAATKLFRSFNPIADSDKSCFERLDYYQLKGKTFYGALYKGDYETESANIRHTIDNVVRHTGSTLNKEKIKIERQKKQPKISTAIGYLKFIRQQDDELYNILLKDDIFEEANQTIMVSMKATLSSLDRIPLAKEYAIRQYTLFADMMDDIEVLLQGKVFSYFPISQSELDEAVTRISKPLYLFKITNKDLSFAETHEKGLRKSRGIENLHTMYFKALMSGCQEVFDIGSGSVFFREHKISYTDEQMKRGHHYEMLKDKFNYPIISNKRYAFDKFQFHISITMNYNADKSKDINYITNAYLKESNATHIIGIDRGERHLLYLSLIDLQGNIVDQFSLNEIVKEYNGNTYCTNYHALLEAKENQRDEARRSWQTIENIKELKEGYMSQVIHKIVDLMIKYNAIVVLEDLNLGFKRGRQKVEKQVYQKFEKMLIDKLNYLVDKKLDANEAGGVLRAFQLTNKFESFQKLGKQSGFLFYIPAWNTSKMDPTTGFVNLLDTRYENMAKAKAFFGKFKSIRFNNSKNWFEFSFDYNDFTTKAEGTKTQWTLCTYSTRIETKRDPMQNNKYVSEEFELTNRFKDLFANTKYNIDLNGNLIEQICSQSDASFFKELLHLMHLTLQMRNSVVGTLIDYMISPVANANGEFYDSRNCGKNLPENADANGAYNIARKGLWIINQIKQTEDLTKVKLSISNKEWLQYAQKQINNT

SEQ ID NO: 170 - protein, 1060 aa, unidentified
  REGION 1..1060: note = Description of Unknown: uncultivated organism sequence
  REGION 1..1060: note = Category: MG28 effectors
  REGION 1..1060: note = Description: MG28-30 effector
VIDEYHKAFIELMLDNFELELKDSGKLDSLEEFYMLYHLPSNDSTRKDRITKVQDALRKKISECFTKTEQYKRLFGKELIREDLEPFVGTLQFEEYIRSQKGNENLNDDELRQIQVEVVQEIAQFRDFTTYFSGFYENRKNMYVADNKATSIANRMINENLPKFIDNMDVFDRIAVSGVSKHFDTLYKEMEPYLNVNSIAEMFRLDYFSTVLTQKQIDVYNTIIGGRTEKDGRKIQGLNEYINLFNQQQKDKENRLPKLKPLFKQILSDRNAISWLPDEFASDNEMLESIEKCYQDLREHVFEGENNLKVLLKGIGEYDLEHIYLCDDAQLTNIAQKQFGNWNVIKNAFEESIKAENPARGNESIEKYEARIEKLMKTNDSFSLAQINRLMSAYLGDEYKPIESYFTAMGAEDDGAVQKPNLFIRIENAYTEVKNLLRTSYPNDRKLSQDKVNVEKIKNLLDAIKDIQHFVKPLMGKFTESVKDNRFYGEFTPLWETLDQITPLYNMVRNHMTQKPYSDEKIKLNFDNSTLLAGWDLNKEVDNTCTLLRKDGLYYLVIINKQYNRILTAENISNDGECYEKMVYKQLGQISQQLPRIAFSNSWQQRISIPAEVLRIKKTESFKTNNEDLLKLIAFYKYFISQHEEWNTFFNIKFTDKSDYKNLPEFYSEVDSLFYSLSFSKVSVANINQLVDEGKIYLFQIYNKDFSTYSKGTPNLHTMYWKMLFDERNLADVVYKLNGEAEVFFRKHSIEAGKPTHPANKPVVNKNKLNENRTSVFEYDLIKDRRYTVDKFQFHVPITMNYKAEGLNNINPMVNAYLKESNATHIIGIDRGERHLLYLSLIDLKGNIVEQCSLNEIVNEYKGKTYRINYHDLLDTKEKQRDEARRSWQAIENIKELKEGYMSQVIHKIAELIVKYNAIVVLEDLNLGFMRGRQKVEKQVYQKFEKMLIDKLNYLVDKKLDATEQGGVLKAYQLANKFESFQKMGKQSGILFYIPAWNTSKMDPTTGFVNLFDTRYKNIAKAKAFFAKFKSIRYNATKDWMEFAFDYDDFTTKALGTKTQ

SEQ ID NO: 171 - protein, 872 aa, unidentified
  REGION 1..872: note = Description of Unknown: uncultivated organism sequence
  REGION 1..872: note = Category: MG28 effectors
  REGION 1..872: note = Description: MG28-31 effector
VIRNAVVEDLKVGNPQKKKEDAEEYEKRLAKLHDSYSIAYLNGIMQGKTEDFKPIEDYFAGMGAEDNEKGQKVNHFARIENAYTEIKALLNTDYHKGKNLSQDKVNVEKIKDLLDAIKDLQHFVKPLLGNGTESEKDSQFYGEFTPLWEALDQITPLYNMVRNRMTQKPYSNEKIKLNFDNSTLLAGWDLNKEADNTCTLLRKDGNYYLVIIDKRNNKVLKPENLVSKGDCYEKMEYKLLPGANKMLPKVFFSKSRIDEFKPSESVLKNYKNETHKKGGNFNLDDCHALIDFFKKSINKHEDWSKFGFHFSDTNSYEDLSGFYREVEQQGYKITFRNVSVDYINQLVDEGKIYLFQIYNKDFSPFSKGTPNMHTLYWRMLFDERNLADVVYKLNGEAEVFFRKHSIRVDKPTHPANQPIANKNAQNEKKESTFAYDLIKERRYTVDKFQFHVPITMNFKAAGLNNINPLVNAYLKESNDTHIIGIDRGERHLLYLSLIDMKGNIVEQYSLNEIVNEYNGNTYRTNYHDLLDAKEKQRDEARRSWQTIENIKELKEGYMSQVIHKIAELMVKYNAIVVLEDLNMGFMRGRQKVEKQVYQKFEKMLIDKLNYLVDKKLDAEKMGGVLNAYQLTNKFESFQKLGKQSGFMFYIPAWNTSKMDPTTGFVNLFDTRYENMEKSKVFFGKFDSIRYNAAKGWLEFAFDYDNFTAKAEGTRTRWTLCSYGARIETKRNPEKNNEFDSVEIELTERFKALFAKHQIDLNGNLKEQICNQSDASFFKEMLHLLHLMLQMRNSVTNSEIDYLLSPVMNASGEFYDSRTCGKNLPENADANGAYNIARKGLWIIEQIKQSDDLSRPKLAISNKQWLRYAQGLD

SEQ ID NO: 172 - protein, 944 aa, unidentified
  REGION 1..944: note = Description of Unknown: uncultivated organism sequence
  REGION 1..944: note = Category: MG28 effectors
  REGION 1..944: note = Description: MG28-32 effector
VQLTNIAQKQYGDWSVIKKAFDNITKAQNPQRRNESNEKYEARILKLQKTYDSFSMAQINNWLTDYMGDTYKSIESYFTALGAEDDGNTQKPNLFIRIENAYTEAKSLLTKVYPKDRKLSQDKINVEKIKNLLDAIKNLQHFVKPLLGRGTESEKDSRFYGDFTPLWETLEQITPLYNMVRNRMTEKPYSDEKIKLYFDNNGSFLNGWVDSKTESDNATQYGGYLFRKLNSIGEYDYYLGVSAATKLFRSFNPVADNDKSCFERLDYYQLKGKTFYGALYKGDYETESANIRHSIDDVVCRSGSTLIKEKINFERQKKQPKISTAIGYLKFIRQQDDELYNILLKDDIFEEANQAIMVSMKATLSSLDRIPFAKEYALRHYTLFADMMDDIEVLLQGKVFSYFPISQSELDEAVTRISKPLYLFKITNKDLSFAETHEKGLRKSRGIENLHTMYFKALMSGCQDVYDIGSGSVFFREHKISYTDEQMKRGHHYEMLKDKFNYPIISNKRYAFDKFQFHISITMNYNADKSKDINYITNAYLKESNATHIIGIDRGERHLLYLSLIDLQGNIVDQFSLNEIVKEYNGKTYCTNYHALLDAKENQRDEARRSWQTIENIKELKEGYMSQVIHKIVDLMIKYNAIVVLEDLNLGFKRGRQKVEKQVYQKFEKMLIDKLNYLVDKKLDANEAGGVLRAFQLTNKFESFQKLGKQSGFLFYIPAWNTSKMDPVTGFVNLLDTRYENMAKAKAFFGKFKSIRFNNSKNWFEFSFDYNDFTTKAEGTKTQWTLCTYSTRIETKRDPMQNNKYVSEEFELTNRFKDLFANTKYNIDLNGNLIEQICSQSDASFFKELLHLMNLTLQMRNSVVGTTIDYMISPVANANGEFYDSRNCGKNLPENADANGAYNIARKGLWIINQIKQTEDLTKVKLSISNKEWLQYAQKQIKNT

SEQ ID NO: 173 - protein, 1280 aa, unidentified
  REGION 1..1280: note = Description of Unknown: uncultivated organism sequence
  REGION 1..1280: note = Category: MG28 effectors
  REGION 1..1280: note = Description: MG28-33 effector
MKAFTNLYQVAKTLRFELIPDERTKEFLEHSKLIDKDEHRAESYVAVKGIIDRYHKAFIERVLSELKLQYAKEDKLNSLEELYSLYMKTQKSDADKKMLEQVQSNLRKQIANALTKDSQYKRMSGKELIREDLFKITTPEERTLVEEFADFTTYFSGFYENRKNMYSAEAQSTAISYRLINENLPKFIDNIATFHKILNSPVAEQLPTLYKEMKEYLNVNSIEEMFMLDYYDVVLTQTQIEVYNGVIGGRTTDDGQKIQGINEYVNLFNQKQSSRETRLPKLKPLFKQILSDRQTVSWLTEEFKTDRDMLDAIKERYDSLSSDVFPLLKELLQNLFSYNLNQIFIPNNLALTDISQSLYGDWGVIKREIMIRLKHDFPQTKKEKAEKYEERIEKTYKSFDSFSIAYLNEVLSEKSLDVCSYFATLGAVNNKDRQTENLFLQIKNAYHNAAELFEKDYPETKNLAQDKQSVDKLKVLMDALKALQHFVKPLMETGEEPEKDERFYGDLSVLMEELNLVTPLYNKVRNRMTRKPYSNEKFKLTFNIKGNFLGGWVDSKTEKSDNGTQYGGYLFRKKNSIGEYDYYLGVSANTKLFRKVEGASGQYERLDYYQPKSQTVYGNSYVGKDGYESDKQTLMHSIISYVGTTNDMNVKQQVESKDTPSSMITVIKDASPLLYQGLLDDPYFSDVNRRVTNNFHQTILSMTRIPRSKDYQGAKFTLFTEPQQVIEDICKEKVFGYFAVDDQEIADAMADTSKPFLLFKISNKDLSFAEKFEKGMRHSRGTDNLHTMYFKALMNGEQSVLDIGSGEVFFRRASIKANITHPARIAIKNKNNANEKKESCFDYDLIKDKRYTVDKFGFHLSIIQNYQSPNRYDVNALTREYIRNNPDVHFIGIDRGERHLLYVSVINSRGQIVEQFSMNKIENEYNQTDYHQLLEQRSDIRQKERQSWRTIEGIKELKQGYLSQVVHRIATLMVKYKAVVVLEDLNMGFKRGRQMVESSVYQQFEKALIDKLNYLVDKQVDANEPGGLLRGLQLTNKFTSFREMGKQNGFLFYIPAWNTSKMDPVTGFVDLLHPRYENVDKARAFFCKFKSIQYNDEKGWYEFRLDYNDFNAKAEGTKTLWSVCSNGTRIETFRNVEKNSSWDNREVCLTEEFDKLFADYHISRTGNLKEQIAQQTEKSFFERLTHLLNLTLQMRNSMTGTTIDYLVSPVADEDGVFYDSRTCSKELPENADANGAYNIARKGLWVACQIREAQDANKVKLNISNKQWLLFAQTKPYLSD

SEQ ID NO: 174 - protein, 1280 aa, unidentified
  REGION 1..1280: note = Description of Unknown: uncultivated organism sequence
  REGION 1..1280: note = Category: MG28 effectors
  REGION 1..1280: note = Description: MG28-34 effector
MKAFTNLYQVAKTLRFELIPDERTKEFLEHSKLIDKDEHRAESYVAVKGIIDRYHKAFIERVLSELKLQYAKEDKLNSLEELYSLYMKTQKSDADKKMFEQVQSNLRKQIANALTKDSQYKRMSGKELIREDLFKITTPEERTLVEEFADFTTYFSGFYENRKNMYSAEAQSTAISYRLINENLPKFIDNIATFHKILNSPVAEQLPTLYKEMEEYLNVNSIEEMFMLDYYDVVLTQTQIEVYNGVIGGRTTDDGQKIQGINEYVNLFNQKQSSRETRLPKLKPLFKQILSDRQTVSWLTEEFKTDREMLAAIKERYDLLSSDVFPLLTELLQNLSSYDLNQIFIPNNLALTDISQSLYGDWGVIKREIMIRLKHDFPQTKKEKAEKYEERIEKTYKSFDSFSIAYLNEVLSEKSLDVCSYFATLGAVNNKDRQTENLFLQIKNAYYDAAGLFEKDYPETKNLAQDKQSVDKLKVLMDALKALQHFVKPLMETGEEPEKDERFYGDLSVLMEELNLVTPLYNKVRNRMTRKPYSNEKFKLTFNIKGNFLGGWVDSKTEKSDNGTQYGGYLFRKKNSIGEYDYYLGVSANTKLFRKVEGASGQYERLDYYQPKSQTVYGNSYVGKDGYESDKQTLMHSIISYVGTTNDMNVKQQVESKDTPSAMITVIKDASPLLYQGLLDDPYFSDVNRRVTNNLHQTILSMTRIPRSKDYQDAKFTLFTEPQQVIEDICKEKVFGYFAVDDQEIADAMADTSKPFLLFKISNKDLSFAEKFEKGMRHSRGTDNLHTMYFKALMNGEQSVLDIGSGEVFFRRASIKANITHPARIVIKNKNNANEKKESCFDYDLIKDKRYTVDKFGFHLSIIQNYQSPNRYDVNALTREYIRNNPDVHFIGIDRGERHLLYVSVINRRGQIVEQFSMNKIENEYNQTDYHQLLEQRSDIRQKERQSWRTIEGIKELKQGYLSQVVHRIATLMVKYKAVVVLEDLNMGFKRGRQMVESSVYQQFEKALIDKLNYLVDKQVDANEPGGLLRGLQFTNKFTSFREMGKQNGFLFYIPAWNTSKMDPVTGFVDLLHPRYENVDKARAFFCKFKSIQYNDEKGWYEFHLDYNDFNAKAEGTKTLWSVCSNGTRIETFRNVEKNSSWDNREVCLTEEFDKLFADYHISRTGNLKEQIAQQTEKSFFERLTHLLNLTLQMRNSMTGTTIDYLVSPVADEDGVFYDSRTCSKELPENADANGAYNIARKGLWVARQIREAQDANKVKLNISNKQWLLFAQTKPYLSD

SEQ ID NO: 175 - protein, 1277 aa, unidentified
  REGION 1..1277: note = Description of Unknown: uncultivated organism sequence
  REGION 1..1277: note = Category: MG28 effectors
  REGION 1..1277: note = Description: MG28-35 effector
MDRFTNLYPVSKTLRFELIPDKRTKAILEKTDLISQDEHRAKSYKLVKKIIDRYHKAFIESVLGSFKLPNDDVNLLHELYSKSQKSDADKKAMEKVQDKLRKVIADALTKDDRFKRIDKKELIREDILSVITPDERALIDEFRDFTTYFTGFHENRRNMYSAEAQSTAIAYRLIHENLPKFIDNMATFEKIAASPVADHFPQLYQEMSECRLNVRDIQEMFSLDYYTELLTQSQIEVYNAVIGGRTVEDGGKKIQGINEYVNLYNQQQPSRDTRLPKLKPLFKQILSDREAVSWLDEEFDSDKSMLEAVRDIYHALDDHVFDPLRELLTNLPSYNLDGIFIPNDLAITDISQAMFKDWSVIKRAIADDVKAHCPLKRKETAENYEERISKLIKREGSFSIGYLNACMPGKDICEHFAGLGAVDDGEEQTENIFLQIRNAYADAQSLIENDYPESRNLAQDKEYVAKLKALLDAVKALQRFVKPLLGNGDEPDKDERFYGELAVLWEELDRVTPLYNKVRNRMNRKPYSIEKFKLNFNIKGNFLGGWVDSKTEKSDNGTQYGGYLFRKKNVIGEYDYYLGVSAKTKLFRRKEGAEGQYERLDYYQPKSQTVYGNSYVGPDGYDHDKRELMDAIVSFVGALGESELYQSLVSMGTPSAMLKALREQPLIYQQLLADRRFASINSKVTKYLHETILSLVRIPRSQDYVNAEFSLFTEPQEVIDNLCKEKVFTYFVVDDAEIEQAMNDENKPFLLFKISNKDLSYADTYSKGLRKSRGTDNLHTMYFKALMSGNQSVIDIGTGEMFYRKASISVDKPTHKANVPIKKKNPNNQGTESSFSYDLYKDRRFTVDKFGFHLSFIYNYLAKEQDMNKMAREYIHDHDDLHFIGIDRGERHLLYVTVIDSRGRIKEQFSLNEIVNEYQGNKYKTNYRGLLDKREEERQRERQSWNTIEGIKELKQGYLSQVIHKIVTLMVKYHAVVVLEDLNMGFKRGRQKVESSVYQQFEKALIDKLNLLIDKKADADQPGGLLHAYQLTNMFTSFREMGRQNGFLFYIPAWNTSKIDPVTGFVDLLHPRYESVEKSRSFFCKFKSVRYNQEKGWYEFSLDYNAFTTKAEGTRTCWTLCSHGTRVETYRNPDKNSSWDSREIDLTAELNALFEAYGINRQGNLKEAIAERDEKDFFERLMRLMALTLQMRNSITGTEVDYMISPVADENGNFYDSRSCGRELPENADANGAYNIARKGLWVARQIQASPVDERINMAVSNKEWLNFAQSKPYLDD

SEQ ID NO: 176 - protein, 1284 aa, unidentified
  REGION 1..1284: note = Description of Unknown: uncultivated organism sequence
  REGION 1..1284: note = Category: MG28 effectors
  REGION 1..1284: note = Description: MG28-36 effector
MKQFTNLYPVTKTLRFELIPDSRTKKYLENSDFINRDEHRAEYYKIVKKIIDRYHKVFIEEVLSSTKLQYAKTGRLDSLEELYSLLVKSQKTESDKKSIAKVQDKLRKQIVDAFKNDSRFKRIDKKELIREDIFKLVELTPEERALVEEFRDFTTYFNGFHENRKNMYSSEAQSTAIAFRLIHENLPKFIDNIAIFHRILRSPVAENFQQLYKDMEEYLNVNSLEEMFMLDYYNDVLTQTQIDVYNAIIGGRTLEDGKKIQGINEYVNLFNQQQSSRETCLPKLKPLYKQILSDKVAVSWLPEEFATDNELLEAVRDCYTSLSNNVFVKLEEMLTNLSEYNLNGVFIPNDLSLTNISQWLYGDWSFIKKAITKDLMENCPSKKNEKPEKYEERLEKHVKSEGYFSIAYLNSCLNNVQKNVCSYFNELGAVNTESKQIENLFSKIQNAYTDAKDLLESDYPKNKNLAQEKSEVAKIKLLLDALKELQHFVKPLTNAGDKAEKDEQFYSEMTIIWDELSRVTPLYNKVRNRMTRKPYSLEKFKLTFNIKGNFLGGWVDSKTEKSDNGTQYGGYLFRRKNAINEYDYYLGVSANTKLFRRQSGVVGEYERLDYYQPKSQTIYGNSYVGNNSYETDKEELKIAILEFVSKLGNDELLQQVGAKDTPSAMLTVIKESSNVIFNQLLIDEEFAKKNREVTDNLHQTILGMSRIPRAKEYRDASFTIFTEPQQVIDDICKDKVFSYFPVSDVEMNNAISDINKPFLLFKISNKDLSFAEMYSKGLRKSRGIENLHTMYFKALMEGNQSVLDIGTGEMFYRRASIKVAKPTHPSNQPIQKKSQSGESMFAYDLIKDRRFTVDKFGFHLSIIQNYQAAGKVDVNSMVRSYIHDNPDMHFIGIDRGERHLLYVSVIDSKGNIKEQFSMNQITKDYNGVEYKTNYRNLLDIRDDVRKQERQSWRTIEGIKELKQGYLSQVIHKIVTLMVKYRAIVVLEDLNMGFKRGRQKVESSVYQQFEKALIDKLSYLVDKQQDANKCGGLLKGFQLTNKFTSFRDMKKQNGFLFYISAWNTSKIDPVTGFVDLLHPKYENVDKARSFFCKFKSIRYNKQKGWYEFTFDYNDFTTQAEGTRTLWTICTRGSRIETFRNKDKNSEWDSHEINLTDEFNSLFCQYNISSNDNLKEVIARQTDKKFFESLIHLLCLTLQMRNSKTGTDIDYLISPVANEHGLFYDSRNCDSSLPENADANGAYNIARKGLWMARQIQGAERNEKIDFVITNKEWLNFAQTKPYLTD

SEQ ID NO: 177 - protein, 1276 aa, unidentified
  REGION 1..1276: note = Description of Unknown: uncultivated organism sequence
  REGION 1..1276: note = Category: MG28 effectors
  REGION 1..1276: note = Description: MG28-37 effector
MDRFTNLYPVSKTLRFELIPDKRTKAILEKTDLISQDEHRAESYKLVKKIIDRYHKAFIESVLGSFKLPNDDVNLLHELYSKSQKSDADKKAMEKVQDKLRKVIADALTKDDRFKRIDKKELIREDILRVITPDERALIDEFRDFTTYFTGFHENRRNMYSAEAQSTAIAYRLIHENLPKFIDNMATFEKIAASPVADHFPQLYQEMSECLNVRDIQEMFSLDYYTELLTQSQIEVYNAVIGGRTVENGGKKIQGINEYVNLYNQQQPSRDTRLPKLKPLFKQILSDREAVSWLDEEFDSDKSMLEAVRDCYHALDDRVFDPLRELLTNLPSYNLDGIFIPNDLAITDISQAMFKDWSVIKRTIADDVKAHCPLKRKETAENYEERISKLIKREGSFSIGYLNACMPGKDICEHFAGLGAVDDDEEQTENIFLQIRNAYADAQSLIENAYPEGRNLAQDKENVAKLKALLDAVKALQRFVKPLLGNGDEPDKDERFYGELAVMWEELDRVTPLYNKVRNRMTRKPYSIEKFKLNFNIKGNFLGGWVDSKTEKSDNGTQYGGYLFRKKNEIGEYDYYLGVSAKTKLFRRKEGAKGQYERLDYYQPKSQTVYGNSYVGPDGYDHDKRELMDAIVSFVGALGESELYQSLVSMGTPSAMLKALREQPLIYQQLLADRRFASINSKVTKYLHETILSLVRIPRSQDYVNAEFSLFTEPQEVIDNLCKEKVFTYFVVDDAEIEQAMNAENKPFLLFKISNKDLSYADTYSKGLRKSRGTDNLHTMYFKALMSGNQSVIDIGTGEMFYRKSSISVDKPTHKANVPIKKKNPNNQGTLSSFCYDLYKDRRFTVDKFGFHLSFIYNYLAKEQDMNKMAREYIHDHDDLHFIGIDRGERHLLYVTVIDSRGRIKEQFSLNEIVNEYQGNKYKTNYRGLLDKREEERQRERQSWNTIEGIKELKQGYLSQVIHKIVTLMVKYHAVVVLEDLNMGFKRGRQKVESSVYQQFEKALIDKLNLLIDKKADADQPGGLLHAYQLTNKFTSFREIGRQNGFLFYIPAWNTSKIDPVTGFVDLLHPRYESVEKSRSFFCKFKSIRYNQEKGWYEFSLDYNAFTTKAEGTRTCWTLCSHGTRVETYRNPEKNSSWDNREIDLTAELNALFEAYGINRQGNLKEAIAERDEKDFFERLMRLMALTLQMRNSITGTEVDYMISPVADENGNFYDSRSCGRELPENADANGAYNIARKGLWVARQIQASPVDERINMAVSNKEWLNFAQSKPYLDD

SEQ ID NO: 178 - protein, 1280 aa, unidentified
  REGION 1..1280: note = Description of Unknown: uncultivated organism sequence
  REGION 1..1280: note = Category: MG28 effectors
  REGION 1..1280: note = Description: MG28-38 effector
MKAFTNLYQVAKTLRFELIPDERTKEFLEHSKLIDKDEHRAESYVAVKGIIDRYHKAFIERVLSELKLQYAKEDKLNSLEELYSLYMKTQKSDADKKMLEQVQSNLRKQIANALTKDNQYKRMSGKELIREDLFKITTPEERTLVEEFADFTTYFSGFYENRKNMYSAEAQSTAISYRLINENLPKFIDNIATFHKILNSPVAEQLPTLYKEMEEYLNVNSIEEMFMLDYYDVVLTQTQIEVYNGVIGGRTTDDGQKIQGINEYVNLFNQKQSSRETRLPKLKPLFKQILSDRQTVSWLTEEFKTDRDMLDAIKERYDSLSSDVFPLLKELLQNLFSYNLNQIFIPNNLALTDISQSLYGDWGVIKREIMIRLKHDFPQTKKEKAEKYEERIEKTYKSFDSFSIAYLNEVLSEKSLDVCSYFATLGAVNNKDRQTENLFLQIKNAYHDAAGLFEKDYPETKNLAQDKQSVDKLKVLMDALKALQHFVKPLMETGEEPEKDERFYGDLSVLMEELNLVTPLYNKVRNRMTRKPYSNEKFKLTFNIKGNFLGGWVDSKTEKSDNGTQYGGYLFRKKNSIGEYDYYLGVSANTKLFRKVEGASGQYERLDYYQPKSQTVYGNSYVGKDGYESDKQTLMHSIISYVGTTNDMNVKQQVESKDTPSSMITVIKDASPLLYQGLLDDPYFSDVNRRVTNNLHQTILSMTRIPRSKDYQDAKFTLFTEPQQVIEDICKEKVFGYFAVDDQEIADAMADTSKPFLLFKISNKDLSFAEKFEKGMRNSRGTDNLHTMYFKALMNGEQSVLDIGSGEVFFRRASIKANITHPARIVIKNKNNANEKKESCFDYDLIKDKRYTVDKFGFHLSIIQNYQSPNRYDVNALTREYIRNNPDVHFIGIDRGERHLLYVSVINRRGQIVEQFSMNKIENEYNQTDYHQLLEQRSDIRQKERQSWRTIEGIKELKQGYLSQVVHRIATLMVKYKAVVVLEDLNMGFKRGRQMVESSVYQQFEKALIDKLNYLVDKQVDANEPGGLLRGLQFTNKFTSFREMGKQNGFLFYIPAWNTSKMDPVTGFVDLLHPRYENVDKARAFFCKFKSIQYNDEKGWYEFHLDYNDFNAKAEGTKTLWSVCSNGTRIETFRNVEKNSSWDNREVCLTEEFDKLFADYHISRTGNLKEQIAQQTEKSFFERLTHLLNLTLQMRNSMTGTTIDYLVSPVADEDGVFYDSRTCSKELPENADANGAYNIARKGLWVACQIREAQDANKVKLNISNKQWLLFAQTKPYLSD

SEQ ID NO: 179 - protein, 1277 aa, unidentified
  REGION 1..1277: note = Description of Unknown: uncultivated organism sequence
  REGION 1..1277: note = Category: MG28 effectors
  REGION 1..1277: note = Description: MG28-39 effector
MERFTNLYQVSKTLRFELIPDKRTKEILEHTDLIAQDEHRAESYKTVKKIIDRYHKNYIDSVLGTLKLPESDIDELYELYNKQQKTDAEKNALEKVQGKLRKLIADALSKDSRFKRIDKKELIREDILDIIIPEERSLIDEFRDFTTYFTGFHENRRNMYSAKAQSTAIAYRLIHENLPKFIDNMATFCKIAASPVAERFNDLYQEMAEYLNVREIGEMFKLDYFTEILTQKQIEIYNAVIGGRTLDDGTKIQGLNEYVNLYNQQQTTRETRLPKLKPLFKQILSDREGVSRLPEEFATDQEMLNAVKEYYKVLNDHVLSPLKELLVNLSSYNPNGVYITNDLSLSNISQSLYGDWSLIKKSMTEDIKRQCPRKKKETAENYDERIHQLIKREKSFSIDYLNDCIKSLGKDICTHFAALGATDDGDTQTVNLISQIRNAYTDAQSLLESNYPANRNLAQEKDNVDKLKGLLDAIKALQHFVKPLLGNGDEPKKDERFYGELAVLWEELDRITPLYNKVRNRMTRKPYSTEKFKLNFNIKGNFLGGWVDSKTEKSDNGTQYGGYLFRKKNSLNEYDYYLGVSANKKLFRRKNGAVGQYERLEYYQPKSQTVYGNSYVGPDGYDHDKKELMEAIVSFVGSLGDRELYEELTSKDTPSAMLMILKETPSFYQQLLVDQKFASINSKVTKYLHDTILSLYRIPRSQDYVNAVFTLFTEPQKVIDDLCQEKVFTYFVVDDAEIEQAMKDEVKPFLLFKISNKDLSFADTYCKGLRKSRGTENLHTMYFKALMSGNQATIDIGTGEMFYRKSSISYDKPTHTANVPIKKKNPTNQAAESIFCYDLFKNRRFSVDKFGFHLSIIYNYLCQDKDVNKMMREYIHDHNDLHFIGIDRGERHLLYVTVIDSHGRIKEQFSLNEIKNEYKGNTYSTDYRGLLSKREADRQHERQSWNTIESIKELKQGYLSQVIHKIVTLMVKYNAVVVLEDLNMGFKRGRQKVESSVYQQFEKALIDKLNLLVDKKTDPEQLGGLLHAYQLTNKFTSFRDMRLQNGFLFYIPAWNTSKIDPVTGFVDLLHPRYESVEKAQAFLCKFKSIRYNQDKGWYEFTLNYNDFTTKAEGTRTEWTLCTHGTRVETFRNADKNSSWDSREVDLTKAYHELFEEFAISSNGNLKEAITQQDSKAFFERLMYLLNLTLQMRNSIIGTEVDYMISPVADENGNFYDSRTCGDELPQNADANGAYNIARKGLWVARQIQAAPVDAKVDLAITNKEWLNFAQSKPYLDD

SEQ ID NO: 180 - protein, 1296 aa, unidentified
  REGION 1..1296: note = Description of Unknown: uncultivated organism sequence
  REGION 1..1296: note = Category: MG28 effectors
  REGION 1..1296: note = Description: MG28-40 effector
MKAFENFTGLYPLSKTLRFELKPIGKTLEYIEKNGLLDRDRHRANSYVEVKKIIDRYHKQFIEDSLSDSEFELKYEDKGKKDSLEEYFYYYKLRNRDEKQKKDFDEIQKNLRKQIASQFKKQDRFKRIDKKELIKEDLLEFVDNNEKKLIDEFRDFTTYFTGFHENRQNMYSDEAKSTAIAYRLIHENLPKFIDNISVFERVAATDIADCFAQIYSDFEEYLNVNNISEIFRLDYYTEILTQTQIDVYNLIIGGRSEGDVKIKGLNEYINLYNQQQKDKSQRLPKLKPLFKQILSDRNAISWLPESFENDNALLESLENCYRSYNETSADKKSIFARFKELLLAMSDYETDKIFVRNDLQLTDISQKMFGNYNVISKALYEDLKSNTHRKSNKETDESFEERLRDIAKKQDSFSIGKIDSSLKEMYVEECKKSVCDYFANLSVDDKGHDIFDRIEKAYSEVKDLLNSPYPLDKNLAQEDTDIDKIKNLLESIKDLQKFVKPLCGKGNESGKDENFYGEFTVLYEELDKITPLYNMVRNYLTRKPYSTEKVKLFFENNGAVLNGWVDSKTENSDNGTQYGGYLFRRKNGIGEYDYYLGISSDVKLFRKDSVIAECDKSEFERLDYYQLKSQTFYGSAYKGNYELETQNVIKAIDNFISKNGDADISEKIISDRANKNSKTGTAKGYLNFIKNTSIYDDLLNDDIFKKANDQLINSLKKTLISFERLSTARKIANYNYYLFSDLMDAVDVLMQEKVFTYNAVSINEFENTINRDKKPLLLFKITNKDLSFADTFLSGKRKSRGVENLHTLYFKALMSGKQNVFDIGTGSVYFREKSIRYSEEKMKYGHHYDMLKDKFQYPIISNKRYVYDKFQFHLSMVQNYNGNKNLDINPLANDYIKKSDDLHVIGIDRGERHLLYLTVIDMKGNIKKQFSLNEIVNEYKGNTYRTNYHDLLDAREKKRDVERKSWKTIETIKELKEGYLSQVIHKITELMVEYNAIIVLEDLNLGFMRGRQKVEKSVYQKFEKMLIDKLNYLADKKKDPEELGGVLKAYQLSNNPKYKVIKQSAFLFYTQAWNTSKIDPVTGFVNLFDTHYENILKSKNFFSKFDLIKYNSDKDWFEFSFDYNNFTTKAEGTKTKWTLCTFGNRIISFRNPDNNMQWDGKEINLTEEFKLFFEKFGININSDLHTEILKQDKKDFFEGLLHLLKLTLQMRNSKTRTDIDYMQSPVADENGAFYNSDECGESLPENADANGAYNIARKGLMIIDKIKKSDNLNKIDLTISNKEWLVFAQNKPYLKN

SEQ ID NO: 181 - protein, 1303 aa, unidentified
  REGION 1..1303: note = Description of Unknown: uncultivated organism sequence
  REGION 1..1303: note = Category: MG28 effectors
  REGION 1..1303: note = Description: MG28-41 effector
MGKLKDFKRIYTLSKTLRFELRPIGKTLEHIEKSGILSQDQHRAESYVEVKKIIDEYHKAFIENVLKDFRFSENRGEKNSLEEFLVYYMCKSKDETQKRQFADIQDKLRKQITQRFSDDDRFKRIDKKELIKEDLLSFVEDVEKRQLIEEFKDFTTYFTGFHENRKNMYTDEAQSTAIAYRLIHENLPKFIDNIMVFDKVAASPIAEHFAKLYSDFEEYLNVSELGEMFRLDYYNIVLTQTQIDVYNAIVGGKTLEDGRKIQGLNEYINLYNQQQKDKSARLPKLKPLYKQILSDRNAISWLPEQFQSDEKVLEAIQKAYQDLEEQVFNRKKEGEHSLKDLLLSLSDYDLSKIYIRNDAQMNDLSQKAFGHWDVIHKALLEQLKEYVQKKPKKESDEAYEERLNKIIKSQGSIPIALINQGVQKQNSEEQNTLQTYFATLGAAETESVKKENLFTQIENAYAEVKDLLNTPYSGMNLAQDEESVKKIKSLLDAIKALQHFVKPLLGDGTESEKDEKFYGEFSMLWEELDKITPLYNMVRNYMTRKPYSTEKFKLHFENNGSLLNGWVDSKTEKSDNGTQYGGYLFRKQNIIGEYDYYLGISSDTNLFRRDAVINDTDKSEFERLDYYQLKSQTVYGKSYQGDYNQESAQIISAIDSFVERTTNTNLKEKINQDRETKNPKTSTAKGYLNFLRKNSEIYDSIINDSAFVKANLQLIKSIKKTLCAFKRIPQAQKLAQKEFVLFVDLMNEIDEMVKEKVFTYVPISLKEFENSMERDKKPLFLFKISNKDISFAESYEKGLIKSRGTDNLHTMYFKALMNGNQNVFDIGTGVVYFRKHSIQYSDEKMKTGHHHNVLKDKFKYPIISNKRYVYDQFQFHLSIEQNYLAGKIGDFEMNRRVNEYIRQSDDLHIIGIDRGERHLLYLTVIDLQGRIKEQYSLNEIVNTYNGNEYRTNYHDLLSKREDERMKARQSWQTIENIKELKEGYLSQVIHKISELIVKYNAIVVLEDLNMGFMRGRQKVESSVYQKFEKMLIDKLNYLVDKKKNPEEDGGVLNAYQLTNKFESFQKLGKQSGFLFYTQAWNTSKIDPVTGFVNLFDTRYETREKAKTFFGKFDAIRYNTAKDWFEFAFDYSEFTSKAEGSRTNWTLCTYGERIETFRDEKQNSNWATRKINLTDKFKELFEKHKIDIQADLKEAISQQDSADFFKGLLYLLKLTLQMRNSEIGTEIDYMQSPVADANGNFYNSDTCDDSLPKNADANGAYNIARKGLWIVQQIKAADDLKNVKLSISNKEWLKFAQEKPYLNE

SEQ ID NO: 182 - protein, 1261 aa, unidentified
  REGION 1..1261: note = Description of Unknown: uncultivated organism sequence
  REGION 1..1261: note = Category: MG28 effectors
  REGION 1..1261: note = Description: MG28-42 effector
MSNFNEFTHLYQLSKTLRFELKPIGETLKHFNESGILDQDEHRAESYKKVKKLIDRYHKEFMEEALRDFVFQMDDEGKNNSLSEYFFLYSLGKRTEAQDNDFKEIKKNLREQIAKYFKASPKYKNLFKQELIKEDLCNNMQCNEEEQKLVEEFHNFTTYFTGFHENRKNMYSNEEKSTAIAFRLVHQNLPKFIDNIGAFDRARNIDEIKAGIKNLQKHFETKGLLKQGEKIEDFFALDYYSRLAVQSRIDIYNAILGGRATEKGEKIQGLNEYINLYNQQHKEARLPKMKALFKQILSDRQAISWIEESFKSDNEVLSSVNDFYENLKQNEIFDRTKELLTSVGSYDLSKVYITNDQQLTSISQQLYGSWAVIENAILADMQKDIPRKKKEDSEKYNERLKKAYSNKGSFSIAYIDQCLEAVFGEKHIPVEQHFTKRGEAEIETEAECGKIKIPDVFTQIEQTYSAAKTLLCNPYPKGKHLSQSDEDIEKVKNLLDALKRFQHFIKPLTGSGDEAEKDEMFYSDLTELWAEIDQLNSLYNRVRNHLTGKPYSEEKLKLNFENASLLTGWDKNMERANTAVILRKGKLYYLAIMKKEHNSIFASDNLPDKGECYEKMVYKQIALPLGFGGFARKCFGSATKLGWTYPTNLLNKEGKIIIKDEEAKDVLPELIDCYKDFLNIYEKDGFKYSSYNFKFKPSNQYEKLSQFFAEIQQQGYKITFQNISSDYIDQLVNEGKLYLFQIYNKDFSPSSKGTPNMHTLYWQMLFDERNLNDGVYQLNGQAEVFFRKKSLNYTKPTHPANQAIANKNPFKKKDKSEFTYDLIKDKRFTMDKFLFHVPITINFKSSKTYDIDAKVRQWLQKADDVHIIGIDRGERHLLYLTVIDCKGNIKEQMSLNTIENEYKGNTYAFDYHKRLDEKEKERDEARKNWKTVENIKELKEGYLSQAIHKITQLMLKYNAIIVLEDLNMGFMSGRQKVEKQVYQKFEKMLIDKLNYLADKKKDPSEVGGVLNAYQLTSKFESFTKLGRQSGFLFYIPAWNTSKIDPVTGFVNLFDTRYKNIDEAKKFFGSFKSISYNKDKNWFEFSFDYNDFTNKAEGTKTQWTVCTNGERIENFRSGENLNQWSGRKIVLSQEFKTLFDRYGIDFTKDLQNDICSQSDTGFFEQLLRLFKLTLQMRNSISNTETDYLISPVYDRNGNFYDSRNNRKDLPNNADANGAYNIARKGLMILNQIKQTSDLKKPKYDLTNKAWLNFIQKGYANKD

SEQ ID NO: 183 - protein, 1244 aa, unidentified
  REGION 1..1244: note = Description of Unknown: uncultivated organism sequence
  REGION 1..1244: note = Category: MG28 effectors
  REGION 1..1244: note = Description: MG28-43 effector
MKTFNDLTGLYSLSKTLRFELKPVGKTKDNIETKGIIAQDEKRAEEYKKVKDIIDRYHKSFIDMCLAGLVLKTTSDGNNDSLKDYVALASKSNRDEKEDKDFDDVKTVLRKHIVDAFKKGNSYGDLFKKELIQNHLPDFVTDEQEKLMVENFSKFTTYFTGFNENRKNMYSDEKKSTAIAYRLIHENLPMFIDNIKSFAKITEQEDIDFIADVEHSFKEELKGKSITQMFCLENFTETLTQGQIELYNKIVGGRVEDSGVKKQGINEYVNLYNQQHKDARLPLLKPLYKMILSDRVALSWLPEEFATDEEMLAAINETHGNLKDVLADVRELLQNINNYDTKHIYIANDKGLTDISQQIFGQYDVYTSAIKAELRNNTNHSAKEKKNPELLEKRINDIFKASKSFSIEYLNSHVDSDKTIQSYYKELGAYDRNGEQRINLLSQIELAYVDAHDVLLGKHTNLNQSEDSIKKIKALLDAYKALQHFIKPLLGNGDEADKDNEFDAKLRAIWDELDIVTPLYDKVRNRLTRKPYSTEKIKLNFDNAQLLNGWDMNKEPDCTSVLLRKDGQYYLAIMDKKSNHAFDADELPCDGECYEKMEYKQMALPMGMGAFVRKCFGTAKALGWQCPRHLMTSDGKIIIKDEEAQKVLPELIDCYKSFLDIYEKDGFKYKTFNFKFKPSSEYEKLSHFFAEVPSQGYKCSFRNVSVSFINQLVDEGKLYLFQIWNKDFSEYSKGTPNMHTLYWKMLFDERNLANVVYKLNGQAEVFYRKRSLDLDKTTIHRANQPIANKNMQNEKRESTFCYDIVKNRRYTVDKFQFHVPITINFKATGSDNINASVLDVIRNNGIEHIIGIDRGERHLLYLSLIDMKGNIVKQMTLNDIINEYKGNTYTTNYKELLQAREGDRKEARQNWQKIENIKELKEGYLSQVVHVITKMMVEYKAIVVLEDLNGGFMRGRQKIERQVYEKFEKMLIDKLNYYVDKQKDVNDNGGLLHAYQLASKFDTFKKLGKQSGCLFYIPAWNSSKIDPVTGFVNMLDTRYENADKARNFFSKFKSISYNADKDWFEFVIDDYSKFTDKAKDTRTDWVLCTYGTRIKTFRNPEKLNQWDNKEIVLTDEFKKVFMEAGIDINGNLKEAICTLTEKKHLESLMQLMKLLVQMRNSETNSEVDYLLSPVADTEGHFYDSRNCDDNLPKDADANGAYNIARKGLWAVMKIKASKPQENLKLGISNKEWLQFAQEKPYLND

SEQ ID NO: 184 - protein, 1264 aa, unidentified
  REGION 1..1264: note = Description of Unknown: uncultivated organism sequence
  REGION 1..1264: note = Category: MG28 effectors
  REGION 1..1264: note = Description: MG28-44 effector
MFKLLPDITGIVFFYRDSWRGYEEVITVDVVFYIGGNVMANSLSGFTGLYSLSKTLRFELRPVGKTKENMKIKGLLSEDEHRAKSYKQVKKIADDYHRKFIENALKNVHLEGVEEYAELYCKRNKTEKERKEIDKAADNLRKQVIKLMTTRDEFKKLGKKDFIEEMLPEFVDSEEKKKLIKEFKGFTTYFGGFFENRNNMYSAEKKSTSIGYRVIDQNLPKYIDNVNALKKILEVNPGNMIENIENDFMDMLEGKALNEFISLDNYSYFITQSGIDKYNTVIGGKSCDERTRIKGINEYVNLYNQKADKKIGILKPLYKQILSDKDSKSFLPESFERDNELLNAIELFNAGQKENIESIKGLFEQLSEYEADHIYVKDIFLSEISNELFSEWGYIKGRLEDKYDEEYTGKKKANTEKYIEERKKYFKNKRSYSLSELDAVLENNAVTSYFSGEQLKQAIINMADSYKDIEDLVNTDYPSDRKLQKDKESTKLIKGYLDACKDFGRFIQPLLGDGKESEKDAAFYGKFTPAWEAFDSITPLYNKVRNYMTKKPYSTEKVKLNFENQTLLAGWDLNKEEGNKSLIFIKDNNYYLGIMDKQHNKIFRDVEEAKSEPYYRKMEYKLLPGANKMLPKVFFAKSNIDFFNPSNKILEDYNAGRHKKGDNFDIKACHALIDFFKEAIEKHQEWRQFEFEFSPTETYKDISDFYREVEAQGYKISFKNISEKYIDELVDEGKLYLFKIWNKDFSPHSKGTPNLHTLYWKMIFDEKNLQDVVYKLNGEAEVFFRKASIDEKDIIKHEANKPIENKNKLNDKKKSVFNYDLIKDRRYTVDKFQFHVPITLNFKALGRDNIDRYAREYIKEAKDLHIIGIDRGERHLLYLTVIDMDGNIKEQYSLNEIVNEYNGKEHHINYHDLLDKREKEMERAKKEWQTIESIKELKEGYISQVIYKISQLMIKYNAILVLENLNEGFINGRKKVGKQVYQKFEKMMIDKLNYLVDKNLEEGEAGGLLKAYQLASKFESFKKLGKQSGMMFYIPAWNTSNIDPCTGFVNLFERKHLKYSSVNAAVDFWSKFESIAYDDKGEYFKFSFDYSRFTGRAEGTKTDWTVCSVGERIVNFRNPDNNSQWDSKTVDPTAEIIELCRGYDIDYKSEDLKTEFVSVKDRRFHEELLRLFRLVLQMRNSVTGTEIDYMISPVANAEGVFYDSRNCKKNLPENADANGAYNIARKGLWIINRIKETKEAELNKVNLNISNKEWLNFAQKNILR

SEQ ID NO: 185 - protein, 1228 aa, unidentified
  REGION 1..1228: note = Description of Unknown: uncultivated organism sequence
  REGION 1..1228: note = Category: MG28 effectors
  REGION 1..1228: note = Description: MG28-45 effector
MRQKYDGFESCYGISKVIRTGLIPQGATLEHIEKKGLLLLEAKRAEDYTKVKKIIDRYHRKYIDNQLKDAELSGVEESYSLYCKTNRTEKENTDLKKDLEKLRKQVSNFLTSSAEFKRIDKKELIEKDLLNFVQGDEEEEELVKSFKGFTTYFKGFHENRKNMYSHEEKSTAIAYRVINQNMFRYFDNIRSISKFILANSEKNIAELESIYSDKLNGKTLKEFFSVDNYSFFISQSGIDTYNMIIGGYSVDERTKVKGINEYINLFNQENHEKFGTLKPLYKQILAERTTESFLPEKFENDKEVIESLAAFSHNMSDTLLEIMEVFGKIGEYDASGIYLKYDSLKDISTCVFSDWSAITNALWERYDVQYIGKKKKETKAYIEEKRKHFKNLKSVSADEINTAMGENVLIPYSDAAKSLFEKICVAEENIRELINLDYPDDKELSKDKAAVKDIKAYLDSVKALQHHMKPLLGNQDESGKNEFFYGDFSGLWDELDALTPLYNKVRNYVTKKPYSTEKIKLNFDNSTLLNGWDLNKEEANTAILMQREGFLYLGIMDKKHNKIFRNIENTGCEDCYQKMEYKLLPGANKMLPKVFFSKKGIESFKPPLEILEIYKNETFKKGDAFNIDDCHTIIDFYKKALNEHEDWKKFEFKFSKTKDYRDISEFYREVEAQGYKISFKAIPKKIIDEYVEKGWLYLFKIWNKDFSEYSKGTPNLHTLYLKMLFDPRNLENVVYKLNGEAEIFYRKASIQPKDIIKHPANEAIKNKNPLNKKQSSIFKYDLIKDRRYTVDKFEFHVPITLNFKARGKENINTEVREYIKRSKNLYVIGVDRGERNLLYVSVVDADGSIVEQYSLNDIVNEYKGVQYRTDYHALLDTKEKNRDKARKEWTEIQNIKELKEGYISQVVHKICELMMKYEAIIALEDLNGGFKNSRKKVEKQVYQKFEKMLIEKLNYLVDKKADVNEPSGLLHALQLTSKFEGFNKLFGQSGFVFYVPAWNTSNIDPCTGFTNLFFSKDLRYASVENSLEFWKKFDSVAYDDTKDIFSFTFDYNNFNQRAEEIKSKSKWTVYSYGDRLETFRNADLNQQYDSREVKLTEAFKELFKKYEIPHENCEIKENILNCKERDFHDKLLHLFKLTLQLRNSKTGTMIDYMTSPVMDIDGNFFDSRTASSSLPQDADANGAYNIARKGLWLIEKLKNTKDADLPKAKLAIKNAEWLAYAQRNENNG

SEQ ID NO: 186 - protein, 1242 aa, unidentified
  REGION 1..1242: note = Description of Unknown: uncultivated organism sequence
  REGION 1..1242: note = Category: MG28 effectors
  REGION 1..1242: note = Description: MG28-46 effector
MNTYEELTGSYSLTKTISLALNPIGETLRHIEEKGFIAQDEQRAEDYKKVKDIIDRYHKYFITMCLDGFKFSTDKLMKYVALAENAKRDEDAFDEVKTQLRKEIVAAFEKGETYKDLFKKELILEHLPNFVTDENEKRLVASFNKFTTYFTGFHENRENMYSDEAKSTAIAHRLIHENLPMFYDNMKSFKKIAACEDCIDFAEFEAAFSEEFKEFKVEHLTDIFQLEYFNNTLTQRKIDFYKLVIGGKVLEDGTKLKGVNEYVNLYNQQHKDARLPLLKPLYKMILSDKVALSWLPEEFKSDEEMVEAIQEMHKNLKGALTDNAENNLRDLLLNMDKYDLAHIYIANDLGLTDISQNIFGQYDVYTSALKQALRNEYAPTPKERRNPELYDERINKLFKSRTSFSIAELNSLADSDHTIENHFKQLGAAERNGKQEIDLFSQIETAYAKASDILSGKHGNIGQSEAETALVKNLLDAYKSLQHFIKPLLGHGDEAEKDNEFDAKLRAAWDALDIINPLYNKVRNWLTRKPYSTEKIKLNFENAQLLNGWDKNKETDCTSVLLRKDGMYYLAIMNKKANHAFACDELPADGDCYEKIDYKQIALPMGLGAFVRKCGKTAEKLGWSCPEKLKNKDKKIITNDAEAEGVLPDLIDCYKAFLNTYEKDGFKYKDFNFKFKPSSEYSSLVEFFAEVPSQGYKIAFRKVSVAYINQLVESGKLYLFQIWNKDFSKFSKGTPNMHTLYWKQLFDERNLADVVYKLNGQAEVFYRKRSLKLEETTVHQAHQPIPNKNKQNEKRQSQFNYDIVKNRRFTVDKFQFHVPITLNFKATGRGNINDKVLEIIRNNGIKHVIGIDRGERHLLYLSLIDLKGNIIKQMTLNDIVNEYRGHTYATNYKDLLAEREDNRTEARRNWKKIDNIKEIKQGYLAQVVHIISKMMVEYKAIVILEDLNMGFMRGRQKIERSVYEQFEKSLIEKLNYYVDKQKDEEEVGGLLHALQLTSKFKSFKELGKQSGCLFYVPAWNTSKIDPVTGFVNLFDTKYVNVEKARAFFSNFDAIRYNAEKDWFEFAFNYSNFTDKAKDTREKWTLCTHGTSIRTFRNPSKLNQWDSEEVVLTDEFKKVFEKAGIDICGNLKNAICALKEKAHLEKLMQLMKLLLQMRNSKPNTEVDYMISPVADEQGNFYDSRCGNSALPDNADANGAYNIARKGLWVIKQIRETPAGKRPKLAIKNKEWLKFAQQKPYLDD

SEQ ID NO: 187 - protein, 1242 aa, unidentified
  REGION 1..1242: note = Description of Unknown: uncultivated organism sequence
  REGION 1..1242: note = Category: MG28 effectors
  REGION 1..1242: note = Description: MG28-47 effector
MNTYEELTGSYPLIKTINFALNPIGETLRHIEEKGFIAQDEQRAEDYKKVKDIIDRYHKYFITMCLDGFKFSTDNLMKYVALAEDAKRDKKAFDEVKAQLRKEIVGAFSKNKIYGDLFGEKLIKQHLPNFVTDENEKRLVASFNKFTTYFTGFHENRENMYSDEAKSTAIAYRLIHENLPMFYDNMKSFKKIAACEDCIDFAEFEAAFSEEFKAFKVEHLADIFQLEYFNNTLTQRKIDFYKLVIGGKVLEDGTKLKGVNEYVNLYNQQHKDARLPLLKPLYKMILSDKVALSWLPEEFESDEEMVEAIQEMHKNLKGALTDNAENNLRDLLLNMDKYDLAHIYIANDLGLTDISQNIFGQYDVYTSALKQALRNEYAPTPKERRNPELYDERINKLFKSRTSFSIAELNSLADCDHTIENHFKQLGAAERNGKQEIDLFSQIETAYAKASDILSGKYGNIGQSEAETALVKNLLDAYKSLQHFIKPLLGHGDEAEKDNEFDAKLRAAWDALDIINPLYNKVRNWLTRKPYSTEKIKLNFENAQLLNGWDKNKETDCTSVLLRKDGMYYLAIMNKKANHAFACDELPSDGDCYEKIDYKQIALRMGLGAFVRRCGKTAEKLGWSCPERLKNKDKKIITNDAEAEGVLPDLIDCYKAFLNTYEKDGFKYKDFNFKFKPSSEYSSLVEFFAEVPSQGYKIAFRKVSVAYINQLVESGKLYLFQIWNKDFSKFSKGTPNMHTLYWKQLFDERNLADVVYKLNGKAEVFYRKRSLKLEETTVHQAHQPISNKNKQNEKRQSQFNYDIVKNRRFTVDKFQFHVPITLNFKATGRGDINDKVLEIIRNNGIKHVIGIDRGERHLLYLSLIDLKGNIIKQMTLNDIVNEYRGHTYTTNYKDLLAEREDNRTEARRNWKKIDNIKEIKQGYLAQVVHIISKMMVEYKAIVILEDLNMGFMRRWQKIERSVYEQFEKSLIEKLNYYVDKQKDENEVGGLLHAFQLTSKFKSFKELGKQSGCLFYVPAWNTSKIDPVTGFVNLFDTKNVKGEKVRAFFSNFDAIRYNAERDWFEFAFNYSNFTNKARDTREEWTLCTHGTSIRTFRNPSKINHRDSEEVVLTDEFKKVFEKAGIDICGNLKNAICALKEKAHLEKLMQLMKLLLQMRNSKPNTEVDYMISPVADEQGNFYDSRCGNSALPDNADANGAYNIARKGLWVIKQIRETPAGKRPDWAIKNKEWLKFAQQKPYLDD

SEQ ID NO: 188 - protein, 1242 aa, unidentified
  REGION 1..1242: note = Description of Unknown: uncultivated organism sequence
  REGION 1..1242: note = Category: MG28 effectors
  REGION 1..1242: note = Description: MG28-48 effector
MNTYEELTGSYPLIKTINLALNPIGETLRHIEEKGFIAQDEQRAEDYKKVKDIIDRYHKYFITMCLDGFKFSTDKLMKYVALAENAKRDEDAFDEVKPQLRKEIVAAFEKGETYKDLFKKELILEHLPNFVTDENEKRLVASFNKFTTYFMGLHENRENMYSDEAKSTAIAHRLIHENLPMFYDNMKSFKKIAACEDCIDLAEFEAAFSEEFKEFKVEHLADIFQLEYFNNTLTQRKIDFYKLVIGGKVLEDGTKLKGVNEYVNLYNQQHKDARLPLLKPLYKMILSDKVALSWLPEEFKSDEEMMEAILEMHKNLKGALTDNAENNLRDLLLNMDKYDLAHIYIANDLGLTDISQNIFGQYDFYTSALKQALRNEYAPIPKERRNPELYDERINKLFKSRTSFSIAELNSLADCDHTIENHFKQLGAAERNGKQKIDLFSQIETAYAKASDILSGKHGNIGQSEAETALVKNLLDAYKSLQHFIKPLLGHGDEAEKDNEFDAKLRAAWDALDIINPLYNKVRNWLTRKPYSTEKIKLNFENAELLKGWDKNKETVNTSVLLRKDGMYYLAIMNEKAKNAFACDELPSDGDCYEKIDYKQIALRMGLGAFVRRCGKTAEKLGWSCPENLKNKDKKIITNDAEAEGVLPDLIDCYKAFLNTYEKDGFKYKDFNFKFKPSSEYSSLVEFFAEVPSQGYKIAFRKVSIAYINQLVESGNLYLFQIWNKDFSKFSKGTPNMHTLYWKQLFDERNLADVVYKLNGKAEVFYRKRSLKLEETTVHQAHQPISNKNKQNEKRQSQFNYDIVKNRRFTVDKFQFHVPITLNFKATGRGDINDKVLEIIRNNGIKHVIGIDRGERHLLYLSLIDLKGNIIKQMTLNDIVNEYRGHTYTTNYKDLLAEREDNRTEARRNWKKIDNIKEIKQGYLAQVVHIISKMMVEYKAIVILEDLNMGFMRRWQKIERSVYEQFEKSLIEKLNYYVDKQKDENEVGGLLHAFQLTSKFKSFKELGKQSGCLFYVPAWNTSKIDPVTGFVNLFDTKNVKGEKVRAFFSNFDAIRYNAERDWFEFAFNYSNFTNKARDTREEWTLCTHGTSIRTFRNPSKINHRDSEEVVLTDEFKKVFEKAGIDICGNLKNAICALKEKAHLEKLMQLMKLLLQMRNSKPNTEVDYMISPVADEQGNFYDSRCGNSALPDNADANGAYNIARKGLWVIKQIRETPAGKRPDWAIKNKEWLKFAQQKPYLDD

SEQ ID NO: 189 - protein, 1242 aa, unidentified
  REGION 1..1242: note = Description of Unknown: uncultivated organism sequence
  REGION 1..1242: note = Category: MG28 effectors
  REGION 1..1242: note = Description: MG28-49 effector
MNTYEELTGLYSFKKTISLALNPIGETLRHIEEKGFIAQDEQRAEDYKKVKDIIDRYHKYFITMCLDVFKFSTDKLMKYVALAENAKRDEDAFDEVKTQLRKEIVGAFSKNKTYGDLFGEKLIKQHLPNFVTDENEKRLVASFNEFTTYFEKFHKCRENMYSDEAKSTAIAHRLIHENLPMFYDNMKSFKKIAACEDCIDFAEFEAAFSEEFKEFKVEHLADIFQLEYFNNTLTQRKIDFYKLVIGGKVLEDGTKLKGVNEYVNLYNQQHKDARLPLLKPLYKMILSDKVALSWLPEKFESDEEMVEAIQEMHKNLKGTLIDNAENNLRDLLLNMGKYDLAHIYIANDLGLRDISQSIFGQYDVYTSAIKQALRNEYAPIPKERRNPELYDERINKLFKLRTSFSIAELNSLADSDHTIENHFKQLGAAERNGKQEIDLFSQIETAYAKASDILSGKHGNIGQSEAETALVKNLLDAYKSLQHFIKPLLGHGDEAEKDNEFDAKLRAAWDALDIINPLYNKVRNWLTRKPYSTEKIKLNFENAQLLNGWDKNKETDCTSVLLRKDGMYYLAIMNKKANHAFACDELPADGDCYEKIDYKQIALPMGLGAFVRKCGKTAEKLGWSCPEKLKNKDKKIITNDAEAEGVLPDLIDCYKAFLNTYEKDGFKYKDFNFKFKPSSEYSSLVEFFAEVPSQGYKIAFRKVSLAYINQLVESGKLYLFQIWNKDFSKFSKGTPNMHTLYWKQLFDERNLADVVYKLNGQAEVFYRKRSLKLEETTVHQAHQPILNKNKQNEKRQSQFNYDIVKNRRFTVDKFQFHVPITLNFKATGRGNINDKVLEIIRNNGIKHVIGIDRGERHLLYLSLIDLKGNIIKQMTLNDIVNEYRGHTYATNYKDLLAEREDNRTEARRNWKKIDNIKEIKQGYLAQVVHIISKMMVEYKAIVILEDLNMGFMRGRQKIERSVYEQFEKSLIEKLNYYVDKQKDEEEVGGLLHALQLTSKFKSFKELGKQSGCLFYVPAWNTSKIDPVTGFVNLFDTKYVNVEKARAFFSNFDAIRYNAEKDWFEFAFNYSNFTDKAKDTREEWTLCTHGTSIRTFRNPSKLNQWDSEEVVLTDEFKKVFEKAGIDICGNLKNAICALKEKAHLEKLMQLMKLLLQMRNSKPNTEVDYMISPVADEQGNFYDSRCGNSALPDNADANGAYNIARKGLWVIKQIRETPAGKRPKLAIKNKEWLKFAQQKPYLDD

SEQ ID NO: 190 - protein, 1244 aa, unidentified
  REGION 1..1244: note = Description of Unknown: uncultivated organism sequence
  REGION 1..1244: note = Category: MG28 effectors
  REGION 1..1244: note = Description: MG28-50 effector
MKTFNDLTGLYSLSKTLRFELKPVGKTKDNIETKGIIAQDEKRAEEYKKVKDIIDRYHKSFIDMCLAGLVLKTTSDGNNDSLKDYVALASKSNRDEKEDKDFDDVKTVLRKHIVDAFKKGNSYGDLFKKELIQNHLPDFVTDEQEKLMVENFSKFTTYFTGFNENRKNMYSDEKKSTAIAYRLIHENLPMFIDNIKSFAKITEQEDIDFIADVEHSFKEELKGKSITQMFCLENFTETLTQGQIELYNKIVGGRVEDSGVKKQGINEYVNLYNQQHKDARLPLLKPLYKMILSDRVALSWLPEELATDEEMLAAINETHGNLKDVLADVRELLQNINNYDTKHIYIANDKGLTDISQQIFGQYDVYTSAIKAELRNNTNHSAKEKKNPELLEKRINDIFKASKSFSIEYLNSHVDSDKTIQSYYKELGAYDRNGEQRINLLSQIELAYVDAHDVLLGKHTNLNQSEDSIKKIKALLDAYKALQHFIKPLLGNGDEADKDNEFDAKLRAIWDDLDIVTPLYDKVRNRLTRKPYSTEKIKLNFDNAQLLNGWDMNKEPDCTSVLLRKDGQYYLAIMDKKSNHAFDADELPCDGECYEKMEYKQMALPMGMGAFVRKCFGTAKALGWQCPRHLMTSDGKIIIKDEEAQKVLPELIDCYKSFLDIYEKDGFKYKTFNFKFKPSSEYEKLSHFFAEVPSQGYKCSFRNVSVSFINQLVDEGKLYLFQIWNKDFSEYSKGTPNMHTLYWKMLFDERNLANVVYKLNGQAEVFYRKRSLDLDKTTIHRANQPIANKNMQNEKRESTFCYDIVKNRRYTVDKFQFHVPITINFKATGSDNINASVLDVIRNNGIEHIIGIDRGERHLLYLSLIDMKGNIVKQMTLNDIINEYKGNTYTTNYKELLQAREGDRKEARQNWQKIENIKELKEGYLSQVVHVITKMMVEYKAIVVLEDLNGGFMRGRQKIERQVYEKFEKMLIDKLNYYVDKQRDANENGGLLHAYQLASKFDTFKKLGKQSGCLFYIPAWNTSKIDPVTGFVNMFDTRYENADKTRNFFSKFKSISYNADKDWFEFVIGDYSKFTDKAKDTRTDWVLCTYGTRIKTFRNPEKLNQWDNKEIVLTDEFKKVFMEAGIDINGNLKEAICTLTEKKHLESLMQLMKLLVQMRNSETNSEVDYLLSPVADTEGHFYDSRNCGDNLPKDADANGAYNIARKGLWAVMKIKASKPQENLKLGISNKEWLQFAQEKPYLND

SEQ ID NO: 191 - protein, 1226 aa, unidentified
  REGION 1..1226: note = Description of Unknown: uncultivated organism sequence
  REGION 1..1226: note = Category: MG28 effectors
  REGION 1..1226: note = Description: MG28-51 effector
MRQKYDGFESCYGISKVIRTGLIPQGATLEHIEKKGLLLSEEKRAEDYTKVKKIIDRYHRKYIDNQLKDAELSGVEESYSLYCKTNRTEKENTDLKKFLEKLRKQVSNFLTSSDEFKRIDKKELIEKDLLNFVQGDEEEEELVKSFKGFTTYFKGFHENRKNMYSHEEKSTAIAYRVINQNMFRYFDNIRSISKFILANSENNIAELESIYSDKLKGKTLEEFFSVDNYSFFISQSGIDTYNMIIGGYSVDERTKVKGINEYINLFNQENHEKFGTLKPLYKQILAERTTESFLPEKFENDKEVIESLAAFSHNMSDTLLEIMEVFGKIGEYDASGIYLKYDSLKDISTCVFSDWSAITNALWERYDVQYIGKKKKETKAYIEEKRKHFKNLKSVSADEINTAMGENVLIPYSDAAKSLFEKICVAEENIRELINLDYPDDKELSKDKAAVKDIKAYLDSVKALQHHMKPLLGNQDESGKNEFFYGDFSGLWDELDALTPLYNKVRNYVTKKPYSTEKIKLNFDNSTLLNGWDLNKEEANTAILMQREGFLYLGIMDKKHNKIFRNIENTGCEDCYQKMEYKLLPGANKMLPKVFFSKKGIESFKPPLEILEIYKNETFKKGDAFNIDDCHTIIDFYKKALNEHEDWKKFEFKFSKTKDYRDISEFYREVEAQGYKISFKAIPKKIIDEYVEKGWLYLFKIWNKDFSEYSKGTPNLHTLYLKMLFDPRNLENVVYKLNGEAEIFYRKASIQPKDIIKHPANEAIKNKNPLNKKQSSIFKYDLIKDRRYTVDKFEFHVPITLNFKARGKENINTEVREYIKRSKNLYVIGVDRGERNLLYVSVVDADGSIVEQYSLNDIVNEYKGVQYRTDYHALLDTKEKNRDKARKEWTEIQNIKELKEGYISQVVHKICELMMKYEAIIALEDLNGGFKNSRKKVEKQVYQKFEKMLIEKLNYLVDKKADVNEPSGLLHALQLTSKFEGFNKLFGQSGFVFYVPAWNTSNIDPCTGFTNLFFSKDLRYSGVENSLEFWKRFDSVAYDDRKDMFAFAFDYNNFNQRAEGSKSKWTVYSYGDRLETFRNPDLNQQYDSREVKLTEAFKELFKKYGISYKSCEIKENILNCKERGFHEKLLHLFKLTLQLRNSKTGTMIDYMTSSVMSVDGNFFDSRTASSKLPQDADANGAYNIARKGLWLIEKLKNTKDADLPKAKLAIKNAEWLAYAQRNENNG

SEQ ID NO: 192 - protein, 1242 aa, unidentified
  REGION 1..1242: note = Description of Unknown: uncultivated organism sequence
  REGION 1..1242: note = Category: MG28 effectors
  REGION 1..1242: note = Description: MG28-52 effector
MNTYEELTGSYSLIKTINFALNPIGETLRHIEEKGFIAQDEQRAEDYKKVKDIIDRYHKYFITMCLDGFKFSTDNLMKYVALAENAKRDEGAFNEVKTQLRKEIVAAFEKGETYKDLFKKELILEHLPNFVTDENEKRLVASFNKFTTYFMGLHENRENMYSDEAKSTAIAHRLIHENLPMFYDNMKSFKKIAACEDCIDLAEFEAAFSEEFKEFKVEHLADIFQLEYFNNTLTQRKIDFYKLVIGGKVLEDGTKLKGVNEYVNLYNQQHKDARLPLLKPLYKMILSDKVALSWLPEEFKSDEEMVEAILEMHKNLKGALTDNAENNLRDLLLNMDKYDLAHIYIANDLGLTDISQNIFGQYDFYTSALKQALRNEYAPIPKERRNPELYDERINKLFKSRTSFSIAELNSLADCDHTIENHFKQLGAAERNGKQEIDLFSQIETAYAKASDILSGKHGNIGQSEAETALVKNLLDAYKSLQHFIKPLLGHGDEAEKDNEFDAKLRAAWDALDIINPLYNKVRNWLTRKPYSTEKIKLNFENAELLKGWDKNKETVNTSVLLRKDGMYYLAIMNEKAKNAFACDELPSDGDCYEKIDYKQIALRMGLGAFVRRCGKTAEKLGWSCPENLKNKDKKIITNDAEAEGVLPDLIDCYKAFLNTYEKDGFKYKDFNFKFKPSSEYSSLVEFFAEVPSQGYKIAFRKVSVAYINQLVESGNLYLFQIWNKDFSKFSKGTPNMHTLYWKQLFDERNLADVVYKLNGKAEVFYRKRSLKLEETTVHQAHQPISNKNKQNEKRQSQFNYDIVKNRRFTVDKFQFHVPITLNFKATGRGDINDKVLEIIRNNGIKHVIGIDRGERHLLYLSLIDLKGNIIKQMTLNDIVNEYRGHTYTTNYKDLLAEREDNRTEARRNWKKIDNIKEIKQGYLAQVVHIISKMMVEYKAIVILEDLNMGFMRRWQKIERSVYEQFEKSLIEKLNYYVDKQKDENEVGGLLHAFQLTSKFKSFKELGKQSGCLFYVPAWNTSKIDPVTGFVNLFDTKNVKGEKVRAFFSNFDAIRYNAEKDWFEFAFNYSNFTDKAKDTREEWTLCTHGTSIRTFRNPSKLDHWDSEEVVLTDEFKKVFEKAGIDICGNLKNAICALKEKAHLEKLMQLMKLLLQMRNSKPKTEVDYMISPVADEQGNFYDSRCGNSALPDNADANGAYNIARKGLWVIKQIRETPAGKRPDWAIKNKEWLKFAQQKPYLDD

SEQ ID NO: 193 - protein, 1275 aa, unidentified
  REGION 1..1275: note = Description of Unknown: uncultivated organism sequence
  REGION 1..1275: note = Category: MG28 effectors
  REGION 1..1275: note = Description: MG28-53 effector
MEQFTNLYPVSKTLRFELIPDERTKDFLEHSDLINQDEHRAESYKAVKKIIDRYHKAFIDDVLSSLKLQYAKTGHLDSLEELYSLYISSQKIEKVQEQLRKQIVKALTQDSRFKRMGKKELIREDIFKAISLTSEEQKLVEEFHDFTTYFNGFHENRKNMYSAEAQSTAIAYRLIHENLPKFIDNIAIFQKILHSPVAENFPQLYKEMEEHLNVNSIEEMFMLDYYNEVLTQTQIEVYNAIIGGRTMQDGSKIQGINEYVNLYNQKQSARENRLPKLKPLFKQILSDRETMSWLPEEFSSDAELLEAVNDCYASLNDHVFTPLQDMLSCLSDFSLEGVFVPNDLSITDISQKLYGDWSVIKQTVISDLKTKNPPKRNEKPEKYEERISKLLKSTDSFSVAYLNGCLADKKGDICSYFCNLGAVNTTTEQKENLFLQIQNAYAEASELLSKEYPREKNLSQDKPNVEKLKALLDAIKSLQHFVKPLLGAGDEAGKDERFYGEMAILWEELSKVTQLYNKVRNRMTRKPYSTEKFKLTFNIKGNFLGGWVDSKTDRSDNGTQYGGYLFRRKNAINEYDYYLGMSANTKLFRRQANVEGTYERLDYYQPKSQTVYGNSYVGKNGYEADKQALLKSILTFVANTGNEELMQQVNSKDTPSAMLTVMKEASETFYEQLLEDTDFSAINKEVTDNLHKTILSMNRIPRVNDYKDVEFEVFTEPQQVIDDICKDKVFSYFPVSDDEMNQAMADANRPLLLFKISNKDLSYAEKHSKGLRQSRGAENLHTMYFKALMSGSQSVFDIGTGEVFFRRSSLNVSKPTHPQSTPIQNKNLEGCSSFNYDLIKDKRYTVDKFVFHLSMIQNYQTSGKADVNAMTRDFIHDHFDEMHFIGIDRGERHLLYVSVIDSKGNIKEQFSLNQIANEYRGNSYKTDYHSLLGKREETRQRERQSWRTIEGIKELKQGYLSQVVHKIVTLMVKYQAIVVLEDLNMGFKRGRQKVESSVYQQFEKALIDKLNYLVDKQQAPNDYGGLLKGYQLTNKFTSFRDMKRQNGFLFYIPAWNTSKIDPVTGFVDLLHPKYENVEKARTFFCKFKSIRYNSEKDRYEFTFDYNDFTTQADGTRTLWTICTHGERIETYRNPEKNSQWDSREVDLTESMTLLFSKYNISQHENLKEAIARQTEKQFFEKLIHLLRLMLQMRNSKTGTDVDYLISPVADENGCFFDSRSCDKTLPENADANGAYNIARKGLWIARQIQRTGVDAKSDLSITNKEWLKFAQFKDV

SEQ ID NO: 194 - protein, 1242 aa, unidentified
  REGION 1..1242: note = Description of Unknown: uncultivated organism sequence
  REGION 1..1242: note = Category: MG28 effectors
  REGION 1..1242: note = Description: MG28-54 effector
MNTYEELTGSYSLIKTINFALNPIGETLRHIEEKGFIAQDEQRAEDYKKVKDIIDRYHKYFITMCLDGFKFSTDKLMKYVALAENAKRDEGAFNEVKTQLRKEIVAAFEKGETYKDLFKKELILEHLPNFVTDENEKRLVASFNKFTTYFTGFHENRENMYSDEAKSTAIAYRLIHENLPMFYDNMKSFKKIAACEDCIDFAEFEAAFSEEFKEFKVEHLADIFQLEYFNNTLTQRKIDFYKLVIGGKVLEDGTKLKGVNEYVNLYNQQHKDARLPLLKPLYKMILSDKVALSWLPEEFKSDEEMVEAIQEMHKNLKGALTDNAENNLRDLLLNMDKYDLAHIYIANDLGLTDISQNIFGQYDVYTSAIKQALRNEYAPTPKERRNLELYDERINKLFKSRTSFSIAELNSLADCDHTIENHFKQLGAAERNGKQEIDLFSQIETAYAKASDILSGKHGNIGQSEAETALVKNLLDAYKSLQQFIKPLLGHGDEAEKDNEFDAKLRAAWDALDIINPLYNKVRNWLTRKPYSTEKIKLNFENAQLLNGWDKNKETDCTSVLLRKDGMYYLAIMNKKANHAFACDELPADGDCYEKIDYKQIALPMGLGAFVRKCGKTAEKLGWSCPEKLKNKDKKIITNDAEAEGVLPDLIDCYKAFLNTYEKDGFKYKDFNFKFKPSSEYSSLVEFFAEVPSQGYKIAFRKVSVAYINQLVESGKLYLFQIWNKDFSKFSKGTPNMHTLYWKQLFDERNLADVVCKLNGQAEVFYRKRSLKLEETTVHQAHQPIPNKNKQNEKRQSQFNYDIVKNRRFTVDKFQFHVPITLNFKATGRGNINDKVLEIIRNNGIKHVIGIDRGERHLLYLSLIDLKGNIIKQMTLNDIVNEYRGHTYATNYKDLLAEREDNRTEARRNWKKIDNIKEIKQGYLAQVVHIISKMMVEYKAIVILEDLNMGFMRGRQKIERSVYEQFEKSLIEKLNYYVDKQKDEEEVGGLLHALQLTSKFKSFKELGKQSGCLFYVPAWNTSKIDPVTGFVNLFDTKYVNVEKARAFFSNFDAIRYNAEKDWFEFAFNYSNFTDKAKDTREKWTLCTHGTSIRTFRNPSKLNQWDSEEVVLTDKFKKVFEKAGIDICGNLKNAICALKEKAHLEKLMQLMKLLLQMRNSKPNTEVDYMISPVADEQGNFYDSRCGNSALPDNADANGAYNIARKGLWVIKQIRETPAGKRPKLAIKNKEWLKFAQQKPYLDD

SEQ ID NO: 195 - protein, 1242 aa, unidentified
  REGION 1..1242: note = Description of Unknown: uncultivated organism sequence
  REGION 1..1242: note = Category: MG28 effectors
  REGION 1..1242: note = Description: MG28-55 effector
MNTYEELTGSYSLTKTISLALNPIGETLRHIEEKGFIAQDEQRAEDYKKVKDIIDRYHKYFITMCLDGFKFSTDKLMKYVALAENAKRDEDAFDEVKTQLRKEIVAAFEKGETYKDLFKKELILEHLPNFVTDENEKRLVASFNKFTTYFTGFHENRENMYSDEAKSTAIAHRLIHENLPMFYDNMKSFKKIAACEDCIDFAEFEAAFSEEFKEFKVEHLTDIFQLEYFNNTLTQRKIDFYKLVIGGKVLEDGTKLKGVNEYVNLYNQQHKDARLPLLKPLYKMILSDKVALSWLPEEFKSDEEMVEAIQEMHKNLKGALTDNAENNLRDLLLNMDKYDLAHIYIANDLGLTDISQNIFGQYDVYTSALKQALRNEYAPIPKERRNPELYDERINKLFKSRTSFSIAELNSLADCDHTIENHFKQLGAAERNGKQEIDLFSQIETAYAKASDILSGKHGNIGQSEAETALVKNLLDAYKSLQHFIKPLLGHGDEAEKDNEFDAKLRAAWDALDIINPLYNKVRNWLTRKPYSTEKIKLNFENAQLLNGWDKNKETDCTSVLLRKDGMYYLAIMNKKANHAFACDELPADGDCYEKIDYKQIALPMGLGAFVRKCGKTAEKLGWSCPERLKNKDKKIITNDAEAEGVLPDLIDCYKAFLNTYEKDGFKYKDFNFKFKPSSEYSSLVEFFAEVPSQGYKIAFRKVSVAYINQLVESGKLYLFQIWNKDFSKFSKGTPNMHTLYWKQLFDERNLADVVYKLNGQAEVFYRKRSLKLEETTVHQAHQPIPNKNKQNEKRQSQFNYDIVKNRRFTVDKFQFHVPITLNFKATGRGNINDKVLEIIRNNGIKHVIGIDRGERHLLYLSLIDLKGNIIKQMTLNDIVNEYRGHTYATNYKDLLAEREDNRTEARRNWKKIDNIKEIKQGYLAQVVHIISKMMVEYKAIVILEDLNMGFMRGRQKIERSVYEQFEKSLIEKLNYYVDKQKDEEEVGGLLHALQLTSKFKSFKELGKQSGCLFYVPVWNTSKIDPVTGFVNLFDTKYVNVEKARAFFSNFDAIRYNAEKDWFEFAFNYSNFTDKAKDTREKWTLCTHGTSIRTFRNPSKLNQWDSEEVVLTDEFKKVFEKAGIDICGNLKNAICALKEKAHLEKLMQLMKLLLQMRNSKPNTEVDYMISPVADEQGNFYDSRCGNSALPDNADANGAYNIARKGLWVIKQIRETPAGKRPKLAIKNKEWLKFAQQKPYLDD

SEQ ID NO: 196 - protein, 1240 aa, unidentified
  REGION 1..1240: note = Description of Unknown: uncultivated organism sequence
  REGION 1..1240: note = Category: MG28 effectors
  REGION 1..1240: note = Description: MG28-56 effector
MNTYEELTGSYSLTKTISLALNPIGETLRHIEEKGFIAQDEQRAEDYKKVKDIIDRYHKYFITMCLDRFKFSTDKLMKYVALAENAKRDEDAFDEVKTQLRKEIVVAFEKGETYKDLFKKELILEHLPNFVTDENEKRLVASFNKFTTYFTGFYENRENMYSDEVKSTAIAHRLIHENLPMFYDNMKSFKKIAACEDCIDFTEFEAAFSEEFKEFKVEHLADIFQLEYFNNTLTQRKIDFYKLVIGGKVLEDGTKLKGVNEYVNLYNQQHKDARLPLLKPLYKMILSDKVALSWLPEEFKSDEEMVEAIQEMHKNLKGALTDNAENNLRDLLLNMDKYDLAHIYIANDLDLTDISQNIFGQYDVYTSALKQALRNEYAPTPKERRNPELYDERINKLFKSRTSFSIAELNSLADSDHTIENHFKQLGAAERNGKQEIDLFSQIETAYAKASDILSGKHGNIGQSEAETALVKNLLDAYKSLQHFIKPLLGHGDEAEKDNEFDAKLRAAWDALDIINPLYNKVRNWLTRKPYSTEKIKLNFENAQLLNGWDKNKETDCTSVLLRKDGMYYLAIMNKKANHAFACDELPADGDCYEKIDYKQIALPMGLGAFVRKCGKTAEKLGWSCPEKLKNKDKKIITNDAEAEGVLPDLIDCYKAFLNTYEKDGFKYKDFKFKPSSEYSSLVEFFAEVPSQGYKIAFRKVSVAYINQLVESGKLYLFQIWNKDFSKFSKGTPNMHTLYWKQLFDERNLADVVYKLNGQAEVFYRKRSLKLEETTVHQAHQPIPNKNKQNEKRQSQFNYDIVKNRRFTVDKFQFHVPITLNFKATGRGNINDKVLEIIRNNGIKHVIGIDRGERHLLYLSLIDLKGNIIKQMTLNDIVNEYRGHTYATNYKDLLAEREDNRTEARRNWKKIDNIKEIKQGYLAQVVHIISKMMVEYKAIVILEDLNMGFMRGRQKIERSVYEQFEKSLIEKLNYYVDKQKDEEEVGGLLHALQLTSKFKSFKELGKQSGCLFYVPAWNTSKIDPVTGFVNLFDTKYVNVEKARAFFSNFDAIRYNAEKDWFEFAFNYSNFTDKAKDTREKWTLCTHGTSIRTFRNPSKLNQWDSEEVVLTDEFKKVFEKAGIDICGNLKNAICALKEKAHLEKLMQLMKLLLQMRNSKPNTEVDYMISPVADEQGNFYDSRCGNSALPDNADANGAYNIARKGLWVIKQIRETPAGKRPKLAIKNKEWLKFAQQKPYLDD

SEQ ID NO: 197 - protein, 1271 aa, unidentified
  REGION 1..1271: note = Description of Unknown: uncultivated organism sequence
  REGION 1..1271: note = Category: MG28 effectors
  REGION 1..1271: note = Description: MG28-57 effector
MEQFTNLYPVSKTLRFELIPDERTKDFLEHSDLINQDEHRAESYKAVKKIIDRYHKAFIDDVLSSLKLQYAKTGHLDSLEELYSLYISSQKIEKVQEQLRKQIVKALTQDSRFKRMGKKELIREDIFKAISLTSEEQKLVEEFHDFTTYFNGFHENRKNMYSADAQSTAIAYRLIHENLPKFIDNIAIFQKILHSPVAENLPQLYKEMEEYLNVNSIEEMFMLDYYNEVLTQAQIEVYNAIIGGRTLEDGTKIQGINEYVQKQTSRGNRLPKLKPLFKQILSDREAVSWLPEEFSSDAELLEAVNDCYASLNDHVFTPLQDMLSCLSDFSLEGVFVPNDLSITDISQKLYGDWSVIKQTVISDLKTKNPPKRNEKPEKYEERISKLLKSTDSFSVAYLNGCLADKKGDICSYFCNLGAVNTTTEQKENLFLQIQNAYAEASELLSKEYPREKNLSQDKPNVEKLKALLDAIKSLQHFVKPLLGAGDEAGKDERFYGEMAILWEELSKVTQLYNKVRNRMTRKPYSTEKFKLTFNIKGNFLGGWVDSKTDRSDNGTQYGGYLFRRKNAINEYDYYLGMSANTKLFRRQANVEGTYERLDYYQPKSQTVYGNSYVGKNGYEADKQALLKSILTFVANTGNEELMQQVNSKDTPSAMLTVMKEASETFYEQLLEDTDFSAINKEVTDNLHKTILSMNRIPKVNDYKDVEFKVFTEPQQVIDDICKDKVFSYFPVSDDEMNQAMADANRPLLLFKISNKDLSYAEKHSKGLRQSRGTENLHTMYFKALMSGSQSVFDIGTGEVFFRRSSLNVSKPTHPQNTPIQNKNLEGCSSFNYDLIKDKRYTVDKFGFHLSMIQNYQASGKADVNAMTREFIHDHFDEMHFIGIDRGERHLLYVSVIDSKGNIKEQFSLNQIDNEYRGNSYKTDYHSLLGKREETRQRERQSWRTIEGIKELKQGYLSQVVHKIVTLMVKYQAIVVLEDLNMGFKRGRQKVESSVYQQFEKALIDKLNYLVDKQQAPNDYGGLLKGYQLTNKFTSFRDMKRQNGFLFYIPAWNTSKIDPVTGFVDLLHPKYENVEKARAFFCKFKSIRYNSEKDRYEFTFDYNDFTTQADGTRTLWTICTHGERIETYRNPEKNSQWDSREVDLTESMTLLFSKYNISQHENLKEAIARQTEKQFFEKLIHLLRLMLQMRNSKTGTDVDYLISPIADENGCFFDSRSCDKILPENADANGAYNIARKGLWIARQIQKTGVDAKADISITNKEWLKFAQFKDV

SEQ ID NO: 198 - protein, 1625 aa, unidentified
  REGION 1..1625: note = Description of Unknown: uncultivated organism sequence
  REGION 1..1625: note = Category: MG28 effectors
  REGION 1..1625: note = Description: MG28-58 effector
MSTEFSPDRLKTARTTLKLSMEDLSILTDRIVSRQSIHGYETERMKPKAAVLNKLAQVLGVSPHYLEGKGVMIDIPALRYTGSKALTREEIHEIENILAFRAERYIDLEEKNGMLKQFSNPLKSFIISNQKEADDASKFLREQWGMGTASITSVYRLLERKGIKLIETTLPQGVLGLSTWCEKKYPLIVMNADKSDTTTERTRFTAIHELGHLLLNIATECDKERICNQFAGCFLLPKEVMYEELGSKRDFITLEEVLDFHLEYGVSVAAIIHQAWDLRIITSEHYNHWFDNIISKNRTEKGWGSYSIKETLGREKRMQTISERANNNKTSSNNTKSIKYSNNKIVSNMSNFKDFTHLYQLSKTLRFELRPIGETLKHFNESGILDHDETRAESYKKVKKLIDRYHKEFMEEALRNFEFQMDDEKQKNSLSEYFFLYSLGKRTEAQDNDFKEIKKNLREQIAKYFKASPKYKNLFKQELIKEDLCNNMQCNEEEQKLVEEFHNFTTYFTGFHENRKNMYSNEEKSTAIAFRLVHQNLPKFIDNIGAFDRARNIDEIKAGIKNLQKHFETKGLLNQGEKIEDFFALDYYSRLAVQSRIDIYNAILGGRTTEKGEKIQGLNEYINLYNQQHKEARLPKMKALFKQILSDRQAISWIEESFKSDNEVLSSVNDFYENLKQNEIFDRTKELLTSVGSYDLSKVYITNDQQLTSISQQLYGSWAVIENAILAEMQNETPRKKKEDAEKYNERLKKAYSNRSSFSIAYIDQCLEAVFDENLIPVEQHFTKLGEAEIETEAECGKIKIPDVFTQIEQTYSAAKSLLCNPYPKDKHLSQSDEDIEKVKNLLDALKRFQHFIKPLTGCGDEAEKDEMFYSDLTELLAEIDQLNSLYNRVRNHLTGKPYSEEKLKLNFENASLLTGWDKNMERANTAVILRKGKLYYLAIMKKEHNSIFASDNLPDKGECYEKMVYKQIALPLGFGGFARKCFGSATKLGWTYPTNLLNKEGKIIIKDEEAKDVLPELIDCYKDFLNIYEKDGFKYSSYNFKFKPSNQYEKLSQFFAEIQQQGYKITFQNISSDYIDQLVNEGKLYLFQIYNKDFSPSSKGTPNMHTLYWQMLFDERNLNDGVYQLNGQAEVFFRKKSLNYTKPTHPANQPIAKKNPHSKNETSQFTYDLIKDKRFTMDKFLFHVPITINFKSSGMDNIDLKVRQWLQKADDVHIIGIDRGERHLLYLTVIDCKGNIKEQMSLNTIENEYKGNTYAFDYHKRLDEKEKERGKAKKNWKTIENIKELKEGYLSQAIHKITQIMLKYNAIIVLEDLNMGFMRGRQKVEKQVYQKFEKMLIDKLNYLADKKKDPSEVGGVLNAYQLTSKFESFTKLGRQSGFLFYIPAWNTSKIDPVTGFVNLFDTQYKSDDKAKMFFSKFKSISYNKDKNWFEFSFDYNDFTNKAEGTKTQWTVCTNGERIENFRSGQKPNQWDGRTINLSQKFKSLFDEYGIDFTKDLQNSICSQSKKGFFKQLLHLFKLTVQMRNSNTETEEEKGKKDFIISPVCVDDKYYNSDIEAEKGKDEEGNWKSELPVNADANGAYNIARKGLMILNHIKQSSDPSKKQEYDLTNKAWLNFVQKGSVEGK

SEQ ID NO: 199 - protein, 1246 aa, unidentified
  REGION 1..1246: note = Description of Unknown: uncultivated organism sequence
  REGION 1..1246: note = Category: MG28 effectors
  REGION 1..1246: note = Description: MG28-59 effector
MEQFTNLFNVQKTICFELQPIGKTKENIEINGILTQDEKRAKDYQTVKGFIDEYHKQFIKDRLWNFKLPLVSKGNLDSLEEYQTLYELPKRNDAQEADFSELKDNLRSIIAKRLTESGSAFDRIFKKELIREDLVEFLSNEEDKDLVRQFADFTTYFSGFHENRKNMYSAEEKSTAIAYRLIHQNLPKFMDNMKAFAKIANTSVAEYFADIYAGWKEYLNVNSVEELFSLDYFSETLTQPHIEVYNYIIGKKVLEDGTEIKGINEFVNLYNQQQKDKSKRLPFLVPLYKQILSDREKLSWMAEEFDSDEKMLAAINELYTHLHELLMGEENESLRSLLLNMKDYDLSQINITNDLSLTDISQHLFNRYDVYTNGVKEQLKGITPRKKKESDEDFEDRISKIFKTQKSFSISQLNSLPHPEIDGNKPRSIEEYFMAMGAVNTETTQRESFFSKIETAYEDARAILQMKDTDDSLSQNKPAVSKIKALLDAFKDLQHFIKPLLGSGEEVEKDELFYGSFQLIWDELDSVTPLYNKVRNWLTRKPYSTEKIKLNFDNSQLLGGWDVNKEPDCTGVLLRKDGYYYLGIMDKKFNRVFEENVIHTDGDCYEKMVYKQLGQISQQLPRIAFSKTWQQKLSIPEEIISIKKSESFKKNCGDLQKLISYYKSFISQHEEWNSYFDINFTDRCDYKNLPDFYSEVDSQFYALSFSKVSSSYINVLVDEGKLYLFRIWNKDFSEYSKGTPNLHTLYWKMLFDERNLSDVVYKLNGQAEVFYRKASIKPDNRVVHKANESITNKNALNKKTTSTFKYDIIKDRRYTVDKFQFHVPITINFKASGQTNINPIVQETIRQGGFKHIIGLDRGERHLLYLSLIDLKGKIVKQMTLNEIVNEYNGKPYKTNYHDLLAKREGERTDARRSWDTIETIKELKEGYLSQVVHIISNMMVKYNAIVVLEDLNTGFMRGRQKIERQVYEKFEKMLIVKLNCYIDKKADVMETTGLLHPLQLTCEAKKWKRSHQCGCLFYIPAWNTSKIDPVTGFVNLLDTRYETCEKAHLFFSKFQRISFNQKKGWFEFAFDYNDFTTKAEGTRTQWTLCTYGERIRTFRNPQKNNQWDNERIVLTDEFKKIFDEKGIDIYGNLKDAICNQRDAKFFKDLLGLMKLLLQMRNSITNSEEDYILSPVADEKGHFFDSREGKCNLPIDADANGAYNIARKGLWVICKIKKSLKGEKPTLSITNKEWLKFAQDKPYLND

SEQ ID NO: 200 - protein, 1249 aa, unidentified
  REGION 1..1249: note = Description of Unknown: uncultivated organism sequence
  REGION 1..1249: note = Category: MG28 effectors
  REGION 1..1249: note = Description: MG28-60 effector
MERLTNLYPVSKTLRFELQPIGKTRENIEKGGILQQDEERAENYKLVKSFIDEYHKQYIKSRLWNFELPLADEGRHNSLAEYRALYELPKRDAEQEAAFTEVKDNLRAIIARRLTEKGSAYDRIFKKELIREDLIEFLEDAKDKEIVRQFADFTTYFTGFHENRANMYSSEEQSTAIAYRLIHQNLPKFMDNMKSFAKIAETSVADHFADIYAGWEEYLNVGSINDMFRLDYFSQTLTQEHIEVYNYIIGKRILDDGTEIKGINEYVNLYNQQQKDKKQRLPLLVPLYKQILSDREKLSWLSEEFDSDQKMQQAIKETYDQLYDLLMGDENESLKSLLMHLSDFDLSQINITNDLSLTDISQHLFGKYDVFTNGIKDKLRIITPRKKKDTDEDFEERITKLFKSQKSFSIAELNSLPHPVVEGNQPNSIEDYYMTLGAVNTETVQKENLFAQIENAYTDALPILLLTDTDDKLSQNKAAVAKIKKLLDAFKDLQHFVKPLLGSGEEVEKDERFYGTFQTIWDELDTVTPLYNKVRNWLTRKPYSTEKIKLNFDNSQLLGGWDVNKEPDCTGVLLRKGNYYYLGIMNKKNNRIFEKDLTPSDGDCYDKIDYKLLPGANKMLPKVFFSKSRIDEFSPSASLVEKYKAGTHKKGANFSLKDCHNLIDFFKQSIAKHEDWSKFGFHFSDTKTYEDISGFYREVEHQGYSLSSHKVSAEYIHRMVDEGKLFLFRLWNKDFSEFSKGTPNLHTLYWKMLFDERNLQDVVYKLNGQAEVFYRKASIKEENRIIHPAKKDISNKNALNDKHTSRFDYDIIKDRRFTVDKFQFHVPITINFKATGQTNINPVVHDIIRQGGIKHIIGIDRGERHLLYLSLIDLQGRIVKQMTLNEIINEYAGRQYKTNYHDLLAKREGERTDARRSWDTIENIKELKEGYLSQVVHVITKMMVEYKAIIVLEDLNMGFMRGRQKIERQVYEKFEHMLIDKLNCYIDKLEDPSKPGGMLQALQLSNKFESFARLGKQSGCLFYIPAWNTSKIDPVTGFVNLLDTHYDTMKAAKSFFSKFERISYNGEKNWFEFTFDYNEFNKKAEGTRTHWTLCTYGTRIRNFRNPQKNNQWDDEEIVLTDMFKRLFDNYGIDYRGNLKEALQQPTEAKFYQELMSLMKLLLQMRNSKINSEVDYLLSPVADENGYFFDSRQGDTTLPDNADANGAYNIARKGLWVIHKIQETPDGEKASLAISNKEWLHFAQTKPYLE

SEQ ID NO: 201 - protein, 1242 aa, unidentified
  REGION 1..1242: note = Description of Unknown: uncultivated organism sequence
  REGION 1..1242: note = Category: MG28 effectors
  REGION 1..1242: note = Description: MG28-61 effector
MNTYEELTGLYSFKKTISLALNPIGETLRHIEEKGFIAQDEQRAEDYKKVKDIIDRYHKYFITMCLDGFKFSTDKLMKYVALAENAKRDEDAFDEVKTQLRKEIVGAFSKNKTYGDLFGEKLIKQHLPNFVTDENEKRLVASFNEFTTYFEKFHKCRENMYSDEAKSTAIAHRLIHENLPMFYDNMKSFKKIAACEDCIDFTEFEAAFSEEFKEFKVEHLADIFQLEYFNNTLTQRKIDFYKLVIGGKVLEDGTKLKGVNEYVNLYNQQHKDARLPLLKPLYKMILSDKVALSWLPEEFKSDEEMVEAIQEMHKNLKGALTDNAENNLRDLLLNMDKYDLAHIYIANDLGLTDISQNIFGQYDVYTSAIKQALRNEYAPIPKERRNPELYDERINKLFKSRTSFSIAELNSLADSDHTIENHFKQLGAAERNGKQEIDLFSQIETAYAKASDILSGKHGNIGQSEAETALVKNLLDAYKSLQHFIKPLLGHGDEAEKDNEFDAKLRAAWDALDIINPLYNKVRNWLTRKPYSTEKIKLNFENAQLLNGWDKNKETDCTSVLLRKDGMYYLAIMNKKANHAFACDELPADGDCYEKIDYKQIALPMGLGAFVRKCGKTAEKLGWSCPERLKNKDKKIITNDAEAEGVLPDLIDCYKAFLNTYEKDGFKYKDFNFKFKPSSEYSSLVEFFAEVPSQGYKIAFRKVSVAYINQLVESGKLYLFQIWNKDFSKFSKGTPNMHTLYWKQLFDERNLADVVYKLNGQAEVFYRKRSLKLEETTVHQAHQPIPNKNKQNEKRQSQFNYDIVKNRRFTVDKFQFHVPITLNFKATGRGNINDKVLEIIRNNGIKHVIGIDRGERHLLYLSLIDLKGNIIKQMTLNDIVNEYRGHTYATNYKDLLAEREDNRTEARRNWKKIDNIKEIKQGYLAQVVHIISKMMVEYKAIVILEDLNMGFMRGRQKIERSVYEQFEKSLIEKLNYYVDKQKDEEEVGGLLHALQLTSKFKSFKELGKQSGCLFYVPAWNTSKIDPVTGFVNLFDTKSVKGEKVRAFFSNFDAIRYNAEKDWFEFAFNYSNFTDKAKDTREKWTLCTHGTSIRTFRNPSKLNQWDSEEVVLTDEFKKVFEKAGIDICGNLKNAICALKEKAHLEKLMQLMKLLLQMRNSKPNTEVDYMISPVADEQGNFYDSRCGNSALPDNADANGAYNIARKGLWVIKQIRETPAGKRPKLAIKNKEWLKFAQQKPYLDD

SEQ ID NO: 202 - protein, 1252 aa, unidentified
  REGION 1..1252: note = Description of Unknown: uncultivated organism sequence
  REGION 1..1252: note = Category: MG28 effectors
  REGION 1..1252: note = Description: MG28-62 effector
MKDLKQFTNQYSVSKTLRFELQPIGKTKENIEKNGILQRDEKRAEDYKIVKEFIDEYHKQFIKERLWDFKLPLHSKGRLDTLEEYQALYELSKRDDAQEAEFSEVKDNLRSIIAKRLTESGSAYERIFKKELIREDLIDFLESEEDKDIVRQFADFTTYFSGFHENRRNMYVADEKSTAIAYRLIHQNLPKFMDNMKAFAKIAETPVAEHFADIYEGWKECLNVGSIEEIFRLDYFSETLTQTHIEVYNYIIGKKILEDGTEIKGINEYVNLYNQQQKDKSKRLPFLVPLYKQILSDREKLSWLAEEFDSDEKMLAAINESYNHLHDLLMGNENESLRSLLLHIKDFNLSQINITNDLSLTDISQHLFGRYDVFANGIKDELRNITPRKKKEGEEDFEDRISKIFKTQKSFSIDFLDKLPQPVMDDGKPRSIEDYFMTLGAVNTETTQKENLFAQIENAYADAHAILQMKDTGDTLSQNKPAVAKIKALLDVLKDLQRFIKPLLGSGEENEKDELFYGSFQMMWDELDTVTPLYNKVRNWLTRKPFSTEKIKLNFDNSQLLGGWDVNKEPDCTGVILRKDGYYYLGIMDKKSNRIFEADVTPSDGDCYDKIDYKLLPGANKMLPKVFFSKSRIDEFAPSEAIVSSYKRGTHKKGADFNLAECHRLIDFFKQSINKHEDWSKFNFHFSDTKTYEDISGFYREVEQQGYMLSSHPVSSSYINQLVDEGKLYLFRIWNKDFSEFSKGTPNLHTLYWRMLFDERNLADVVYKLNGQAEVFYRKASIKPENRIIHKANLPIANKNELNEKRASVFEYDIIKDKRYTVDKFQFHVPITINFKATGQTNINPIVQDVIKQGGFSHIIGIDRGERHLLYLSLIDLKGNIVKQMTLNDIVNEYKGQAYKTNYHDLLAKREGDRTDARRSWEAIETIKELKEGYLSQVVHIISKMMVKYNAIVVLEDLNTGFMRGRQKIERQVYEKFEKMLIEKLNCYIDKQLSPTDEGGLLHPLQLTCDAQKWKRSHQCGCLFYIPAWNTSKIDPVTGFVNLLDTHYDTREKARVFFSKFQRISFNAQKNWFEFALDYNDFTAKAEGTRTQWTLCTQGERIRTFRNPQKNHQWDDERIVLTDAFKQLFDKYDIDINGNLKEAISAQTDAQFFKELLGLMKLLLQMRNSITNSEEDYLLSPVADDAGHFFDSREGISSLPIDADANGAYNIARKGLWVIRKIQETPEGEKPSLTITNREWLQFAQTKPYLND

SEQ ID NO: 203 - protein, 1246 aa, unidentified
  REGION 1..1246: note = Description of Unknown: uncultivated organism sequence
  REGION 1..1246: note = Category: MG28 effectors
  REGION 1..1246: note = Description: MG28-63 effector
MKEFANLFPVSKTLRFELQPIGKTKENIEKNGILQRDEKRAEDYKIVKGFIDEYHKQFIKDRLWSFKLPLHSEGHLDSLEEYQELYELSKRNDAQEAEFTEVKDNLRSIIAKRLTESGTKYDTIFKKELIREDLIDSLENNEDKDIVRQFADFTTYFSGFHENRRNMYVADEKSTAIAYRLIHQNLPKFMDNMKAFAKIAETSVAEHFSDIYEGWKEYLNVGSIEEIFRLDYFSETLTQPHIEVYNYIIGKKILEDGTEIKGINEYVNLYNQQQKDKSKRLPFLVPLYKQILSDREKLSWLAEEFDSDEKMLAAINESYEHLHDLLMGNENESLRSLLLHIKDFNLSQINITNNLSLTDISQHLFSRYDVFTNGIKDELRLITPRKKKESEEDFEDRISKIFKTQKSFSIDFLDKLPQPVMEDEKHRAIEDYFMTLGAVNTETTQKENLFAQIENAYEDARTILQLKDTGDMLLQNKPAVAKIKALLDALKDLQHFIKPLLGSGEENEKDELFYGSFQMMWDELDTVTPLYNKVRNWLKRKPFSTEKIKLNFDNSQLLGGWDVNKEPDCTGVILRKDGFYYLGIMDKKSNHIFEADVTPSDGECYEKMVYKQLGQISQQLPRIAFSKSWQQKITIPEDVIIIKKTESFKKNNEDLQKLISYYKSFISQHEEWNSYFNISFSNRNNYKNLPDFYSEVDTQFYNLSISKVSVSYIDQLVNEGKLYLFRIWNKDFSEFSKGIPNLHTLYWKMLFDERNLADVVYKLNGQAEVFYRKASIKPENRIIHKANQPIANKNELNKKRTSAFEYDIIKDRRYTVDKFQFHVPITINFKAAGQTNINPIVQDTIRQGGFSHIIGIDRGERHLLYLSLIDLKGNIVKQMTLNDIINEYKGQTYKTNYHDLLAKREGDRTDARRSWEIIETIKELKEGYLSQVVHIISKMMVEYNAIVVLEDLNTGFMRGRQKIERQVYEKFEKMLIEKLNCYIDKQAEPSDNTGLLHPLQLTCDAQKWKRSHQCGCLFYIPAWNTSKIDPVTGFVNLLDTRYETREKARVFFSKFQRISFNAQKGWFEFSFDYNDFTSKAEGTRTQWTLCTQGERIRTFRNPQKNHQWDDEKIMLTDAYKQLFDKYDIDINSNIKEAISAQTDAQFFKELLGLMKLLLQMRNSITNSEEDYLLSPVADDAGHFFDSREGISSLPIDADANGAYNIARKGLWIIRKIQETASGEKASLSITNKEWLQFAQTKPYLND

SEQ ID NO: 204 - protein, 1249 aa, unidentified
  REGION 1..1249: note = Description of Unknown: uncultivated organism sequence
  REGION 1..1249: note = Category: MG28 effectors
  REGION 1..1249: note = Description: MG28-64 effector
MKQFTNLYPVSKTLRFELQPIGKTKENIEKNGILMRDEKRAKDYKIVKEFIDDYHKQFIKERLWDFKLPLNSEGKLNSLEEYQALYELSKRDEVQEAGFTEVKDNLRSIIAKRLTESGSAYERIFKKELIREDLVDFLENEEDKDIVRQFADFTTYFSGFHENRHNMYVAEEKSTAIAYRLIHQNLPKFMDNMKAFAKIAETSVAEHFADIYEGWKEYLNIESIEEVFRLDYFSETLTQPHIEVYNYIIGKKILEDGTEIKGINEYVNLYNQQQKDKSKRLPFLVPLYKQILSDREKLSWLAEEFDSDEKMLSAINESYSHLHDLLMSNENESLRSLLLHIKEFNLSHINIANDLSLTDISQHLFSRYDVFTNGIKDELRIITPRKKKESDEDFEERITKIFKTIKSFSIDFLDNLPQPIMEDGKRRSIEDYFMTLGAVNTETTQKENLFAQIENAYEDARNILQLKDTGDTLSQNKPAVAKIKALLDALKDLQHFIKPLLGSGEENEKDELFYGSFMMMWDELDTITPLYNKVRNWLTRKPFSTEKIKLNFDNAQLLGGWDVNKEPDCTGVLLRKDGFYYLGIMNKKSNRIFESEVTPSDGECYDKIDYKLLPGANKMLPKVFFSKSRIDEFAPSEAVVSSYKRGTHKKGANFNLSECHRLIDFFKQSINKHEDWSKFGFHFSPTDTYEDISGFYREVELQGYMLSSHPVSSSYINQLVDEGKLYLFRIWNKDFSEFSKGTPNLHTLYWKMLFDERNLADVVYKLNGQAEVFYRKASIKPENRIIHKANQPIANKNELNEKRTSTFEYDIIKDRRYTVDKFQFHVPITINFKAAGQTNINPIVQDVIRQGGFSHIIGIDRGERHLLYLSLIDLKGNIIKQMTLNEIINEYKGQTYKTNYHTLLAKREGDRTDARRSWETIETIKELKEGYLSQVVHIISKMMVEYNAIVVLEDLNPGFMRGRQKIERQVYEKFEKMLIEKLNCYIDKHADPSENAGLLHPLQLTSDIQKWKRSHQCGCLFYIPAWNTSKIDPVTGFVNLLDTRYDTREKARVFFSKFQRISFNAQKGWFEFAFDYNDFTTKAEGTRTQWTLCTQGERIRTFRNPQKNNQWDDERIVLTDAYKQLFDKYNIDINGNIKEAISAQTDAQFFKELLGLMKLLLQMRNSITNSEEDYLLSPVADNTGHFFDSREGIYSLPIDADANGAYNIARKGLWVIRKIQETPNGEKTSLSITNKEWLQFAQTKPYLND

SEQ ID NO: 205 - protein, 1249 aa, unidentified
  REGION 1..1249: note = Description of Unknown: uncultivated organism sequence
  REGION 1..1249: note = Category: MG28 effectors
  REGION 1..1249: note = Description: MG28-65 effector
MKEFTNLYPVSKTLRFELQPIGKTKENIEKNGILQRDEKRAEDYKIVKGFIDEYHKQFIKERLWSFKLPLNCEGHLNSLEEYQALYELPKRNDAQEAEFTEIKDNLRSIIAKRLTESGSAYERIFKKELIREDLIDFLENNEDKDIVRQFADFTTYFSGFHENRRNMYVAEEKSTAIAYRLIHQNLPKFMDNMKAFAKIADTPVAEHFADIYDGWKEYLNVGSIDEIFRLDYFTETLTQPHIEVYNYIIGKKILEDGTEIKGINEYVNLYNQQQKDKSKRLPFLVPLYKQILSDREKLSWLGEEFDSDEKMLAAINESYTHLHDLLMGDENESLRALLLHIKEFDLTKINITNDLSLTDISQHLFGRYDVFTNGIKDELRNITPRKRKESDEELEDRISKIFKTQKSFSIDFLDKLPQPVIDDGKPRSIEDYFMTLGAVNTETTQKENLFAQIENAYEDARTILQLTDTGDTLSQNKSAVAKIKALLDALKDLQHFIKPLLGSGEENEKDELFFGSFQMMWDELDTVTPLYNKVRNWLTRKPFSTEKIKLNFDNSQLLGGWDVNKEPDCTGVILRKEGFYYLGIMDKKSNHIFEADITPSVGECYDKIDYKLLPGANKMLPKVFFSKSRIDEFAPSEAIISSYKRGTHKKGADFNLAECHRLIDFFKQSINKHEDWSKFNFHFSDTKSYEDISGFYREVEQQGYMLSSHPVSSSYINQLVDEGKLYLFRIWSKDFSEFSKGTPNLHTLYWKMLFDERNLADVVYKLNGQAEVFYRKASIKPENRIIHKANHSIANKNELNSKRTSTFEYDIIKDRRYTVDKFQFHVPITINFKAAGQTNINPIVQDVIRQGGFSHIIGIDRGERHLLYLSLIDLKGNIIKQMTLNEIINEYKGQTYKTNYHDLLAKREGDRTDARRSWETIETIKELKEGYLSQVVHVISKMMVEYNAIVVLEDLNTGFMRGRQKIERQVYEKFEKMLIEKLNCYIDKHAAPSENTGLLHPLQLTCDAQKWKRSHQCGCLFYIPAWNTSKIDPVTGFTNLLDTRYDTREKARVFFSKFQRISYNAEKGWFEFALDYNDFTAKAEGTRTQWTLCTYGERIRTFRNPKKNHQWDDERIVLTDAFKQLFDTYDIDINGNLKETISAQTDAQFFKELLGLMKLLLQMRNSITNSEEDFLLSPVADDAGHFFDSREGNSSLPIDADANGAYNIARKGLWVIRKIQETANEEKPSLSITNKEWLHFAQTKPYLKD

SEQ ID NO: 206 - protein, 1247 aa, unidentified
  REGION 1..1247: note = Description of Unknown: uncultivated organism sequence
  REGION 1..1247: note = Category: MG28 effectors
  REGION 1..1247: note = Description: MG28-66 effector
MKEFTNLYPVSKTLRFELQPIGKTKENIEKNGILQRDEKRAEDYKIVKGFIDEYHKQFIKDRLWSFKLPLNCEGHLNSLEEYQALYELPKRNDAQEAEFTEIKDNLRSIIAKRLTESGSAYERIFKKELIREDLIDFLENNEDKDIVRQFADFTTYFSGFHENRRNMYVAEEKSTAIAYRLIHQNLPKFMDNMKAFAKIADTPVAEHFADIYDGWKEYLNVGSIDEIFRLDYFTETLTQPHIEVYNYIIGKKILEDGTEIKGINEYVNLYNQQQKDKSKRLPFLVPLYKQILSDREKLSWLGEEFDSDEKMLAAINESYIHLHDLLMGDENESLRALLLHIKDFDLAKINITNDLSLTDISQHLFGRYDVFTNGIKDKLRDITPRKKKDSDEDFEDRISKIFKTQKSFSIDFLDKLPQPVMDDGKPRSIEDYFMTLGAVNTETTQKVNLFAQIENAYEDARTILQLTDTGDTLSQNKSAVAKIKALLDALKDLQHFIKPLLGSGEENEKDELFYGSFQMMWDELDTVTPLYNKVRNWLTRKPFSTEKIKLNFDNSQLLGGWDVNKEPDCTGVILRKEGFYYLGIMDKKSNHIFEADITPSVGECYDKIDYKLLPGANKMLPKVFFSKSRIDEFAPSEAIISSYKRGTHKKGADFNLAECHRLIDFFKQSINKHEDWSKFNFHFSDTKSYEDISGFYREVEQQGYMLSSHPVSSSYINQLVDEGKLYLFRIWSKDFSEFSKGTPNLHTLYWKMLFDERNLADVVYKLNGQAEVFYRKASIKPENRIIHKANHSIANKNELNSKRTSTFEYDIIKDRRYTVDKFQFHVPITINFKAAGQTNINPIVQDVIRQGGFSHIIGIDRGERHLLYLSLIDQKGNIIKQMTLNEIINEYKGQTYKTNYHDLLAKREGDRTDARRSWETIETIKELKEGYLSQVVHVISKMMVEYNAIVVLEDLNTGFMRGRQKIERQVYEKFEKMLIEKLNCYIDKHAAPSENTGLLHPLQLTCDAQKWKRSHQCGCLFYIPAWNTSKIDPVTGFTNLLDTRYDTREKARVFFSKFQRISYNAEKGWFEFALDYNDFTAKAEGTRTQWTLCTYGERIRTFRNPKKNHQWDDERIVLTDAFKQLFDTYAIDINGNLKETISAQTDAQFFKELLGLMKLLLQMRNSITNSEEDFLLSPVADDAGHFFDSREGNSSLPIDADANGAYNIARKGLWVIRKIQETANEEKPSMSITNKEWLQFAQTKPYL

SEQ ID NO: 207 - protein, 1201 aa, unidentified
  REGION 1..1201: note = Description of Unknown: uncultivated organism sequence
  REGION 1..1201: note = Category: MG28 effectors
  REGION 1..1201: note = Description: MG28-67 effector
MEEALRDFVFQMDDEGKNNSLSEYFFLYSLGKRTEAQDNDFKDVKKNLREQIAKYFKASPKYKNLFKQELIKEDLCNNMQCNEEEQKLVEEFHNFTTYFTGFHENRKNMYSDEEKSTAIAFRLVHQNLPKFIDNIGVFDRVRNIDEIKAGIENLQKHFETEGLFKQGEKIEDFFTLDYYSRLAVQSRIEIYNAILGGKTTEKGEKIQGLNELINLYNQQHKETHLPKMKALFKQILSDRQAVSWIEESFKSDNEVLSSVNDFYENLKQNEIFERTKELLTSVGSYDLSKVYITNDQQLTSISQQLYGSWAVIENAILAEMQNETPRKKKEDAEKYNERLKKAYSNRSSFSIAYIDQCLEAVFGENRIPVEQHFANIGKAEIETEAECGKIKIPDVFTQIEQTYSAAKTLLCNPYPKGKHLSQSDEDIEKVKNLLDALKRFQHFIKPLTGSGDEAEKDEMFYSDLTELWAEIDQLNSLYNRVRNHLTGKPYSEEKLKLNFENASLLTGWDKNMERANTAVILRKGKLYYLAIMKKEHNSIFASDNLPDKGECYEKMVYKQIALPLGFGGFARKCFGSATKLGWTYPTNLLNKEGKIIIKDEEAKDVLPELIDCYKDFLNIYEKDGFKYSSYNFKFKPSNQYEKLSQFFAEIQQQGYKITFQNISSDYIDQLVNEGKLYLFQIYNKDFSPSSKGTPNMHTLYWQMLFDERNLNDGVYQLNGQAEVFFRKKSLNYTKPTHPANQAIANKNPFSKKDKSEFTYDLIKDKRFTMDKFLFHVPITINFKSSKTYDIDAKVRQWLQKADDVHIIGIDRGERHLLYLTVIDCKGNIKEQMSLNTIENEYNGNTYAFDYHKRLDEKEKERDAAKKSWKTVENIKELKEGYLSQAIHKITQLMLKYNAIIVLEDLNMGFMRGRQKVEKQVYQKFEKMLIDKLNYLADKKKDPSEMGGVLNAYQLTSKFESFTKLGRQSGFLFYIPAWNTSKIDPVTGFVNLFDTKYKSIDETKKFFDKFKSISYNKNKDWFEFSFDYNDFTSKAEGTKTQWTVCTNGERIENFRNGETSNQWSGRTINLSQELKTLFDGYGIDFTKDLQNSICSQSEKGFFEQLLRLFKLTVQMRNSISNTEIDYLISPVCDKKGVFYDSREDRKDLPNNADANGAYNIARKGLMILNHIKQSSDPSKKQEYNLTNKAWLNFVQKGSVEGK

SEQ ID NO: 208 - protein, 1248 aa, unidentified
  REGION 1..1248: note = Description of Unknown: uncultivated organism sequence
  REGION 1..1248: note = Category: MG28 effectors
  REGION 1..1248: note = Description: MG28-68 effector
MNNLKQFTGLYPVNKTLRFELKPVGKTKENIENKGILERDSQRTVDYKVVKGFIDEYHKQFIKDRLWSFKLPLFSEGRLDSLEEYMALYELSKRDEAQEAEFSEVKDNLRSIIAKRLTESGSAYERIFKKELIREDLIAFLEKDEEKEIVRQFADFTTYFDDFHKNRKNMYSAEEKSTAIAYRLIHQNLPKFMDNMKAFAKIAETSVTEHFADIYEGWKEYLNVGSIEEVFRLDYFSETLTQTHIEVYNYIIGKKPLDDGTEINGINVYVNLYNQQQKDKSQRLPLLVPLYKQILSDREKLWQVEEFDSDEKMLAAINESYEHLHDLLMGNENESLRSLLIHMKDFNLAQINITNELSLTDISQHLFSRYDVFTNGIKDKLRIITPRKKKESDEDFEDRISKIFKTQKSFSIDFLDKLPQPVMEDGKPRSVEDYYMSLGAVNTETTQKENLFAQIENAYEDVRPILQMKDTGDALSQNKPAVAKIKSLLDALKDLQHFIKPLLGSGEENEKDELFYGSFQMMWDELDTVTPLYNKVRNWLTRKPYSTEKIKLNFDNSQLLGGWDVNKEQDYTGVLLRKDGFYYLGIMDKKSNRIFEADGTPTDGECYEKMVYKQLGQISRQLPRIAFSKSWQQKITIPDDVIRIKKTESFKKNNEDLQKLISYYKSFISKHEEWNSYFNISFSNRNNYKNLPDFYSEVDTQFYNLSISKVSSSYINQLVDEGKLYLFRIWNKDFSEFSKGTPNLHTLYWKMLFDERNLADVVYKLNGQAEVFYRKASIKPENRVVHQANKPIDNKNGLNKKRTSTFEYDIIKDKRYTVDKFQFHVPITINFKATGQNNINPVVQETIRQGGFSHIIGIDRGERHLLYLSLIDLKGNIVKQMTLNDIVNEYKGQTYKTNYHDLLAKREGERTDARRSWETIETIKELKEGYLSQVVHIISKMMVEYNAIVVLEDLNTGFMRGRQKIERQVYEKFEKMLIEKLNCYIDKLADPTENTGLLHPLQLTCDTQKWKRSHQCGCLFYIPAWNTSKIDPVTGFVNLLDTRYDTREKARAFFSKFQRISFNSEKGWFEFVFDYNDFTTKAEGTRTQWTLCTYGERIRTFRNPQKNHQWDDERIMLTDAFTQLFDKYDIDINGNLKETISAQSDAQFFKDLLSLMKLLLQMRNSITNSEEDYLLSPVSDESGHFFDSREGISCLPIDADANGAYNIARKGLWVIRKIQETPDGEKPSLTITNKEWLQFAQTKPYLKE

SEQ ID NO: 209 - protein, 1166 aa, unidentified
  REGION 1..1166: note = Description of Unknown: uncultivated organism sequence
  REGION 1..1166: note = Category: MG28 effectors
  REGION 1..1166: note = Description: MG28-69 effector
MKYVALAENAKRDEDAFDEVKTQLRKEIVGAFSKNKTYGDLFGEKLIKQHLPNFVTDENEKRLVASFNEFTTYFEKFHKCRENMYSDEAKSTAIAHRLIHENLPMFYDNMKSFKKIAACEDCIDFTEFEAAFSEEFKEFKVEHLADIFQLEYFNNTLTQRKIDFYKLVIGGKVLEDGTKLKGVNEYVNLYNQQHKDARLPLLKPLYKMILSDKVALSWLPEEFKSDEEMVEAIQEMHKNLKGALTDNAENNLRDLLLNMDKYDLAHIYIANDLGLTDISQNIFGQYDVYTSAIKQALRNEYAPIPKERRNPELYDERINKLFKLRTSFSIAELNSLADSDHTIENHFKQLGAAERNGKQEIDLFSQIETAYAKASDILSGKHGNIGQSEAETALVKNLLDAYKSLQHFIKPLLGHGDEAEKDNEFDAKLRAAWDALDIINPLYNKVRNWLTRKPYSTEKIKLNFENAQLLNGWDKNKETDCTSVLLRKDGMYYLAIMNKKANHAFACDELPADGDCYEKIDYKQIALPMGLGAFVRKCGKTAEKLGWSCPEKLKNKDKKIITNDAEAEGVLPDLIDCYKAFLNTYEKDGFKYKDFNFKFKPSSEYSSLVEFFAEVPSQGYKIAFRKVSVAYINQLVESGKLYLFQIWNKNFSKFSKGTPNMHTLYWKQLFDERNLADIVYKLNGQAEVFYRKRSLKLEETTVHQAHQPIPNKNKQNEKRQSQFNYDIVKNRRFTVDKFQFHVPITLNFKATGRGNINDKVLEIIRNNGIKHVIGIDRGERHLLYLSLIDLKGNIIKQMTLNDIVNEYRGHTYATNYKDLLAEREDNRTEARRNWKKIDNIKEIKQGYLAQVVHIISKMMVEYKAIVILEDLNMGFMRGRQKIERSVYEQFEKSLIEKLNYYVDKQKDEEEVGGLLHALQLTSKFKSFKELGKQSGCLFYVPAWNTSKIDPVTGFVNLFDTKYVNVEKARAFFSNFDAIRYNAEKDWFEFAFNYSNFTDKAKDTREKWTLCTHGTSIRTFRNPSKLNQWDSEEVVLTDEFKKVFEKAGIDICGNLKNAICALKEKAHLEKLMQLMKLLLQMRNSKPNTEVDYMISPVADEQGNFYDSRCGNSALPDNADANGAYNIARKGLWVIRQIRETPAGKRPKLAIKNKEWLKFAQQKPYLDD

SEQ ID NO: 210 - protein, 1228 aa, unidentified
  REGION 1..1228: note = Description of Unknown: uncultivated organism sequence
  REGION 1..1228: note = Category: MG28 effectors
  REGION 1..1228: note = Description: MG28-70 effector
MRQKYDGFESCYGISKVIRTGLIPQGATLEHIEKKGLLLSEEKRAEDYTKVKKIIDRYHRKYIDNQLKDAELSGVEESYSLYCKTNRTEKENTDLKKFLEKLRKQVSNFLTSSDEFKRIDKKELIEKDLLNFVQGDEEEEELVKSFKGFTTYFKGFHENRKNMYSHEEKSTAIAYRVINQNMFRYFDNIRSISKFILANSENNIAELESIYSDKLKGKTLEEFFSVDNYSFFISQSGIDTYNMIIGGYSVDERTKVKGINEYINLFNQENHEKFGTLKPLYKQILAERTTESFLPEKFENDKEVIESLAAFSHNMSDTLLEIMEVFGKIGEYDASGIYLKYDSLKDISTCVFSDWSAITNALWERYDVQYIGKKKKETKAYIEEKRKHFKNLKSVSADEINTAMGENVLIPYSDAAKSLFEKICVAEENIRELINLDYPDDKELSKDKAAVKDIKAYLDSVKALQHHMKPLLGNQDESGKNEFFYGDFSGLWDELDALTPLYNKVRNYVTKKPYSTEKIKLNFDNSTLLNGWDLNKEEANTAILMQREGFLYLGIMDKKHNKIFRNIENTGCEDCYQKMEYKLLPGANKMLPKVFFSKKGIESFKPPLEILEIYKNETFKKGEAFNIDDCHTIIDFYKKALNEHEDWKKFEFKFSKTKDYRDISEFYREVEAQGYKISFKAIPKKIIDEYVEKGWLYLFKIWNKDFSEYSKGTPNLHTLYLKMLFDPRNLENVVYKLNGEAEIFYRKASIQPKDIIKHPANEAIKNKNPLNKKQSSIFKYDLIKDRRYTVDKFEFHVPITLNFKARGKENINTEVREYIKRSKNLYVIGVDRGERNLLYVSVVDADGSIVEQYSLNDIVNEYKGVQYRTDYHALLDTKEKNRDKARKEWTEIQNIKELKEGYISQVVHKICELMMKYEAIIALEDLNGGFKNSRKKVEKQVYQKFEKMLIEKLNYLVDKKADVNEPSGLLHALQLTSKFEGFNKLFGQSGFVFYVPAWNTSNIDPCTGFTNLFFSKDLRYASVENSLEFWKKFDSVAYDDTKDIFSFTFDYNNFNQRAEEIKSKSKWTVYSYGDRLETFRNADLNQQYDSREVKLTEAFKELFKKYEIPHENCEIKENILNCKERDFHDKLLHLFKLTLQLRNSKTGTMIDYMTSPVMDIDGNFFDSRTASSSLPQDADANGAYNIARKGLWLIEKLKNTKDADLPKAKLAIKNAEWLAYAQRNENNG

SEQ ID NO: 211 - protein, 1008 aa, unidentified
  REGION 1..1008: note = Description of Unknown: uncultivated organism sequence
  REGION 1..1008: note = Category: MG28 effectors
  REGION 1..1008: note = Description: MG28-71 effector
MNTYEELTGSVYLTKTISLALNPIGETLRHIEEKGFIAQDEQRAEDYKKVKDIIDRYHKYFITMCLDGFKFSTDKLMKYVALAENAKRDEDAFDEVKTQLRKEIVAAFEKGETYKDLFKKELILEHLPNFVTDENEKRLVASFNKFTTYFTGFHENRENMYSDEAKSTAIAHRLIHENLPMFYDNMKSFKKIAACEDCIDFAEFEAAFSEEFKEFKVEHLTDIFQLEYFNNTLTQRKIDFYKLVIGGKVLEDGTKLKGVNEYVNLYNQQHKDARLPLLKPLYKMILSDKVALSWLPEEFKSDEEMVEAIQEMHKNLKGALTDNAENNLRDLLLNMDKYDLAHIYIANDLGLTDISQNIFGQYDVYTSALKQALRNEYAPIPKERRNPELYDERINKLFKSRTSFSIAELNSLADCDHTIENHFKQLGAAERNGKQEIDLFSQIETAYAKASDILSGKHGNIGQSEAETALVKNLLDAYKSLQHFIKPLLGHGDEAEKDNEFDAKLRAAWDALDIINPLYNKVRNWLTRKPYSTEKIKLNFENAQLLNGWDKNKETDCTSVLLRKDGMYYLAIMNKKANHAFACDELPADGDCYEKIDYKQIALPMGLGAFVRKCGKTAEKLGWSCPERLKNKDKKIITNDAEAEGVLPDLIDCYKAFLNTYEKDGFKYKDFNFKFKPSSEYSSLVEFFAEVPSQGYKIAFRKVSVAYINQLVESGKLYLFQIWNKDFSKFSKGTPNMHTLYWKQLFDERNLADVVYKLNGQAEVFYRKRSLKLEETTVHQAHQPIPNKNKQNEKRQSQFNYDIVKNRRFTVDKFQFHVPITLNFKATGRGNINDKVLEIIRNNGIKHVIGIDRGERHLLYLSLIDLKGNIIKQMTLNDIVNEYRGHTYATNYKDLLAEREDNRTEARRNWKKIDNIKEIKQGYLAQVVHIISKMMVEYKAIVILEDLNMGFMRGRQKIERSVYEQFEKSLIEKLNYYVDKQKDEEEVGGLLHALQLTSKFKSFKELGK

SEQ ID NO: 212 - protein, 1242 aa, unidentified
  REGION 1..1242: note = Description of Unknown: uncultivated organism sequence
  REGION 1..1242: note = Category: MG28 effectors
  REGION 1..1242: note = Description: MG28-72 effector
MNTYEELTGLYSFKKTISLALNPIGETLRHIEEKGFIAQDEQRAEDYKKVKDIIDRYHKYFITMCLDGFKFSTDKLMKYVALAENAKRDEDAFDEVKTQLRKEIVGAFSKNKTYGDLFGEKLIKQHLPNFVTDENEKRLVASFNEFTTYFEKFHKCRENMYSDEAKSTAIAHRLIHENLPMFYDNMKSFKKIAACEDCIDFTEFEAAFSEEFKEFKVEHLADIFQLEYFNNTLTQRKIDFYKLVIGGKVLEDGTKLKGVNEYVNLYNQQHKDARLPLLKPLYKMILSDKVALSWLPEEFKSDEEMVEAIQEMHKNLKGALTDNAENNLRDLLLNMDKYDLAHIYIANDLGLTDISQNIFGQYDVYTSAIKQALRNEYAPIPKERRNPELYDERINKLFKSRTSFSIAELNSLADSDHTIENHFKQLGAAERNGKQEIDLFSQIETAYAKASDILSGKHGNIGQSEAETALVKNLLDAYKSLQHFIKPLLGHGDEAEKDNEFDAKLRAAWDALDIINPLYNKVRNWLTRKPYSTEKIKLNFENAQLLNGWDKNKETDCTSVLLRKDGMYYLAIMNKKANHAFACDELPADGDCYEKIDYKQIALPMGLGAFVRKCGKTAEKLGWSCPERLKNKDKKIITNDAEAEGVLPDLIDCYKAFLNTYEKDGFKYKDFNFKFKPSSEYSSLVEFFAEVPSQGYKIAFRKVSVAYINQLVESGKLYLFQIWNKDFSKFSKGTPNMHTLYWKQLFDERNLADVVYKLNGQAEVFYRKRSLKLEETTVHQAHQPIPNKNKQNEKRQSQFNYDIVKNRRFTVDKFQFHVPITLNFKATGRGNINDKVLEIIRNNGIKHVIGIDRGERHLLYLSLIDLKGNIIKQMTLNDIVNEYRGHTYATNYKDLLAEREDNRTEARRNWKKIDNIKEIKQGYLAQVVHIISKMMVEYKAIVILEDLNMGFMRGRQKIERSVYEQFEKSLIEKLNYYVDKQKDEEEVGGLLHVLQLTSKFKSFKELGKQSGCLFYVPAWNTSKIDPVTGFVNLFDTKSVKGEKVRAFFSNFDAIRYNAEKDWFEFAFNYSNFTDKAKDTREKWTLCTHGTSIRTFRNPSKLNQWDSEEVVLTDEFKKVFEKAGIDICGNLKNAICALKEKAHLEKLMQLMKLLLQMRNSKPNTEVDYMISPVADEQGNFYDSRCGNSALPDNADANGAYNIARKGLWVIKQIRETPAGKRPKLAIKNKEWLKFAQQKPYLDD

SEQ ID NO: 213 - protein, 1262 aa, unidentified
  REGION 1..1262: note = Description of Unknown: uncultivated organism sequence
  REGION 1..1262: note = Category: MG28 effectors
  REGION 1..1262: note = Description: MG28-73 effector
MSNFNEFTHLYQLSKTLRFELKPIGETLKHFNESGILDQDEHRAESYKKVKKLIDRYHKEFMEEALRDFVFQMDDEGKNNSLSEYFFLYSLGKRTEAQDNDFKDVKKNLREQIAKYFKASPKYKNLFKQELIKEDLCNNMQCNEEEQKLVEEFHNFTTYFTGFHENRKNMYSDEEKSTAIAFRLVHQNLPKFIDNIGVFDRVRNIDEIKAGIENLQKHFETEGLFKQGEKIEDFFTLDYYSRLAVQSRIEIYNAILGGKTTEKGEKIQGLNELINLYNQQHKETHLPKMKALFKQILSDRQAVSWIEESFKSDNEVLSSVNDFYENLKQNEIFERTKELLTSVGSYDLSKVYITNDQQLTSISQQLYGSWAVIENAILAEMQNETPRKKKEDAEKYNERLKKAYSNRSSFSIAYIDQCLEAVFGENRIPVEQHFANLGKAEIETEAECRKIKIPDVFTQIEQTYSAAKTLLYNPYPKGKHLSQSDEDIEKVKNLLDALKRFQHFIKPLTGSGDEAEKDEMFYSDLTELWAEIDQLNSLYNRVRNHLTGKPYSEEKLKLNFENTSLLTGWDKNMERANTAVILRKGKLYYLAIMKKEHNSIFASDNLPDKGECYEKMVYKQIALPLGFGGFARKCFGSATKLGWTYPTNLLNKEGKIIIKDEEAKDVLPELIDCYKDFLNIYEKDGFKYSSYNFKFKPSNQYEKLSQFFAEIQQQGYKITFQNISSDYIDQLVNDGKLYLFQIYNKDFSPSSKGTPNMHTLYWQMLFDERNLNDGVYQLNGQAEVFFRKKSLNYTKPTHPANQAIANKNPFKKKDKSEFTYDLIKDKRFTMDKFLFHVPITINFKSSKTYDIDAKVRQWLQKADDVHIIGIDRGERHLLYLTVIDCKGNIKEQMSLNTIENEYNGNTYAFDYHKRLDEKEKERDAAKKSWKTVENIKELKEGYLSQAIHKITQLMLKYNAIIVLEDLNMGFMRGRQKVEKQVYQKFEKMLIDKLNYLADKKKDPSEMGGVLNAYQLTSKFESFTKLGRQSGFLFYIPAWNTSKIDPVTGFVNLFDTQYKSDDKAKMFFSKFKSISYNKDKNWFEFSFDYNDFTNKAEGTKTQWTVCTNGERIENFRSGQKPNQWGGRTINLSQKFKSLFDEYGIDFTKDLQNAICSQSKKGFFKQLLYLFKLTVQMRNSNTETDYLISPVCDRNGNFYDNGNNNYDNDLPENADANGAYNIARKGLMILNHIKQSSDPSKKQEYNLTNKAWLNFVQKGSVEGK

SEQ ID NO: 214 - protein, 1250 aa, unidentified
  REGION 1..1250: note = Description of Unknown: uncultivated organism sequence
  REGION 1..1250: note = Category: MG28 effectors
  REGION 1..1250: note = Description: MG28-74 effector
MNTFNEFTNLYSLSKTLRFELQPIGKTKENIEKNGILSRDEKRAEDYQMVKGIIDEYHKQFITDRLWSFKLPLESEGRNDSLEEYHTLYEMSKRDERQEAAFTEVKDNLRGIIAKRLTEKGSAYERIFKKELIREDLIDFLKNEEKKELVRQFADFTTYFTGFHENRKNMYSAEEKSTAIAYRLIHQNLPKFMENMKAFAKIAETSVSEHFADIYEGWKEYLNVRSLEEIFRLDYFSETLTQPHIEVYNYIIGKKVLEDGTEIKGINEYVNLYNQKHKDKIPLLVPLYKQILSDREKLSWLAEEFDSDEKLLVAINETYNQLYNFLMGMENESLRSLLTHIKDFDLNHINITNDLSLTDISHQLFGRYDVFTSGIKDKLREKTRRKKGESDEDFEDRVSKIFKTHKSFSIAYLNKLPQPDMEDGKRRRVEEYFMELGAVNTETTQKENLFAQIENAYEDAKAVLQMKDTGDTLSQNKSAVAKIKNLLDVIKDLQHFIKPLLGSGEENEKDELFYGSFQMMWEELDAVTPLYNKVRNWLTRKPYSTEKIKLNFDNSQLLGGWDVNKEPDCTGVLLRKDEFYYLGIMDKKSNRIFDAEVTPSDGKCYEKIDYKLLPGANKMLPKVFFSKSRIDEFAPSEAIVSSYKRGTHKKGADFSLSDCHRLIDFFKQSINKHEDWSKFGFRFSDTKSYEDISGFYREVEQQGYMLSSHQVSESYIHQLVDEGKLYLFRIWNKDFSEFSKGTPNLHTLYWKMLFDERNLADVVYKLNGQAEVFYRKASIKPENRIVHLAKHPIANKNEFNKEPTSTFEYDIIKDRRYTVDKFQFHVPITINFKAAGQTNINPIVQDTIRKGNFSHIIGIDRGERHLLYLSLIDLRGNIVKQMTLNDIINEYKGTTYKTNYHDLLAKREGERTEARRSWDTIENIKELKEGYLSQVIHIISKMMVEYNAIVVLEDLNMGFMRGRQKIERQVYEKFEKMLIDKLNCYIDKQKEPMAEGGMLRALQLTNKFESFRKLGKQCGCLFYIPAWNTSKIDPVTGFVNLFDTRYENMAKAKVFFSKFKSIRYNSIKDWFEFSLDYNDFTTKAESTRTEWTLCTYGERIRTFRNPQKNHQWDDEELVLTAEFKQLFDRYGIDIQSNLKEAINAQTDAQFFKEMLGLMKLLLQMRNSITNSDTDYLLSPVADENGHFFDSREDITVLPDNADANGAYNIARKGLWVIRKIQETAEDEKPSLAITNKEWLQFAQTKPYLDD

SEQ ID NO: 215 - protein, 1280 aa, unidentified
  REGION 1..1280: note = Description of Unknown: uncultivated organism sequence
  REGION 1..1280: note = Category: MG29 active effectors
  REGION 1..1280: note = Description: MG29-1 effector
MFNNFIKKYSLQKTLRFELKPVGETADYIEDFKSEYLKDTVLKDEQRAKDYQEIKTLIDDYHREYIEECLREPVDKKTGEILDFTQDLEDAFSYYQKLKENPTENRVGWEKEQESLRKKLVTSFVGNDGLFKKEFITRDLPEWLQKKGLWGEYKDTVENFKKFTTYFSGFHENRKNMYTAEAQSTAIANRLMNDNLPKFFNNYLAYQTIKEKHPDLVFRLDDALLQAAGVEHLDEAFQPRYFSRLFAQSGITAFNELIGGRTTENGEKIQGLNEQINLYRQQNPEKAKGFPRFMPLFKQILSDRETHSFLPDAFENDKELLQALRDYVDAATSEEGMISQLNKAMNQFVTADLKRVYIKSAALTSLSQELFHFFGVISDAIAWYAEKRLSPKKAQESFLKQEVYAIEELNQAVVGYIDQLEDQSELQQLLVDLPDPQKPVSSFILTHWQKSQEPLQAVIAKVEPLFELEELSKNKRAPKHDKDQGGEGFQQVDAIKNMLDAFMEVSHAIKPLYLVKGRKAIDMPDVDTGFYADFAEAYSAYEQVTVSLYNKTRNHLSKKPFSKDKIKINFDAPTLLNGWDLNKESDNKSIILRKDGNFYLAIMHPKHTKVFDCYSASEAAGKCYEKMNYKLLSGANKMLPKVFFSKKGIETFSPPQEILDLYKNNEHKKGATFKLESCHKLIDFFKRNIPKYKVHPTDNFGWDVFGFHFSPTSSYGDLSGFYREVEAQGYKLWFSDVSEAYINKCVEEGKLFLFQIYNKDFSPNSTGKPNLHTLYWKGLFEPENLKDVVLKLNGEAEIFYRKHSIKHEDKTIHRAKDPIANKNADNPKKQSVFDYDIIKDKRYTQDKFFFHVPISLNFKSQGVVRFNDKINGLLAAQDDVHVIGIDRGERHLLYYTVVNGKGEVVEQGSLNQVATDQGYVVDYQQKLHAKEKERDQARKNWSTIENIKELKAGYLSQVVHKLAQLIVKHNAIVCLEDLNFGFKRGRFKVEKQVYQKFEKALIDKLNYLVFKERGATQAGGYLNAYQLAAPFESFEKLGKQTGILYYVRSDYTSKIDPATGFVDFLKPKYESMAKSKVFFESFERIQWNQAKGYFEFEFDYKKMCPSRKFGDYRTRWVVCTFGDTRYQNRRNKSSGQWETETIDVTAQLKALFAAYGITYNQEDNIKDAIAAVKYTKFYKQLYWLLRLTLSLRHSVTGTDEDFILSPVADENGVFFDSRKATDKQPKDADANGAYHIALKGLWNLQQIRQHDWNVEKPKKLNLAMKNEEWFGFAQKKKFRA

SEQ ID NO: 216 - protein, 753 aa, unidentified
  REGION 1..753: note = Description of Unknown: uncultivated organism sequence
  REGION 1..753: note = Category: MG29 effectors
  REGION 1..753: note = Description: MG29-2 effector
DTGFYADFVEAYKNYEQITVSLYNKARNHLSKKPFSKDKIKINFDSPTLLNGWDLNKESDNKSVILRKGGNYYLAIMHPKHTKVFSDYSESEHDGATFEKVNYKLLSGANKMLPKVFFSKKGAETFSPPQEILDLYKNDEHKKGKTFKLESCHKLINFFKFNISKYKVHPNDQFGWDVFGFDFSPTSTYKDLSDFYREVEAQGYKLWFSDISENYVNKCVEEGKLFLFQIYNKDFSPYSKGSPNLHTLYWKGLFEPENLKDVVLKLNGEAEIFYRKHSMKRDESVVHPAHVAIKNKNDLNPKKESTFDYDIVKDRRYTQDKFFFHVPITLNFKSQGFAKFNDKINALLAEQDDVHVIGIDRGERHLLYYTVVNSEGKIIEQGSLNQMDTDQGYSVDYQQKLDAKEKERDNSRKTWSSVENIKELKAGYLSHVVHKLAKLVIKHNAVVCLEDLNFGFKRGRFKVEKQVYQKFEKALIDKLSYLVFKDKVATEAGGYLNAYQLAAPFESFEKLGKQTGILYYVRADYTSKIDPVTGFIDFLKPKYESLLKSKTFFETFESICFNVEKNYFEFSLDYKRFMPSRKFGDYQTTWTICTYGDTRYHNRRNKAGKWETETINVTAQLKDIFKVYGIGFEHEADIKEAIAAIKDTKFYKKLYWILRVTLSLRHSVTGTDEDFILSPVADEKGVFFDSRNEVVEYPKDADANGAYHIALKGLWNLQQIQQHDWDEEKPKKLNLAMKNEEWFGFAQQKKFRQ

SEQ ID NO: 217 - protein, 1287 aa, unidentified
  REGION 1..1287: note = Description of Unknown: uncultivated organism sequence
  REGION 1..1287: note = Category: MG29 effectors
  REGION 1..1287: note = Description: MG29-3 effector
MDYSKFTKKYSISKTLRFELRPVGETAEYIEDFKSQYLRDVVAQDEKRAEEYLKIKELIDDYHRDYIEDKLSNPVNPDTGEYWFSDELFDTAYKEFIAFKKDTKNEKLRQIWMSRQELFRKMLVKAFVDKKDLFSKELITRDLPAWLSQKGIWEEHKATVESFSKFTTYFSGFHENRKNMYSDEDQSTAIAYRLMNENLPKFFNNCEAYRKNKEKYPSLDFGVLDLDDKFKPIYFRSLFTQSAIDEYAELLGGKTEESREKSIGLNEKINLYRQKSGLIRRDISEFTMLYKQILSDRESHSFIPDAFESDKEMFTSLAQYIEKANRLTSKLNKTLQKLQSANTDKIYLVSTELTNISQSMFSSYGMIESALKSDMEQNVYPAPKNGKVSSVLEAKRKKYMEEKVFSLAFLEEKLKPYLLETEQEEKSILSHLLEALKNAKLDNKLDEKVKTVLPLLKLEALDKKRIVPNSSNPNGSEGFLQVQNIQKMLDAFMSLSHALRPLHLVKGRKVIDMPDADAGFYADFSVQYEEYSQITISLYNKVRDYLTKKPYSKDKVKINFEVPTLLNGWAVNKETANASILFEKDGLYYMGIMHPKHKHLFEYSKNIDDMKNGKKSKVKDELYTKIQGGKNNSYRKIVYKLLPGANKMLPKVFFANSRLEFFSPSQDILDIRNRASDSKNGKAQKGYTKVDFSLSDCHKMIDFYKKSIDKHPEWREFEFDFSVTNSYKDLSGFYREVESQGYKIEFHDIKTKYIDQCIEEGKLFLFQIYNKDFSPHSKGSPNLHTMYWRGLFESENSKNVVLKLNGDAEMFYRKHSMKRKDTVVHRANETIDNKNKNNPKKTSTFAYDIVKDRRYTKDKFIFHVPITLNFKALNTFRFNDTINKELSKSIDTCVIGIDRGERHLLYYTVVDSKGNIIEQDTLNEISTDQGYKVNYQQKLHDKEQERDKARKSWGSVENIKELKDGYLSHVVHKLANLIIKHNAIVCLEDLNSGFKRGRFKVEKQVYQKFEKRLIDKLNYLVFKDAKEGEAGHYLNAYQLTAPFESFQKLGKQTGILFYVNADYTSKIDPATGFMDFLKPKYENLGKAKTFFESLESFIYNVEKDYFEFTFDYKKVTNKSLGSYKTVWTACTYGDVRYQNKKDEQGIWQTNSINVTQELKELCDDAQIEYKDGKELKDILALEKDTKFYKTLFWIMRLTLTLRHSRTGTDDDFILSPIANSNGEFFDSRKAPKTLPKDADANGAYNIALKGLWNLQKIREHDWEAEKPKNLNLYMKNEEWFSFIQSRV

SEQ ID NO: 218 - protein, 991 aa, unidentified
  REGION 1..991: note = Description of Unknown: uncultivated organism sequence
  REGION 1..991: note = Category: MG29 effectors
  REGION 1..991: note = Description: MG29-4 effector
MFEQFTKQFALQKTLRFELKPVGETADFLDDFKSQYLKDTVLKDEKRASDYQEIKELIDDYHREYIESCLHEPVDKKTGEILDFSVDLEEAWLYYQQLKDDPSKRGEWEKAQENLRKRLVTSFVDSGNLFKKEFITRDLPEWLKNKGLWEKHNDAVESFKGFTTYFTGFYDNRKNMYSSEAQSTAIANRLMNENLPRFFNNCVAFHTIQEKHPGFMLDVEDELLDCLGVQSLNDVFTPSFFVHLFSQSGITLFNELLGGKTRENGEKVQGLNEQINLYRQQHPDIARGFPRFTKLHKQILSDIESRSFIPDAFDDDKHLLESLEKYISEANKKLIPALQESMDKLSQADLSRVYLMGSSLTYLSQDIFHFFGTIPDAIRWHAENNISTKKEREHFIKQDVYALADLESIIISYVNQLDDSDEAHQLLNALPEPKRPVTSFIQQTLQQAIEAVSPLLSLDELSKNRRLPRDEKEKGGEGFQQTETIREMLDAFKVVSDAVKPLHLVKGRKPIDVPDVDTGFYADFAEAFEAYTQPTTALYNKARNHLTKKPFSKHKIKINFDAPTLLNGWDLNKESDNKSVILRKDGNYYLAIMHPKHTKVFANAPAVEERGEMYEKMNYKLLSGANKMLPKVFFSKKGIETFNPPQEILDLYKNNEHKKGSTFKLESCHRLIDFFKVNIPKYKVHPNDEFGWDVFGFNFSPTSSYKDLSGFYREVENQGYKVWFSDVSESYIQKCVEEGKLFLFQIYNKDFSPYSKGKPNLHTLYWKGLFEPANLKDVVLKLNGEAEIFYRKHSIKHGDKIIHRANEPIDNKNDSNPKKQSCFEYDITKDKRYTQDKFFFHVPISLNFKAQSPARFNDNINKMLSESEDICVIGIDRGERHLLYYTVVNSKGDIIEQGSLNHIETDQGYTVDYQQKLDAKEKQRDKARKTWSTIENIKELKAGYLSQVVHKLAQLIIKHNAIVCLEDLNFGFKRGRFKVEKQVYQKFEKAL

SEQ ID NO: 219 - protein, 1270 aa, unidentified
  REGION 1..1270: note = Description of Unknown: uncultivated organism sequence
  REGION 1..1270: note = Category: MG29 effectors
  REGION 1..1270: note = Description: MG29-5 effector
MFETFTKHFSLSKTLRFELRPVFGGAEMKEDFESEFLRKTVERDERRAKEYKELKRVIDDYFRDYIDATLAIPNHPNGFMEADALKQAYECYRLFRSAKGNAYSKAKKEWNNIQKELRESVASLFKKSDYEVKGSFFKNVLMPHVEGDPKKTELIKSFDKFTTYFTGFNENRKNIFSKDDKATTIGYRLIHENLPKFFDNCILYERIRNKFDDLVLSSEDELTQALGVTGLDEIFRPEVFAHVLTQPHITAYNELLGGYVDDQKVKHQGLNEQINLYRQQKKLSNRQLPIFAPLFKQILAESQSQSFAPEPFENDKEMLTAINVFLYSVDKHIEQLEASVKELHADEIEHIYFKAQSLTQLSQELFGRYDVIQSALQGYTDHHRDLFRTKAQREKFLDKTDFYSLYDLERAILEYVESLDADHPDRNAISNDTPVQSHLKNKFKKLKQKIEEEKKTITPLLSKEKLSKDRKLPKGENAPGGEGYRQVQQIKELLESYKTLAQTLRDLYPAKGRKRVEVGSPNMAFYNAFEEPFVEYDNECMALYNKARNYLSKKPYKRDKIKLNFEAPTLLNGWDLNKERANRSVLLLKNGNYYLAIMHPNHTDIFKKYMEMDNSDNYEKINYKLISDANRMLPRVFFSKKGIKTYDPPKSILELYKKGEHIKGPSFKLESLHRLIDYFKSVVSKYKADPGDQYGWEVFDFKFSPTSQYEDIGQFYKELEKQAYRVWFTPISSTYIEEAAKHGKLFLFQIYNKDFSPYAKGRPNLHTLYWKSLFEKENLQDVITKLNGEAEIFFRHHSIKKADTVIHKAGETIKNKNENNPKQESTFKHDIIKDRRYTVDKILFHVPITINFKNDKPGNFNDTVNRLLAKHPDTHIIGIDRGERHLLYLTVIDSDGNIVEQRSLNTIPTDRDYEVDYRQKLDAKEKERDKARKEWSTIENIKELKSGYLSQVVHELAKLIIQHNAIVVLEDLNFGFKRGRFRVEKQVYQKFEKALIDKLNYLVFKDRQAKEPGGYLNGYQLTAPFESFQKLGKQSGILFYVPAAYTSKIDPATGFIDFLKPKYESVEKAKAFFANFDAIRYNKEEEYFEFVFDYKNFESKNALSGYKTDWTVCTYGKRLRNKRNDQGYWESVSVDVTDDLKRLFERYGILYHNGDNLISQILEYDEKQLFELLIFAMRTTLAMRYSRTGEEEDYILSPVKDCNGDFFDSRKADPSLPQDADANGAYHIALKGAMLLERMREHDFNGKSKLDLLIKNEQWFEYISERLWGE

SEQ ID NO: 220 - protein, 1008 aa, unidentified
  REGION 1..1008: note = Description of Unknown: uncultivated organism sequence
  REGION 1..1008: note = Category: MG29 effectors
  REGION 1..1008: note = Description: MG29-6 effector
MFNHFTHKYSLSKTLRFELKPVGETADYLEDFKSQYLKDFIVKDQQRAEDYKIIKELIDDYHRQYIEEKLSAPVDPKTGELWLNPEYFEEAYSYYQKLKADQSDPKNRKQWEDTQTELRKKLVETFTNKADLFKKELITRDLPEFLKKKGQWEENKKVVEHFSRFTTYFSGFHENRKNMYTHEDHSTAIAYRLMNENLPRFFNNCLAYKHIKDKYNDLPLKINSELQSQLGVTNINDFFQPRYFINLFSQTGIDNYELLIGGKTEENGTKIQGLNEQINLYRQQLQHKMKDEAKADDKKSKRIYDLSGFTHLYKQILSDREKISFIPEAYEDDKQLLASLEEYIATVTDEKEGAIQKLEQSLQKLANADLSKVYIKGAGLTALSQNMFSAYGMITASLSYYADQKLSTKKKREDYLKQKVYSLDELNHHLIAYIDSKEKDDVLHEQLAKLPNPQQPISSYLISIIKQTQQDIELQATIDAVKPLLQLESLSKDRKAPELDNENDKGAVGFQQVQKIQKMLDGFMSVSHAVKLLHLVDGRKPIDMPDKDDSFYNGFAEVYKAYTDLTVTLYNKARNHLTTKLYSNDKIKINFDVPTLLNGWDANKESDNASILFEREGLYYLGIMHPKHKHLFNYTKGIDDIGNEKKTTAKDELYEKVAEKGDSGYRKIVYKLLPGVNKMLPKVFFSASRKDFFAPSEEVNRIRNTASHTKNGNPQKGHKKENFNLEDCHAIIDFFKVSLNKHPEWKDFNFSFSPTSSYEDLSGFYREVEHQGYRMDFQSIKESYIKDCVSEGKLFLFQIYNKDFSRYSKGKPNLHTLYWKGLFEPENLKDVVLKLNGEAEIFYRKHSIKREDRIIHKSGDTLDNKNTNNPKKTSKFEYDIVKDRRYTQDKFQFHVPITLNFKALGVNRFNDQINKELAQQKETCVIGIDRGERHLLYYTVVNSKGDIIEQDTLNTINTDKGYNVDYQQKLHTKEKEREKARKSWSSVENIKELKAGYLSHVVHKLAHL

SEQ ID NO: 221 - protein, 1324 aa, unidentified
  REGION 1..1324: note = Description of Unknown: uncultivated organism sequence
  REGION 1..1324: note = Category: MG29 effectors
  REGION 1..1324: note = Description: MG29-7 effector
MLNKFTNQYSLSKTLRFELKPVGETAGYLDDFKSQHLKEFVATDKQRADDYLIIKELIDDYHRAYIEEKLSAPVDPKTGELFLNSQDFEDAYSYYQQLKVDSKDPKHRETWEKTQAELRKKLVKAFVGKADLFGEKLIKQHLPEQLKKEGRWKENKKAVENFNKFTTYFSGFHENRKNMYTDKDQSTAIAFRLMNENLPRFFNNCDKYKKLKEKYPELLFENNKDILAKLGVDSLNDVFTPSFFINLFTQTGIDNYQLLLGGKSEDTGEKLKGLNEQINLFRQQKQKEAREQAQKENKKAKKITDLTGFTGLYKQILSDRQSASFILDEFENDRELLTKLNEFITLATKPEGTLEKLENALNHLNEIDPQKVFIKTAGLTDISQTLFHSYQIITTALHEFAENNLKTKKERENYLKQKAFSLAELDERLVDYIQDLEDSDPLHQQLQALNDPLQPIKGYLQEAITRAQQETDERPNLEQTIKEVEPLLTLKELSKNRQAPKKEGDKGGKGFQQIQKIQKMLDAFMAVSHALKPLHLVDGRKPIDMPEMDSGFYGEFSEAYEEYNQSCITLYNKSRNHLTKKPFKTDKIKINFDSPTLLKGWDANKESDNASLLFEKDGLYYLGIMHPKHKRLFDYIIGIDDIGNENKTKAKTDLYNQITTNKSGYRKIVYKLLPGANKMLPKVFFSRSRIAFFAPSDEVQRIRNTASHSKNGKPQKGFKKADFNLKDCHTMIDFFKDSINKHPEWKQFGFKFSPTESYEDLSGFYREVEQQGYRIDFHTIKESYIDECIKQGKLFLFQIYNKDFSTYSKGKPNLHTLYWKGLFEAENLKDTVLKLNGEAEIFYRKHSIKPNDIITHRANETIENKSKNYDKKTSTFAYDIIKDKRYTQDKFQFHVPITLNFKAPKAPGVSHFNNQINKAVAKSKDTHIIGIDRGERHLLYYTVINQKGEIIEQDTLNKIKAHKDYEVDYQQKLHDKETERQKARRSWSSVENIKELKAGYLSHVVHKLAVLIKEHNAIVCLEDLNFGFKRGRFKVEKQVYQKFEKTLIDKLNYLVFKDAEENEAGHYLKAYQLTAPFESFEKMGKQSGILYYVQAAYTSKIDPATGFINFLYTRYQSLSRSKEFFESFDFIRYNQAQDYFEFSFDYKNFPIRQNLKNYQTRWLACTYGDERYANKRNKQNQWESEIVNVTQELKTLFNKASIDFQNGKDLKDAIAQTKDTKFYKKLYWLLGLTLSLRHSKTGTEIDFILSPIQGKDGKFFDSREASNKHPKDADANGAYNIALKGLWNLQQIKQHDWNTEKPKKLNLNMKNEDWFGFIAERASL

SEQ ID NO: 222 - protein, 1324 aa, unidentified
  REGION 1..1324: note = Description of Unknown: uncultivated organism sequence
  REGION 1..1324: note = Category: MG29 effectors
  REGION 1..1324: note = Description: MG29-8 effector
MLNKFTNQYSLSKTLRFELKPVGETAGYLDDFKSQHLKEFVATDKQRADDYLIIKELIDDYHRAYIEEKLSAPVDPKTGELFLNSQDFEDAYSYYQQLKVDSKDPKHRETWEKTQAELRKKLVKAFVGKADLFGEKLIKQHLPEQLKKEGRWKENKKAVENFNKFTTYFSGFHENRKNMYTDKDQSTAIAFRLMNENLPRFFNNCDKYKKLKEKYPELLFENNKDILAKLGVDSLNDVFTPSFFINLFTQTGIDNYQLLLGGKSEDTGEKLKGLNEQINLFRQQKQKEAREQAQKENKKAKKITDLTGFTGLYKQILSDRQSASFILDEFENDRELLTKLNEFITLATKPEGTLEKLENALNHLNEIDPQKVFIKTAGLTDISQTLFHSYQIITTALHEFTENNLETKKERENYLKQKAFSLAELDERLVDYIQDLEDSDPLHQQLQALNDPLQPIKGYLQEAITRAQQETDERPNLEQTIKEVEPLLTLKELSKNRQAPKKEGDKGGKGFQQIQKIQKMLDAFMAVSHALKPLHLVDGRKPIDMPEMDSGFYGEFSEAYEEYNQSCITLYNKSRNHLTKKPFKTDKIKINFDSPTLLKGWDANKESDNASLLFEKDGLYYLGIMHPKHKRLFDYIIGIDDIGNENKTKAKTDLYNQITTNKSGYRKIVYKLLPGANKMLPKVFFSRSRIAFFAPSDEVQRIRNTASHSKNGKPQKGFKKADFNLKDCHTMIDFFKDSINKHPEWKQFGFKFSPTESYEDLSGFYREVEQQGYRIDFHTIKESYIDECIKQGKLFLFQIYNKDFSTYSKGKPNLHTLYWKGLFEAENLKDTVLKLNGEAEIFYRKHSIKPNDIITHRANETIENKSKNYDKKTSTFAYDIIKDKRYTQDKFQFHVPITLNFKAPKAPGVSHFNNQINKAVAKSKDTHIIGIDRGERHLLYYTVINQKGEIIEQDTLNKIKAHKDYEVDYQQKLHDKETERQKARRSWSSVENIKELKAGYLSHVVHKLAVLIKEHNAIVCLEDLNFGFKRGRFKVEKQVYQKFEKTLIDKLNYLVFKDAEENEAGHYLKAYQLTAPFESFEKMGKQSGILYYVQAAYTSKIDPATGFINFLYTRYQSLSRSKEFFESFDFIRYNQAQDYFEFSFDYKNFPIRQNLKNYQTRWLACTYGDERYANKRNKQNQWESEIVNVTQELKTLFNKASIDFQNGKDLKDAIAQTKDTKFYKKLYWLLGLTLSLRHSKTGTEIDFILSPIQGKDGKFFDSREASNKHPKDADANGAYNIALKGLWNLQQIKQHDWNTEKPKKLNLNMKNEDWFGFIAERASL

SEQ ID NO: 223 - protein, 1083 aa, unidentified
  REGION 1..1083: note = Description of Unknown: uncultivated organism sequence
  REGION 1..1083: note = Category: MG29 effectors
  REGION 1..1083: note = Description: MG29-9 effector
TGFNENRNNIFTKEAKATAIGYRLIHDNLPKFFDSCMLYDRIISTYEDLRFQVEDELITQLGVTTLNELFQPVAFAHLLTQANIESFNALLGGLNTQINQFKQEQKLNSRQLPTFAPLFKQILAKTESHSFIPEAFANDKELLDAIAIYRERSQEHLQKLEESFEALHSDEDEHIYYKAQSLTQLSQEMFGHYSVINDMLNLYVENHQERFRTKAQREKFLKKPNLYSLYDLESAINEYIEILDADHFYRKKIENDTPVQSYLKQKFNDLKEDIDKQEKIIAPLLSLNELSKNRNLPKNDDDQGGEGYRQVQQIKEFLDRYNDTVRILSNLYPAKGRERIEVEAPNMAFYNMFEEPFVEFESETFALYNKTRNYLSKKPYSKDKFKLNFESSKLLGGFVESKTEKSNNGTQHNAYLFRQKLDNGNYRYFLGISNNVKLFSRDKLIHDPHPEYERIHYYQGKINSLYGSSYDGNYNKDKETLSEKDLIKKIKMALSQYKNKILGVESILQTEYNNINNLRDDIEDAFKNKSFFHQAISKSEFEQAVNDPEKPLLVFEIYNKDFSLNKRNKNSKDNLHTMYFKGLMNENGYSIDIGSGELFFRKHSLKRKEAVIHTAKQPIKNKNSNNKKQTSTFDYDIVKDKRFTVDKFFLHLSIELNYKAPKISNNQKSKFKKDFNDKINQLLSQYPDTHIIGIDRGERHLLYYTLIDPKGNIVEQKSFNTIPTDRGYDVDYHQKLHKKEKERDRARKEWGTIENIKELKAGYLSQIVHQLAKLIIKHNAIVVLEDLNRGFKRGRFKVEKQVYQKFEKALIDKLNYLVFKDRDAKEAGGYLNGYQLTAPFESFQKLGKQSGILYYVPAAYTSKIDPASGFIDFLKPKYESIEKAKAFFANFDSIRYNSSDDYFEFSFRYSQFDINHPDYKDAWVVCTHGMRLRNKRNTQGHWETTTVDVSDDLKRLFDKYSFFYHDGDNLIDQIIEYDEKQLFEQMIFALRTTLAMRYSRVGEEEDYILSPVKGPDGIFYDSRKVDGSLPKDADANGAYHIALKGAMLLDRMRQHDFDSHSKPDMFIKNGQWFAFASKRLWEK

SEQ ID NO: 224 - protein, 881 aa, unidentified
  REGION 1..881: note = Description of Unknown: uncultivated organism sequence
  REGION 1..881: note = Category: MG29 effectors
  REGION 1..881: note = Description: MG29-10 effector
VLHEQLKKLPNPQQPISSYLVSIIKQTQQDVELQKIIDGVKPLLQLESLSKARKAPELGNENDKGAVGFQQVQKIQRMLDGFMSVSHAVKLLHLVDGRKPIDMPDKDDSFYNGFAEVYEAYTDLTVTLYNKARNHLTKKLYTNDKIKINFDAPTLLNGWDANKESDNASILFEREGLYYLGIMHPKHKHLFNYTKGIDDIGNEKKTTAKDELYEKVAEKGDSGYRKIVYKLLPGVNKMLPKVFFSASRKDFFAPSEEVNRIRNTASHTKNGNPQKGHKKENFNLEDCHAIIDFFKVSLNKHPEWKDFNFSFSPTSSYEDLSGFYREVEHQGYRMDFQSIKESYIKDCVSEGKLFLFQIYNKDFSRYSKGKPNLHTLYWKGLFEPENLKDVVLKLNGEAEIFYRKHSIKREDRIIHKSGDTLDNKNTNNPKKTSKFEYDIVKDRRYTQDKFQFHVPITLNFKALGVNRFNDQINKALAQQKETCVIGIDRGERHLLYYTVVNSKGEIIEQDTLNTINTDKGYNVDYQQKLHTKEKEREKARKSWSSVENIKELKAGYLSHVVHKLAHLIIKHNAIVCLEDLNSGFKRGRFKVEKQVYQKFEKALIDKLNYLVFKENKANDAGGYLNAYQLTAPFESFEKLFKQTGILYYVRADYTSKIDPATGFIDFLRPRYESLAKSKTFFENIESFKFNQAKDYFEMEFDYKKMKPSQKLGRYQSKWKVCTFGDVRYQNRRNDKGVWESEVINVTKKLKALLDDHDIEYQQEQDLKEALILKKDTKFYKELFWLLKLTLSLRHSKSGTEEDFILSPVANEQGVFFDSRNASDTQPKDADANGAYNIALKGLWNLQQIKKHDWDAEKPKKLNLAMKNEEWFGFAQNKEYKN

SEQ ID NO: 225 - protein, 1316 aa, unidentified
  REGION 1..1316: note = Description of Unknown: uncultivated organism sequence
  REGION 1..1316: note = Category: MG29 effectors
  REGION 1..1316: note = Description: MG29-12 effector
MSKIYDQFTHLYKIQKTLRFELKPVGETAIYINDFKSQYLQDVVHQDEQRAEYYKVVKDIIDDYHRDYIEKKLSQSVDTATGVIWVTPEDLEEAYCDYQNLKDNPRDRETRDAWVKRQESLRKQLVEAFSNNNDLFKKELITRDLPALLKHQGKWEENKEAVESFNKFTTYFTGFNENRKNMYSDKDQSTAIAHRVMNENLPRFFNNYLSYQKIKDKQASLEFSVETPLLTQMGVSSIDDIFQPRYFINLFTQSGLDSYQELLGGKTDEHGKKTQGLNEQINLYNQQQLDTKDKLPRFTSLYKQILSDRETNSFIPDAFKDDKELLKTLQDYIDHATKKEGFLERLEKSIELLSVVDNEKVYVKKAGLTDISSAIFNSYGIIGAALWHHAENTLYPNSTRRPATETLIKRRKSFCEQDVFSVAELNRIITSYIAQLEAIDPLHQQLKELTDPRQPIRAYFLDVFQQSKQDSELDTCIKNVSPLLSLESLSKKRQAPTLEGDQGDKGYQQLHSIQKMLDAFMTISYKLKPLHLVKGRKAIDMPDMDMGFYAGFSEAYETYSDTIISLYNKTRNHLTKVPFSKEKIKLNFGNPTLLNGWDSNKEAANSSLIFEKDGLYYLGIMHPKHKYLFDYITGIDDIGNDKKIKKKELLRGEIEVDENQGYRKIVYKLLPGANKMLPKVFFSNKRQAYFSPSSEILHIRNTASHSKNGKPQKSHIKAAFNINDCHKIIDFFKASINKHPEWKAFDFQFSPTKKYQDLSEFYREVEQQGYKVDFHPIKQSYIDECVEQGKLFLFQIYNKDFSPYSKGKSNLHTLYWKGLFEPENLNDVVLKLNGEAEVFYRRHSIKVADRTIHRANEAISNKNKEFHKKEESTFNYDIIKDRRYTQDKFQFHVPITLNFNAQGVSHFEDKVNLALQKAEDTHVIGIDRGERHLLYYTIVNSKGEIIEQDTLNKISTDQGYVIDYQNKLHKKEKERDKARKSWSSIENIKELKAGYLSHVVHKLAELIIKYDAIVCLEDLNFGFKRGRFSVEKQVYQKFEKALIDKLNYLVFKTSETTSPGHYLNAYQLTAPFKSFEKLGKQSGVLFYVQAAYTSKIDPSTGFIDFLKPKYKSLSASKVFFETMSSIIFNAEKDYFEFSFDYKKFNPSQKFGQYTTQWKACSFGELRYHNKRNNKGIWETRPINVTKELKQLFDDAGIQYQIGQELKESIILVKDTKFYKTLFWLLRLLLSLRHSRTGTDDDFILSPIENEHGVFFDSRNATDKQPKDADANGAYNIALKGLWNLQQIKQWDGEKHLNLSMKNEDWLSFITVKPYKR

SEQ ID NO: 226 - protein, 1259 aa, unidentified
  REGION 1..1259: note = Description of Unknown: uncultivated organism sequence
  REGION 1..1259: note = Category: MG30 active effectors
  REGION 1..1259: note = Description: MG30-1 effector
MHLSQTFTNKYQVSKTLRFELRPQGKTKETFERWIAELRTEKPSANNLIAEDEQRAEDYKEVKGIIDRFHRKVIEESLESLKLEGLSAYEELYFKREKEDIDLKEIENLQIQMRKQIREAFVEHPVFKDLFKKELIQVHLKEWLTDKQEIDLVAKFQKFTTYFGGFHENRQNVYSPDAKATAVGYRMIHENLPKFLDNRRIFNKIIKAHNELDFSSINTELEELLQGTTVNDVFSLEFFNETLTQTGIDIYNHVLGGYSSETGQKIQGVNEKINLYRQKNGLKARELPNLKPLFKQILSESQTASFVIEQIESNSDLLDRLDNFHSLLTNFEFQGRNEVNVMTELKNMLAALDSYEHEQVYFKNGPSLTQLSQKMFGQWGVIHKALEYYYEQVLNPLQGKKLTKKYESDKQKWLKSKQFNLSLIQKALDGYVPTIDTLESVNLIETLAKLEDKDGADLCIEVDKAYEHVAKLIEQGALSESYAQKKKEKQVIKEYLDGLMSLLHSVKPFYTTEVDIEKDAGFYGLFEPLYEQLNLVIPIYNLVRNYLTQKPYSTEKFKLNFENNTLLDGWDQNKEKANTCVLLRKEGNYFLAVMHKQHNKVFEELPQSEEDTYKKVVYKLLPRANNMLPKVFFSKKNIDYYKPEKELLAKYKLGTHKKGSNFSLNDCHALIDFFKDSISKHPDWAQFNFEFSPTKTYEDLSHFYKEVEHQGYKVNYAKVDVSYINQLVDDGKIFLFQIYNKDFSPYSKGKPNLHTLYWKAVFDERNLADTVYILNGKAEIFFREKSLNYSKEIMAKGHHRDELKDKFTYPIIKNKRFALDKFQFHVPLTMNFKAGSNPNINDRALDFLKNNPDIKIIGLDRGERHLLYLSLIDQKGNIIEQYTLNEIVSKYQGQTFKKDYHKLLDEKEKERDDARKNWDVIETIKELKEGYLSQVVHKITQMMIEHNAIVVLEDLNAGFKRGRHKVEKQVYQKFEKMLIDKLNYLVFKDHDKEKPGGLLNALQLTNKFESFQKLGKQSGLLFYVPAALTSKIDPATGFTNFLRPKHESILKSKSFIEGFTGIHFNSEKEYFEFKFDLKNIPNTRFPDDTKTEWTVCTTNVPRYWWNKSLNEGKGGQEKVLVTQRLQDLLARYDLGYAKGKDLKEDILTIEDASFYKELLWLLNVTVSLRHNNGKHGEQEEDAIISPVANDKGEFFNSSKANPSEPKDADANGAYHIALKGLWALRTINAYDKKEWRGIKLAISNKEWLQFVQQKPFLKT

SEQ ID NO: 227 - protein, 834 aa, unidentified
  REGION 1..834: note = Description of Unknown: uncultivated organism sequence
  REGION 1..834: note = Category: MG30 effectors
  REGION 1..834: note = Description: MG30-2 effector
KALDGYVPTIDTLESVNLIETLAKLEDKDGADLCIEVDKAYEHVAKLIEQGALSESYAQKKKEKQVIKEYLDGLMSLLHSVKPFYTTEVDIEKDAGFYGLFEPLYEQLNLVIPIYNLVRNYLTQKPYSTEKFKLNFENNTLLDGWDQNKEKANTCVLLRKEGNYFLAVMHKQHNKVFEELPQSEEDTYKKVVYKLLPRANNMLPKVFFSKKNIDYYKPEKELLAKYKLGTHKKGSNFSLNDCHALIDFFKDSISKHPDWAQFNFEFSPTKTYEDLSHFYKEVEHQGYKVNYAKVDVSYINQLVDDGKIFLFQIYNKDFSPYSKGKPNLHTLYWKAVFDERNLADTVYILNGKAEIFFREKSLNYSKEIMAKGHHRDELKDKFTYPIIKNKRFALDKFQFHVPLTMNFKAGSNPNINDRALDFLKNNPDIKIIGLDRGERHLLYLSLIDQKGNIIEQYTLNEIVSKYQGQTFKKDYHKLLDEKEKERDDARKNWDVIETIKELKEGYLSQVVHKITQMMIEHNAIVVLEDLNAGFKRGRHKVEKQVYQKFEKMLIDKLNYLVFKDHDKEKPGGLLNALQLTNKFESFQKLGKQSGLLFYVPAALTSKIDPATGFTNFLRPKHESILKSKSFIEGFTGIHFNSEKEYFEFKFDLKNIPNTRFPDDTKTEWTVCTTNVPRYWWNKSLNEGKGGQEKVLVTQRLQDLLARYDLGYAKGKDLKEDILTIEDASFYKELLWLLNVTVSLRHNNGKHGEQEEDAIISPVANDKGEFFNSSKANPSEPKDADANGAYHIALKGLWALRTINAYDKKEWRGIKLAISNKEWLQFVQQKPFLKT

SEQ ID NO: 228 - protein, 879 aa, unidentified
  REGION 1..879: note = Description of Unknown: uncultivated organism sequence
  REGION 1..879: note = Category: MG30 effectors
  REGION 1..879: note = Description: MG30-3 effector
VIHKALEYYYEQVLNPLQGKKLTKKYESDKQKWLKSKQFNLSLIQKALDGYVPTIDTLESVNLIETLAKLEDKDGADLCIEVDKAYEHVAKLIEQGALSESYAQKKKEKQVIKEYLDGLMSLLHSVKPFYTTEVDIEKDAGFYGLFEPLYEQLNLVIPIYNLVRNYLTQKPYSTEKFKLNFENNTLLDGWDQNKEKANTCVLLRKEGNYFLAVMHKQHNKVFEELPQSEEDTYKKVVYKLLPRANNMLPKVFFSKKNIDYYKPEKELLAKYKLGTHKKGSNFSLNDCHALIDFFKDSISKHPDWAQFNFEFSPTKTYEDLSHFYKEVEHQGYKVNYAKVDVSYINQLVDDGKIFLFQIYNKDFSPYSKGKPNLHTLYWKAVFDERNLADTVYILNGKAEIFFREKSLNYSKEIMAKGHHRDELKDKFTYPIIKNKRFALDKFQFHVPLTMNFKAGSNPNINDRALDFLKNNPDIKIIGLDRGERHLLYLSKNKKKGNIIEQYTLNEIVSKYQGQTFKKDYHKLLDEKEKERDDARKNWDVIETIKELKEGYLSQVVHKITQMMIEHNAIVVLEDLNAGFKRGRHKVEKQVYQKFEKMLIDKLNYLVFKDHDKEKPGGLLNALQLTNKFESFQKLGKQSGLLFYVPAALTSKIDPATGFTNFLRPKHESILKSKSFIEGFTGIHFNSEKEYFEFKFDLKNIPNTRFPDDTKTEWTVCTTNVPRYWWNKSLNEGKGGQEKVLVTQRLQDLLARYDLGYAKGKDLKEDILTIEDASFYKELLWLLNVTVSLRHNNGKHGEQEEDAIISPVANDKGEFFNSSKANPSEPKDADANGAYHIALKGLWALRTINAYDKKEWRGIKLAISNKEWLQFVQQKPFLKT

SEQ ID NO: 229 - protein, 1307 aa, unidentified
  REGION 1..1307: note = Description of Unknown: uncultivated organism sequence
  REGION 1..1307: note = Category: MG31 active effectors
  REGION 1..1307: note = Description: MG31-1 effector
MKTVEQFCGQKNGYSRSITLRNRLIPVGKTEENLQKANMLEADFNRAKAYSEVKNLIDDFHRSFIEDVLSNTKLGWKNLYDVFDLCQLEKDKIKKEKQKKDLQSIQAAMRKAIVKKFKDDERFSKLFKKELLSDLLPSIIKNDESGTITDKNEALKVFKGFSTYFSGFHQNRENLYSDEAKATAISNRIVNENFPKFHANVKVFEYLQKNFPEIISDTEESLKAFLNGKKLSEIFNPEKFNAVLCQSGIDFYNTVIGGISDENGKQKIQGLNEKINLASQQLPPEEKSKLKKKMTVLYKQILSDKKTASFIPIGFEKSEEVYKSIKQLKEEYFDKAYKLIERTFSAPDYDLSEIFVPAKELTAFSLAIFGNWSILNDGLFLLEKDNSKKELTEKQVENLHKEISKKDYSLADLQKAYERWANENGVPADKTVKSYFSLSELRANEKTKEKEPVDIVEKIKITYEKIDFENIENLQAEKEAATPIKNFLDEVQCLFHHLKLVDYRGEEQKDSAFYSKLDEILIPLSEIISLYNKVRNFVTKKPGEVKKIKLNFECPTLANGWDLNKESSNDAIILRKNGKYFLGIFNPEDKPKFSNDSICKNQQESHYEKMIYKLLPGPNKMLPKVFFSTKGQETFLPPKDLLLGYEQGKHKKGESFDKSFMHKLIDWFKYAINQHEDWKNFNFKFSPTESYEDMSGFYKEVELQGYKITFQNISENYIDSLIDSGKLYLFQIYNKDFAEKADGKKNLHTLYWENLFSPENLKDICLKLNGDAELFYRPASENLKVIKHEKDSILVNRTTTDGETIRDETYQEIYKFKNPAKQKKGFKLSNEAKSLLDSGKVVFKKARFEITKDKHFLQNTYLFHCPITMNFKAPEITGKKFNERVLEYLRNNPDVKIIGLDRGERHLIYLSLINQNGEIELQKTLNIVEQIRGDKENPVSVNYQEKLVQKEGDRNKARKNWQTIGNIKELKEGYLSNIVHEIAKLMVEQNAIVVMEDLNFGFKRGRFAVERQVYQKFENMLIEKLNYFAFKDRPATEPGGILNAYQLTDKSANISDVGKQCGWIFYIPASYTSKIDPKTGFANLFNTKGLTNVEKKKEVFSKFDSIRYDSKENCFVFSVNYSKLGDNADFKKNWEIYTHGERIVYSRKENKTFSVNPTENLEKAFDGQFAQSGINWKNKENLIDLIENISAEKSNAKFFDELLRSFTTTLQMRNSVPNTEEDYLISPVKAADGTFFDSRNEIAKGKDSGGKWISKFPVDADANGAYHIALKGLYLLQNNFNLNPKGYIENISNADWFKFVQKKEYLK

SEQ ID NO: 230 - protein, 759 aa, unidentified
  REGION 1..759: note = Description of Unknown: uncultivated organism sequence
  REGION 1..759: note = Category: MG31 effectors
  REGION 1..759: note = Description: MG31-2 effector
GSKAAHIFKSDSCFYLGIINKKLDKTDIDSIYQNGNTMIEKIVYDFQKPDNKNTPRLFIRSKGNAYAPAVSTYDLPIESVIDIYDKGLFKTEYREKNLEVYKKSLIKLIDYFKLGFSRHDSYKHYNFCWKETKDYADISEFYADTMRSCYQLKTERINFDNLMTLVDEGKLFLFQIYNKDFSTGKDGGNGSTGRKNMHTLYWENLFSKENLDDVVLQLSGGAELFFRQKSLEEENATIHEKNSFIVNRTYLKEVKGNKEIYETIPEEIYQEIYQKLNGKADTISDEAQELLSSGKVKYRAAPHRIIKDRHFTQDTYLFHCPISLNFKAQEITGKKFNDRVLEKIKNNSEIKIIGLDRGERNLIYLSLINQKGEIELQKTLNLVEQQKRLIDYQGKLVQKEGDRDKARKNWQTISNIKELKEGYLSAVVHELATLMVDNNAIVVMEDLNFGFKRGRFAVERQVYQKFEHMFIDKLNYLVFKDRKVTEPGGVLNAYQLTDKLEAFKDLGKQSGFLFYVPAGYTSKIDPATGFANLLDMTNLTNVQKKRDFFAKFDSICFDEEKQMFAFTFDYKNFNRKDAQEMSRTKWTVYSNGKRIQFCGKGKASKHIENLTEEFKTLFREFDYQNGNNILDSILEVGAALKAGEKPTKEIADFWDKLLVLFKLVLQMRNSDAKTGDDYIISPVMSESGNFFDSREQEKLGNNAKLPKDADANGAYHIALKGLYLLKAFDKTPEDQLKKVDMKISNADWFRFAQEKEYNK

SEQ ID NO: 231 - protein, 753 aa, unidentified
  REGION 1..753: note = Description of Unknown: uncultivated organism sequence
  REGION 1..753: note = Category: MG31 effectors
  REGION 1..753: note = Description: MG31-3 effector
IFKSDSCFYLGIINKKLDKTDIDSIYQNGNTMIEKIVYDFQKPDNKNTPRLFIRSKGNAYAPAVSTYDLPIESVIDIYDKGLFKTEYREKNLEVYKKSLIKLIDYFKLGFSRHDSYKHYNFCWKETKDYADISEFYADTMRSCYQLKTERINFDNLMTLVDEGKLFLFQIYNKDFSTGKDGGNGSTGRKNMHTLYWENLFSKENLDDVVLQLSGGAELFFRQKSLEEENATIHEKNSFIVNRTYLKEVKGNKEIYETIPEEIYQEIYQKLNGKADTISDEAQELLSSGKVKYRAAPHRIIKDRHFTQDTYLFHCPISLNFKAQEITGKKFNDRVLEKIKNNSEIKIIGLDRGERNLIYLSLINQKGEIELQKTLNLVEQQKRLIDYQGKLVQKEGDRDKARKNWQTISNIKELKEGYLSAVVHELATLMVDNNAIVVMEDLNFGFKRGRFAVERQVYQKFEHMFIDKLNYLVFKDRKVTEPGGVLNAYQLTDKLEAFKDLGKQSGFLFYVPAGYTSKIDPATGFANLLDMTNLTNVQKKRDFFAKFDSICFDEEKQMFAFTFDYKNFNRKDAQEMSRTKWTVYSNGKRIQFCGKGKASKHIENLTEEFKTLFREFDYQNGNNILDSILEVGAALKAGEKPTKEIADFWDKLLVLFKLVLQMRNSDAKTGDDYIISPVMSESGNFFDSREQEKLGNNAKLPKDADANGAYHIALKGLYLLKAFDKTPEDQLKKVDMKISNADWFRFAQEKEYNK

SEQ ID NO: 232 - protein, 1016 aa, unidentified
  REGION 1..1016: note = Description of Unknown: uncultivated organism sequence
  REGION 1..1016: note = Category: MG31 effectors
  REGION 1..1016: note = Description: MG31-4 effector
KKMTVLYKQILSDKKTASFIPIGFEKSEEVYKSIKQFKEEYFDKVYKLIEKTFSVPDYELSEIFVPAKELTAFSLAIFGNWSILNYGLFLLEKDNSKKELTEKQVENLHKEISKKDYSLADLQNAYERWANENGVPADKTVKSYFSLSELRANEKTKEKEPVDIVEKIKTAYEKIDFENIENLQAEKEAAVPIKNFLDEVQCLFHHLKLVDYRGEEQKDSAFYSKLDEILIPLSEIISLYNKVRNFVTKKPGEVKKIKLNFECPTLANGWDLNKESSNDAIILRKNGKYFLGIFNPEDKPKFSNDSICKNQEESHYEKMIYKLLPGPNKMLPKVFFSTKGQETFLPPKDLLLGYEQGKHKKGDAFDKSFMHKLIDWFKYAINQHEDWKNFNFKFSPTESYEDMSGFYKEAELQGYKITFQNISENYTDSLIDSGKLYLFQIYNKDFAEKADGKKNLHTLYWENLFSPENLKDICLKLNGEAELFYRPASENLKVIKHEKDSILVNRTTTDGETIRDEIYKEIYKFKNPAKQEKGFKLSDEAKSLLDSGKVVFKKARFEITKDKHFLQNTYLFHCPITMNFKAPEITGKKFNERVLEYLRNNPDVKIIGLDRGERHLIYLSLINQNGEIELQKTLNIVEQIRGDKEKPVPVNYQEKLVQKECDRDKARKNWQTIGNIKELKEGYLSNIVHEIARLMVEQNAIVVMEDLNFGFKRGRFAVERQVYQKFENMLIEKLNYFAFKDRPATESGGILNAYQLTDKSANISDVGKQCGWIFYIPASYTSKIDPKTGFANLFNTKGLTNVEKKKEFFSKFDSIRYDSKENCFVFSVNYSKLGDNADFKKNWEIYTHGERIVYSRKENKTFSVNPTENLEKTFDEQFVQSGINWKNKENLIDLIENISAEKSNAKFFDELLRSFTTTLQMRNSVPNTEEDYLISPVKAADGTFFDSRNEIVKGKNSSGKWISKFPVDADANGAYHIALKGLYLLQNNFNLNEKDYIENISNADWFKFVQEKEYLK

SEQ ID NO: 233 - protein, 1324 aa, unidentified
  REGION 1..1324: note = Description of Unknown: uncultivated organism sequence
  REGION 1..1324: note = Category: MG31 effectors
  REGION 1..1324: note = Description: MG31-5 effector
MFMKAIDNFCGQKNGYSRSITLRNALVPVGRTEENIQKLKLLEKDLERSRAYVEVKKLIDGFHRVFIEEVLSKTDLEWGPLYDQFELFQNEKDKQKKNKIKKDLETLQAAMRKQIVKKFKEDERFDKLFKKELLSDFVPAVITADESGSISDKKAALDAFKGFATYFTGFHQNRQNMYSEEAQSTAISNRIVNENFPKFYANVKLFEYLQKEFPEIIKDTEKSLANFLHGKKLASVFSKEGFNAVLCQSGIDFYNTVIGGISGEAGDKKVQGLNEKINLASQQLPAEEKHKLKRKMTVLYKQILSDRAAASFIPEGFESSEQVYESLKQFKEQSLDKAVPLIRELVDTNDCDLNQIYVPAKEVTDFSLKLFANWSIVHDGMFLLEKDSVKKSLSEKQVEALRKDIAKRDCTLSDLQKAYERWAKEYNIPVEKAARDYFNIAELRIDEKSKEKKFVNILKELDEKYCKINFEKKENLIKEKEAAAPIKDFLDEAQSLYHYLKIVDYRGEEQKDSDFYSKYDEILQTLSEIVPLYNKTRNYVTKKPNEVKKVKLNFDCPTCAKGWSLNNELMYGSIILRRGASYYLGIMNKEAHKSFKSYPGPIGDESCFEKMVYLQAADPSKDIPNLLKIDGITVKKNGRKDFDGVNRQIENYRNTYLPKDINEIRKSKKYLRSSDNFNKEALNKYIDYYKTLTAEYFSDYKFVFKPSKDYSSFQEFTDDVNSQAYQIQFITVSESYIDSLVDSGKLFLFKIYNKDYSTGKGGGNGSTGKKNLHTLYWENLFSEENLRDVCLKLNGEAELFWRDANPDVKDVCHKKGSALVNRTTLDGATIPEEIYQEIYKFKNNIAKSISDKAKELLDSGKVVCKEAKFDITKDRRFTKPTYLFHCPITMNFKAPEISNKDFNAKVQKILKDNPDVKIIGLDRGERHLIYLSLINQKGEIELQKTLNLVEQVRNDKTVSVNYQEKLVQKEGGRDKARKNWQTIGNIKELKEGYLSNIVHEIAELMVENNAIVVMEDLNFGFKRGRFAVERQVYQKFENMLIEKLNYLVFKDRKVGEPGGVLNAYQLANKSANVSDVGKQCGWIFYIPAAYTSKIDPKTGFANLFYTTGIANVEKKKEFFDKFDSVRFDRKTNSFVFAFDYGNFSDNADFKKKWEVYSCGERLVYSKADKTKICASPTEDLKALFDKQGINWNSEENFIDQIHAVQAERENCAFYDGLYRSFMAILQMRNSKPNSSNQEDDYLISPVMAVDGTFYDSRVEAAKGKDAEGKWISKLPVDADANGAYHIALKGLYLLKNDFNLNDKGYIENISNADWFMFAQRRFEN

SEQ ID NO: 234 - protein, 1306 aa, unidentified
  REGION 1..1306: note = Description of Unknown: uncultivated organism sequence
  REGION 1..1306: note = Category: MG31 effectors
  REGION 1..1306: note = Description: MG31-6 effector
MKAVEKFCGQKNGYSRSITLRNRLIPIGKTEENIQKLKLLDKDMERAKAYDEVKKLIDEFHRTFIEEVLSKASFEWAPLYDQFDLFQTEKDKLKKNKIKKELEVLQGVMRKKIVESFKKDKRFEKLFKKELLTEFVPAVIKNDESGTITDKQAALNVFKGFATYFTGFHQNRQNMYSEEAQSTAISNRIVNENFPKFYANVKVFEYLKNNYPEIINETEKSLAEFLKGKKLADIFSPESFNAVMSQRGIDFYNTVIGGISDESGSKKIQGLNEKINLASQQLPSEEKYKLKKKMTILYKQILSDRNTASFIPVGFEKSEEVYESVKHFKEEILDKVITNTKKLFDSVDYDLGQIYVPAKEVTEFSLKVFGNWSISHNGLFLLEQDMAKKALTEKQIEALKKEISKRDLSLSDLQNAYERWTKENDVKAEKNVRNYFKLTELRVDEKSKEKDSIEILKNLDVLYSKIDFKKQENLIKEKTSATPIKDYLDEIQNLYHYLKLVDYRGEEQKDTDFYSKYDEIIQALSEIIPLYNKVRNFVTKKPNEIKKVKLNFDCPTLANGWDLNKESSNDAIILRKNGNYYLGIFNPKDKPKFEYNNEDSGYEKMIYKLLPGPNKMLPKVFFSAKGLETFRPPKDLVLGYEEGKHKKGDNFDKVFMHKLIDWFKYAINQHEDWKNFNFKFSPTEFYEDMSGFYKEVELQGYKITFSKVSDNCINSLIDSGKLFLFQIYNKDYSTGEEGGNGSTGKKNQHTLYWENLFSEENLRDVCFKLNGEAEFFWRDANPNVKAVCHKKDSVLVNRTTSDGKSIPEEIYQEIYKYKNPEKQEKEFTLSKDAKELLESGTVVCKKAKFTITKDRHFTQQTYLFHCPITMNFKASEITGRKFNEHVQEILRNNPEVKVIGLDRGERHLIYLSLINQKGEIELQKTLNLVEQVRNDKTVSVNYQEKLVQKEVERDKARKSWQSISNIKELKEGYLSNIVHEIAKLMVENNAIVVMEDLNFGFKRGRFPVERQVYQKFENMLIEKLNYLVFKDKNVTEPGGVLNAYQLADKAVNVSDVGKQCGWIFYIPASYTSKIDPKTGFANLFYTAGLTNIEKKKDFFDKFDSIRYDRKLDSFVFGFDYSNFSDNADYNKKWELYSRGERLVYSKAEKSTISVNPTENLKVLFDKQGIVWDSEDNFIDQIHAVQAERDNVPFYDGLYRSFTAILQMRNSVPNSSKQEDDYLISPVMADDGNFYDSRLEAAKGKDEKGNWISKLPVDADANGAYHIALKGLYLLKNDFNLNEKGYIENISNADWFKFVQNKEYQDC

SEQ ID NO: 235 - protein, 789 aa, unidentified
  REGION 1..789: note = Description of Unknown: uncultivated organism sequence
  REGION 1..789: note = Category: MG31 effectors
  REGION 1..789: note = Description: MG31-7 effector
MKSIEIFCGQSNGYSRSITLRNRLIPIGKTEENIKKLKLLDNDINRSKAYVEVKKLIDDFHRSFIEDVLSKVKLEWGPLYVQFDLFQNEKDKQKKNKIKKELETLQGVMRKKIIKKFKDDDRFDKLFKKELLTEFVPTVIKNDESGTISDKQAALDEFKGFATYFTGFHQNRQNMYSAEAQSTAISNRIVNENFPKFYANIKVFEYLQKEYPAIITETEESLSEILKGKKLADIFCADGFNSVLSQSGIDFYNTIIGGVAGEAGTKKLQGINEKINLTRQQLPVEEKSKLKRKMTVLYKQILSDRRTASFIPVGFESSDEVYESVKQFKEDSLNKILSEMKILFEKSDYELSQIYVPAKEVTEFSLKLFGNWSILHDGLFLIEKDNAKKSLSENQIDILRKEIAKRDCSLADLQSAYKRWAKENDVKVEKTVMNYFRIAELRAEEKSKEKASVEILKELESAFDKIDFEKRENLIKEKESATPIKEFLDEVQNLYHYLKLVDYRGEEQKDTDFYSKYDEILQTLSEIIPLYNKVRNFVTKKPNEVKKVKLNFDNVSLAKGWDVNKESDYTCILLRRNGLYYLGVLNPKDKPKFDSENNGETSINKNDCYEKLVYKYFKDVTTMIPKCSTQLNDVKQHFKNSNEDYILENDNFIKPLVISKRIFDLNNKTFDEKKMFQIDYYRNTGDLKGYTEAVKDWISFCITFVHSYKSTCIYDFSSLGDCSQFKQVDQFYKEINLLLYKIWFVNVTAEKINSLVDSGKLFLFQIYNKDYSTGKDGGNGSTGKKNLHT

SEQ ID NO: 236 - protein, 1307 aa, unidentified
  REGION 1..1307: note = Description of Unknown: uncultivated organism sequence
  REGION 1..1307: note = Category: MG31 effectors
  REGION 1..1307: note = Description: MG31-8 effector
MKSIEQFCGQKNGYSRSITLRNRLIPVGKTEENLQKANMLEADFERAKAYAEVKNLIDDFHRSLIEDVLSNAKLDWKKLYVQFDLYQSEKDKLKKTKQKKDLQSVQGAMRKAIVKKFKDDERFSKLFKKDLLSDLLPSIIKNDESGTITDKNEALKVFKGFATYFSGFHQNRENLYSDEAKATAISNRIVNENFPKFHANVKVFEYLQKNFPKIISDTEESLKEFLNGKKLSEIFSPENFNAVLCQSGIDFYNTVIGGISDENKKQKIQGLNEKINLASQQLPPEEKSKLKKKMTVLYKQILSDKKTASFIPVGFEKSEEVYKSIKQFKEEYFDKAYKLIEKTFSAPDYDLSEIFVPAKELTAFSLAIFGNWSILNDGLFLLEKDKAKNELTEKQVENLHKEISKKDYSLADLQIAYERWANENGVQSDKTVKSYFTLSELRANEKTKKKEPIDIIEKIRIAYENIDFENIENLQAEKDAATPIKNFLDEVQCLFHHLKLVDYRGEEQKDSAFYSKFDEILIPLSEIIPLYNKVRNFVTKKPGEVKKIKLNFECPTLANGWDLNKESSNDAIILRNDGKYFLGIFNPENKPKFSNDSICKNQEEPHYEKMIYKLLPGPNKMLPKVFFSTKGQETFLPPKDLLLGYEQGKHKKGETFDKSFMYKLIDWFKYAIDQHEDWKNFNFQFSPTESYEDMSGFYKEVELQGYKITFQNISENYIDSLVDSGKLYLFQIYNKDFAEKADGKKNLHTLYWENLFSPENLKDICLKLNGEAELFYRPASENLKIIKHEKDSILVNRTTTDGETIRDEIYQEIYKFKNPAKQEKGFKLSDEAKSLLDSGKVVLKKARFEITKDKHFLQNTYLFHCPITMNFKAPEITGKKFNERVLEYLRNNPDVKIIGLDRGERHLIYLSLINQNGEIELQKTLNIVEQIRGDKENPVSVNYQEKLVQKEGDRDKARKNWQTIGNIKELKEGYLSNIVHEIAKLMVEQNAIVVMEDLNFGFKRGRFAVERQVYQKFENMLIEKLNYFAFKDRTATEPGGILNAYQLTDKSANVSDVGKQCGWIFYIPASYTSKIDPKTGFANLFNTKGLTNVEKKKEFFAKFDSIRYDSKEDCFVFNVNYSKLGDNADFRKNWEIYTHGERIVYSKKENKTFSVNPTENLKKAFDGQFAQSGIEWKNKENLIDLIENICAEKSNAKFFDELLRSFTTTLQMRNSVPNTEEDYLISPVKAADGTFFDSRNEIAKGKDSSGKWISKFPVDADANGAYHIALKGLYLLQNNFNLNEKGYIENISNADWFKFVQKKEYLK

SEQ ID NO: 237 - protein, 1335 aa, unidentified
  REGION 1..1335: note = Description of Unknown: uncultivated organism sequence
  REGION 1..1335: note = Category: MG31 effectors
  REGION 1..1335: note = Description: MG31-9 effector
MKTIDDFCGQKNGYSRSITLRNALIPIGKTEENIQKLKLLDKDVERSKAYVEVKKLIDDFHRTFIEEVLSKTKLEWGLLYKQFELYQNEKDKQKKNKIKKQLEQLQSGMRKDIVKQFKKDERFDKLFKKELLSDFVPTVIKNDESGTISDKQAALDAFKGFATYFTGFHQNRQNMYSEEAQSTAISNRIVNENFPKFYANVKLFEYLQKEFPEIIKETEDSLSNFLNGKRLAEIFSENGFNAVLSQNGIDFYNTVIGGISDEAGSKKLQGLNEKINLASQQLPKEEKYKLKRKMTVLYKQILSDRSTASFIPVGFETSEEVYESVKQFKEQNFDKVVSLVKKLSSKTDYDLNQIYVPAKEVTEFSLKLFGNWSILHDGLFLLEKDNAKKNFSEKQMETLRKEIAKRDCSLAELQKVYEELCSYNGEQLGINEKGYLVKKTYNDKDKIELNVRDNFFRFTELRLDENTKEKSFVEILKEVNKNYLKIDFDKQENLIKEKESSTPIKNFLDEVQNLYHYLKLVDYRGEEQKDSDFYSELDKILLELSEIVPLYNKVRNFVTKKPNEIKKVKVMFDCSSLLNGWGTDYGTKEAHIFIDSGKYYLGIVNNKLDKEDVESLKVVGEHMISKVIYDFQKPDNKNTPRLFIRSKGDSYAPAVSKYNLPITDIIDIYDKGLFKTEYRKINPEEYKKSLEKIIDYFKLGFSRHDSYKHYNFSWKKTTDYADIADFYSDTIKSCYQLKFEKVNYGNLVSLVDSGKLFLFQIYNKDYSTGKDGGNGSTGNKNLHTLYWENLFSEENLRDVCLKLNGEAELFWRDANQNVKDVCHKKGSVLVNRTMTDGSTIPEDIYQEIYKFKNKKSESLSDKAKELLDSGKVVCKEARFDITKDRHFTKQTYLFHCPITMNFKASEISNKDFNSKVQTLLKNNSDVKIIGLDRGERHLIYLSLINQKGEIELQKTLNLVEQVRNDKTVKVNYQEKLVQKEGDRDKARKNWQTIGNIKELKEGYLSNIVHEIAKLMVENNAIVVMEDLNFGFKRGRFAVERQVYQKFENMLIEKLNYLVFKDKKLTESGGVLNAYQLTNKSANVSDVGKQCGWIFYIHAAYTSKIDPKTGFANLFYTAGLTNVEKKKEFFDKFDSIRFDSKTDSFVFSFDYSNFSDNADFKKNWDVYSRGERLVYSKAERTAVCVNPTENLKALFEKQGINWNTEDNFIDQIQAVQAERENCSFYDGLYRSFMAILQMRNSKPNSSNQEDDYLISPVKAEDGTFYDSRVEAAKGKDSNGRLISKLPVDADANGAYHIALKGLYLLKNDFNLNDKGYIENISNADWFKFAQEKDYAE

SEQ ID NO: 238 - protein, 1306 aa, unidentified
  REGION 1..1306: note = Description of Unknown: uncultivated organism sequence
  REGION 1..1306: note = Category: MG31 effectors
  REGION 1..1306: note = Description: MG31-10 effector
MKTIENFCGQKNGYSRSITLRNRLIPIGKTEENIEKLQLLDNDIKRSKAYVEVKTMIDDFHRSFIEDVLSKAKLEWGPLYDLFDLFQNEKDKQKKSKIKKELETIQGVMRKQIVKKFKEDDRFDKLFKKELLTEFVPTVIKADESGTISDKRAALDVFKGFATYFTGFHQNRQNMYSEEAKATAISNRIVNENFPKFYANVKVFECLQKEYPEIITETEASLSEILNGKKLADIFSADGFNSVLSQSGIDFYNTIIGGIAGEAGTQKLQGVNEKINLARQQLPEEEKSKLKRKMTVLYKQILSDRSTASFIPVGFESSDEVYESVKQFKEDSLNKILSEIKTLFEKSDYDLSQIYVPAKEVTDFSLKLFGNWSILHDGLFLIEKDNAKKTFTEKQIENIRKDIAKRDCSLADLQNAYERWEKENDVKAEKTVKNYFKIAELRADEKSREKTSVEILNKIESAFEKIDFEKRDNLIKEKETAAPIKDFLDEVQNLYHYLKLVDYRGEEQKDTDFYSKYDQILQTLSEIVPLYNKVRNFVTKKPNEVKKVKLNFDCPTLASGWDLNKESSNDAILLRKDGNYYLGIFNSKDKPKFENCSTDGECYEKMIYKLLPGPNKMLPKVFFSTKGQETYLPSKEILLGYEEGKHKKGDNFDKDFMHKLIDWFKTAINQHEDWKNFNFKFSQTESYEDLSGFYKEVESQGYKIIFKKVSESYINSLVDSGKLFLFQIYNKDYSTGKDGGNGSTGKKNLHTMYWENLFSEENLRDVCLKLNGEAELFWRDANPDVKAVCHKKGSVLVNRTTSDGETIPEEIYQEVYKFKNPDKQENGFKLSDAAKELLDSGKVVCKEAKFDITKDRHFTQKTYLFHCPITMNFKASEITGRKFNEKVQQALKNNPDVKIIGLDRGERHLIYLSLINQKGEIELQKTLNLVEQVRNDKTVSVNYQEKLVQKEGERDKARKNWQSINNIKELKEGYLSNIVHEIAELMVENNAIVVMEDLNFGFKRGRFAVERQVYQKFENMLIEKLNYLVFKDKKVTEPGGVLNAYQLTDKSANISDVGKQCGWIFYIPAGYTSKIDPKTGFANLFYTAGLTNIEKKKDFFDRFDSIRYDRKTDSFVFSFDYSGVSDNADFNKKWEMYSRGERLVFSKAEKSIVRVNPTENLKALFDKQGISWSSEDNIIDQIQAVQAERENCAFYDGLYRSFTAILQMRNSVPNSSKEEDDYLISPVMAEDGTFYDSREEAAKGKTTDGKWISKLPVDADANGAYHIALKGLYLLKNNFNLNEKGYIENISNADWFKFVQEKKYAK

SEQ ID NO: 239 - protein, 1305 aa, unidentified
  REGION 1..1305: note = Description of Unknown: uncultivated organism sequence
  REGION 1..1305: note = Category: MG31 effectors
  REGION 1..1305: note = Description: MG31-11 effector
MKTIENFCGQKNGYSRSITLRNRLIPIGKTEENIEKLQLRDKDIKRSKAYVEVKTMIDDFHRAFIEEVLSKAKLEWGPLYDLFDLFQNEKDKQKKSKIKKELETIQGVMRKQIVKKFKDDDRFDKLFKKELLTEFVPTVIKADESGTISDKRAALDVFKGFATYFTGFHQNRQNMYSEEAKATAISNRIVNENFPKFYANVKVFECLQKEYPAIITETEEALSEILNGKKLADIFSADGFNSVLSQSGIDFYNTIIGGVAGEAGTQKLQGINEKINLARQQLPTEEKNKLKRKMSVLYKQILSDRSTASFIPIGFESSDEVYESVKQFKEQSLDNVISAAKELFEKSDYDLSQIYVPAKEVTDFSLKLFGNWSILHDGLFLIEKDNAKKSFTEKQIENLRKDIAKRDCSLADLQNAYERWAKENDVKAEKTVKNYFKIAELRADEKSREKTSVEILNKIESAFEKIDFEKRDNLIKEKETAAPIKDFLDEVQNLYHYLKLVDYRGEEQKDTDFYSKYDEIAQTLSEIVPLYNKVRNFVTKKPNEVKKVKLNFDCPTLASGWDLNKESSNDAILLRKDGNYYLGIFNSKDKPKFDNCSTEGECYEKMIYKLLPGPNKMLPKVFFSIKGQETYLPPEEILLGYEEGKHKKGDNFDKDFMYKLIDWFKTAINQHEDWKNFNFKFSQTESYEDLSGFYKEVESQGYKITFQKVAESYINSLVDSGKLFLFQIYNKDYSTGNDGGNGSTGKKNLHTLYWENLFSEENLRDVCLKLNGDAELFWRDANPDVKAVCHKKGSVLVNRTTSDGETIPEEIYQEVYKFKNPDKQEKSFKLSDAAKKLLDSGKIVCKEAKFDITKDRRFTKPTYLFHCPITMNFKAPEISNKDFNAKVQKILKDNPDVKIIGLDRGERHLIYLSLINQKGEIELQKTLNLVEQVRNDKTVSVNYQEKLVQKEGGRDKARKNWQTIGNIKELKEGYLSNIVHEIAELMVENNAIVVMEDLNFGFKRGRFAVERQVYQKFENMLIEKLNYLVFKDRKVGEPGGVLNAYQLANKSANVSDVGKQCGWIFYIPAAYTSKIDPKTGFANLFYTAGLTNVEKKKEFFDKFDSVRFDRKTNSFVFAFDYGNFSDNADFKKKWEVYSCGERLVYSKADKTAICASPTEDLKTLFDKQSINWNSEENFIDQIHAVQAERENCAFYDGLYRSFMTILQMRNSKPNSSNQEDDYLISPVMAADGTFYDSRVEAAKGKDAEGKWISKLPVDADANGAYHIALKGLYLLKNDFNLNDKGYIENISNADWFRFAQSRFEN

SEQ ID NO: 240 - protein, 1237 aa, unidentified
  REGION 1..1237: note = Description of Unknown: uncultivated organism sequence
  REGION 1..1237: note = Category: MG31 effectors
  REGION 1..1237: note = Description: MG31-12 effector
MKTVEQFCGQKNGYSRSITLRNRLILVGKTEENLQKANMLEADFNRAKAYSEVKNLIDDFHRSFIEDVLSNTKLGWKNLYDVFDLCQLEKDKIKKEKQKKDLQSIQAAMRKAIVKKFKDDERFSKLFKKELLSDLLPSIIKNDESGTITDKNEALKVFKGFSTYFSGFHQNRENLYSDEAKATAISNRIVNENFPKFHANVKVFEYLQKNFPEIISDTEESLKAFLNGKKLSEIFNPEKFNAVLCQSGIDFYNTVIGGISDENGKQKIQGLNEKINLASQQLPPEEKSKLKKKMTVLYKQILSDKKTASFIPIGFEKSEEVYKSIKQLKEEYFDKAYKLIERTFSAPDYDLSEIFVPAKELTAFSLAIFGNWSILNDGLFLLEKDNSKKELTEKQVENLHKEISKKDYSLADLQKAYERWANENGVPADKTVKSYFSLSELRANEKTKEKEPVDIVEKIKITYEKIDFENIENLQAEKEAATPIKNFLDEVQCLFHHLKLVDYRGEEQKDSAFYSKLDEILIPLSEIISLYNKVRNFVTKKPGEVKKIKLNFECPTLANGWDLNKESSNDAIILRKNGKYFLGIFNPEDKPKFSNDSICKNQQESHYEKMIYKLLPGPNKMLPKVFFSTKGQETFLPPKDLLLGYEQGKHKKGESFDKSFMHKLIDWFKYAINQHEDWKNFNFKFSPTESYEDMSGFYKEVELQGYKITFQNISENYIDSLIDSGKLYLFQIYNKDFAEKADGKKNLHTLYWENLFSPENLKDICLKLNGDAELFYRPASENLKVIKHEKDSILVNRTTTDGETIRDETYQEIYKFKNPAKQKKGFKLSNEAKSLLDSGKVVFKKARFEITKDKHFLQNTYLFHCPITMNFKAPEITGKKFNERVLEYLRNNPDVKIIGLDRGERHLIYLSLINQNGEIELQKTLNIVEQIRGDKENPVSVNYQEKLVQKEGDRNKARKNWQTIGNIKELKEGYLSNIVHEIAKLMVEQNAIVVMEDLNFGFKRGRFAVERQVYQKFENMLIEKLNYFAFKDRPATESGGILNAYQLTDKSANISDVGKQCGWIFYIPASYTSKIDPKTGFANLFNTKGLTNVEKKKEVFSKFDSIRYDSKENCFVFSVNYSKLGDNADFKKNWEIYTHGERIVYSRKENKTFSVNPTENLEKAFDGQFAQSGINWKNKENLIDLIENISAEKSNAKFFDELLRSFTTTLQMRNSVPNTEEDYLISPVKAADGTFFD

SEQ ID NO: 241 - protein, 779 aa, unidentified
  REGION 1..779: note = Description of Unknown: uncultivated organism sequence
  REGION 1..779: note = Category: MG31 effectors
  REGION 1..779: note = Description: MG31-13 effector
MKTVEQFCGQKNGYSRSITLRNRLIPVGKTEENLQKANMLEADFNRAKAYSEVKNLIDDFHRSFIEDVLSNTKLGWKNLYDVFDLCQLEKDKIKKEKQKKDLQSIQAAMRKAIVKKFKDDERFSKLFKKELLSDLLPSIIKNDESGTITDKNEALKVFKGFSTYFSGFHQNRENLYSDEAKATAISNRIVNENFPKFHANVKVFEYLQKNFPEIISDTEESLKAFLNGKKLSEIFNPEKFNAVLCQSGIDFYNTVIGGISDENGKQKIQGLNEKINLASQQLPPEEKSKLKKKMTVLYKQILSDKKTASFIPIGFEKSEEVYKSIKQLKEEYFDKAYKLIERTFSAPDYDLSEIFVPAKELTAFSLAIFGNWSILNDGLFLLEKDNSKKELTEKQVENLHKEISKKDYSLADLQKAYERWANENGVPADKTVKSYFSLSELRANEKTKEKEPVDIVEKIKITYEKIDFENIENLQAEKEAATPIKNFLDEVQCLFHHLKLVDYRGEEQKDSAFYSKLDEILIPLSEIISLYNKVRNFVTKKPGEVKKIKLNFECPTLANGWDLNKESSNDAIILRKNGKYFLGIFNPEDKPKFSNDSICKNQQESHYEKMIYKLLPGPNKMLPKVFFSTKGQETFLPPKDLLLGYEQGKHKKGESFDKSFMHKLIDWFKYAINQHEDWKNFNFKFSPTESYEDMSGFYKEVELQGYKITFQNISENYIDSLIDSGKLYLFQIYNKDFAEKADGKKNLHTLYWENLFSPENLKDICLKLNGDAELFYRPA

SEQ ID NO: 242 - protein, 874 aa, unidentified
  REGION 1..874: note = Description of Unknown: uncultivated organism sequence
  REGION 1..874: note = Category: MG31 effectors
  REGION 1..874: note = Description: MG31-14 effector
MKTVEQFCGQKNGYSRSITLRNRLIPVGKTEENLQKANMLEADFNRAKAYSEVKNLIDDFHRSFIEDVLSNTKLGWKNLYDVFDLCQLEKDKIKKEKQKKDLQSIQAAMRKAIVKKFKDDERFSKLFKKELLSDLLPSIIKNDESGTITDKNEALKVFKGFSTYFSGFHQNRENLYSDEAKATAISNRIVNENFPKFHANVKVFEYLQKNFPEIISDTEESLKAFLNGKKLSEIFNPEKFNAVLCQSGIDFYNTVIGGISDENGKQKIQGLNEKINLASQQLPPEEKSKLKKKMTVLYKQILSDKKTASFIPIGFEKSEEVYKSIKQLKEEYFDKAYKLIERTFSAPDYDLSEIFVPAKELTAFSLAIFGNWSILNDGLFLLEKDNSKKELTEKQVENLHKEISKKDYSLADLQKAYERWANENGVPADKTVKSYFSLSELRANEKTKEKEPVDIVEKIKITYEKIDFENIENLQAEKEAATPIKNFLDEVQCLFHHLKLVDYRGEEQKDSAFYSKLDEILIPLSEIISLYNKVRNFVTKKPGEVKKIKLNFECPTLANGWDLNKESSNDAIILRKNGKYFLGIFNPEDKPKFSNDSICKNQQESHYEKMIYKLLPGPNKMLPKVFFSTKGQETFLPPKDLLLGYEQGKHKKGESFDKSFMHKLIDWFKYAINQHEDWKNFNFKFSPTESYEDMSGFYKEVELQGYKITFQNISENYIDSLIDSGKLYLFQIYNKDFAEKADGKKNLHTLYWENLFSPENLKDICLKLNGDAELFYRPASENLKVIKHEKDSILVNRTTTDGETIRDETYQEIYKFKNPAKQKKGFKLSNEAKSLLDSGKVVFKKARFEITKDKHFLQNTYLFHCPITMNFKAP

SEQ ID NO: 243 - protein, 1328 aa, unidentified
  REGION 1..1328: note = Description of Unknown: uncultivated organism sequence
  REGION 1..1328: note = Category: MG31 effectors
  REGION 1..1328: note = Description: MG31-15 effector
MNIIFGGIFMKTIDDFCGQTSGYSRSITLRNRLIPIGKTEEIIQKQHLLDNDIKRARAYLEVKKMIDDFHRIFIEEVLSKAKLEWGPLYDQFDLFQNEKDKQKKNKIKKELESLQGVMRKQIVKKFKADGRFDKLFKKELLTEFVPTVIKADESGTISDKQAALDVFKGFATYFTGFHQNRQNMYSEEAQSTAISNRIVNENFPKFYANVKVFEYLQNECPAIITETEESLSDFLKGKRLADIFTEEAFNAVLSQGGIDFYNTIIGGVAGEAGTQKIQGVNEKINLARQQLPEEEKSKLKRKMTVLYKQILSDRSTASFIPVGFESSDEVYESVKQFKEDSLNKILSEMKILFEKSDYELSQIYVPAKEVTEFSLKLFGNWSILHDGLFLIEKDNAKKSLTEKQIDILRKDIAKRDCSLSDLQSAYERWTKENDVKVEKTVKNYFGIAELRVDEKSKEKTSVEILKELESAFDKIDFEKRDNLIKEKETAAPIKNFLDEVQNLYHYLKLVDYRGEEQKDTDFYSKYDEILQTLSEIIPLYNKVRNFVTKKPNEVKKVKLNFDCSSFLNGWGTDYGTKEAHIFIDSGKYYLGIVNEKLAKEDEDELKTPTSKVIKKVVYDFQKPDNKNTPRLFIRSKGTAFAPAVSQYNLPIESVIEIYDKGLFKKEYRKINPQVYKESLIKMIDYFKLGFTRHDSYKHYSFNWKDSSEYNDISEFYADVMSSCYQLKFEDTNFEKLLSLVDSGKLFLFQIYNKDYSTGKDGGNGSTGKKNLHTLYWKNLFSEENLRDVCLKLNGEAELFWRDANPNVKNVCHKKGSVLVNRTTSDGDTIPEKIYQEIYKFKNPDKQEKGFKLSDVAKEFLDSGKVVCKEAKFDITKDRHFTQKTYLFHCPITMNFKASEIPGKKFNEKVQQVLKNNPDVKIIGLDRGERNLIYLSLINQKGEIELQKTLNLVDQVRNDKTVSVNYQEKLVQKEGERDKARKNWQTISNIKELKEGYLSNIVHEIAELMVDNNAIVVMEDLNFGFKRGRFAVERQVYQKFENMLIEKLNYLVFKDKISTEPGGVLNAYQLTVKAANVSDVGKQCGWIFYIPASYTSKIDPKTGFANLFYTAGLTNIEKKKDFFDKFDSIRYDEKTDSFVFSFDYREFGDNADFKKKWEVYSRGERLIFSKAEKSVIRVNPTENLKALFDNQGINWASENNFMAQIHAVRAERENCAFYDGLYRSFTAILQMRNSVSNSSKQEDDYLISPVMAEDGSFYDSREEAEKGKTPDGKWISKFPVDADANGAYHIALKGLYLLKNNFNQNERGGIENISNADWFEFVQEKKYAK

SEQ ID NO: 244 - protein, 1302 aa, unidentified
  REGION 1..1302: note = Description of Unknown: uncultivated organism sequence
  REGION 1..1302: note = Category: MG31 effectors
  REGION 1..1302: note = Description: MG31-16 effector
MNVINKFCGQENGYSRSITLRNALIPIGKTEENIQKLKLLDKDIVRSKAYIEVKKLIDDFHRAFIEEVLSKIKLDWGPLFDQFELYQNERDKQKKNRIKNDLKKLQEGMRKDLVKKFKEDKRFDKLFKKELLSDFVPTVIKTDETGTISDKQAALDAFKGFATYFTGFHQNRQNMYSDEEQSTAISNRIVNENFPKFYANVKFFEYLQKDFPAIIKDTEESLAVFLKGKKLADIFSENGFNAVLSQSGIDFYNTVIGGISEEAGSKKIQGLNEKINLASQQLQAEEKHKLKKKMSVLYKQILSDRSTVSFIPVGFEASDEVYESVKQFKEQRLDKAISLVKKLTDKTDYDISQIYVPAKEVTEFSLKLFGNWSILYDGLFLLEKDGSKKNFTEKQVETLRKEIAKKDFSLEDLQNAYERWTKEYNSPVDKTTKNYFRIAELRLDENTKEKSFVEILKKLDESYSKIDFDKQKNLIKEKEAATPIKNFLDEVQNLYHYMKVVDYRGEEQKDSDFYSGLDEILQILSEIIPLYNKVRNFVTKKPNDVKKVKLNFDCPTLANGWDLNKESSNDAIILRKNGNYYLGIYNPKDKPKFETCTNGEECYEKMIYKLLPGPNKMLPKVFFSTKGKETFLPPEDILIGYEDGKHKKGGNFDKQFMYKLIDWFKAAINRHEDWKNFNFKFSPTESYEDLSGFYKEVELQGYKITFQNIAESYINSLVDSGKLFLFQIYNKDFSTGKDCGNGSTGKKNLHTLYWENLFSEENLRDVCLKLNGEAELFWRDANPNVKDVCHKKGSVLVNRTTSDGKSIPEDVYQEIYQFKNKLTDKISDKAKELLDSGKVVCKVAKFDITKDKHFTKSTYLFHCPITMNFRAPGISDKDFNVKVQSILKDNPDVKIIGLDRGERHLIYLSLINQKGEIELQKTLNLVEQVRNDKTVSVNYQEKLVQKEGDRDKARKNWQTIGNIKELKEGYLSNIVHEIAKLMVENNAIVVMEDLNFGFKRGRFAVERQVYQKFENMLIEKLNYLVFKDKKVTEPGGVLNAYQLANKSANVSDVGKQCGWIFYIPAAYTSKIDPKTGFANLFYTAGITNIEKKKDFFDKFDSIRYDRKTDSFVFSFDYSNFSDNADFKKKWEVYSCEDRLVFSKAEKTTVSVNPTENLKALFDKQEINWNTEDNFIDQIHAVQAERDNCAFYDGLYRSFMAILQMRNSKPNSSNQEDDYLISPVMADDGTFYDSRVEAAKGKDENGRWISKLPVDADANGAYHIALKGLYLLKNDFNLNDKGYIDNISNAEWFKFAQEKDYAE

SEQ ID NO: 245 - protein, 1334 aa, unidentified
  REGION 1..1334: note = Description of Unknown: uncultivated organism sequence
  REGION 1..1334: note = Category: MG31 effectors
  REGION 1..1334: note = Description: MG31-17 effector
MRTIDEFCGQKNGYSLSKTLRNKLIPVGKTEDKIKEYHLMENDYGRAEAYVEVKNLIDDFHRSFIAERLDKVSLDWTNLFNALNEYQKNQKDKLLKAKCKKVLEAQQKEMRKKIVQLFTGDKDNKDPVYEKLFKKELIEDLLPEAIKKDTSGIITQKEEALAKFHQFCTYFTNFHENRKTIYSAEDKSTAISNRIVNENFPKYVANIKVFEYLSKNFPKIIDDTENQLKNDLSGKKLKDIFTINGFNNVLSQKGIDFYNIIIGGIPEKEGIPRKQGINEAINLLRQGLPPERKNELKQRMTFLYKQILSDKEKVSFIPEVFNDSKEVYLAVQAFNAKCISSIIDKIADLYKQHNAYNLEKIFVPAKSLTAFSQSVYGNWSLLSECIFEKEKGEKTLSEKKLEDLTKKIAKNDYSLIDLQSAYDIWADKNNIEFNKRISINSYFNLNEIRQQKRPDGTYEKVVSNLIEDVKSTYIRIDFDNIKDLQQEKNASIPIKEYLDAVQNLFHYLKLVDYKGDALKDEMFYSSYDEYLQILSEIMSLYNKTRNFVTKKVGEIKKIKLNFDCSSLLSGWGTDYGSKAAHIFKSDSCFYLGIINKKLDKTDIDSIYQNGNTMIEKIVYDFQKPDNKNTPRLFIRSKGNAYAPAVSTYDLPIESVIDIYDKGLFKTEYREKNLEVYKKSLIKLIDYFKLGFSRHDSYKHYNFCWKETKDYADISEFYADTMRSCYQLKTERINFDNLMTLVDEGKLFLFQIYNKDFSTGKDGGNGSTGRKNMHTLYWENLFSKENLDDVVLQLSGGAELFFRPKSLEEENATIHEKNSFIVNRTYLKEVKGNKEIYETIPEEIYQEIYQKLNGKTDTISDEAQELLSSGKVKYRAAPHRIIKDRHFTQDTYLFHCPISLNFKAQEITGKKFNDRVLEKIKNNSEIKIIGLDRGERNLIYLSLINQKGEIELQKTLNLVEQQKRLIDYQGKLVQKEGDRDKARKNWQTIGNIKELKEGYLSAVVHEIATLMVDNNAIVVMEDLNFGFKRGRFAVERQVYQKFEHMFIDKLNYLVFKDRKVTEPGGVLNAYQLTDKLEAFKDLGKQSGFLFYVPAGYTSKIDPATGFANLLDMTNLTNVQKKRDFFAKFDSICFDEEKQMFAFTFDYKNFPGKGSQEMSRTKWTVYSNGERIQFCGKGKASKHIENLTEEFKTLFREFDYQNGNNILDSILEVGAALKAGEKPAKEIADFWDKLLVLFKLVLQMRNSDAKTGDDYIISPVMSESGNFFDSREQEKLGNNAKLPKDADANGAYHIALKGLYLLKAFDKTPEDQLKKVDMKISNADWFRFAQEKEYNK

SEQ ID NO: 246 - protein, 1334 aa, unidentified
  REGION 1..1334: note = Description of Unknown: uncultivated organism sequence
  REGION 1..1334: note = Category: MG31 effectors
  REGION 1..1334: note = Description: MG31-18 effector
MRTIDEFCGQKNGYSLSKTLRNKLIPVGKTEDKIKEYHLMENDYGRAEAYVEVKNLIDDFHRSFIAERLDKVSLDWTNLFNALNEYQKNQKDKLLKAKCKKVLEAQQKEMRKKIVQLFTGDKDNKDPVYEKLFKKELIEELLPEAIKEDTSGIITQKEEALAKFHQFCTYFTNFHENRKTIYSAEDKSTAISNRIVNENFPKYVANIKVFEYLSKNFPKIIDDTENQLKNDLSGKKLKDIFTVNGFNNVLSQKGIDFYNIIIGGIPEKEGIPRKQGINEAINLLRQGLPPERKNELKQRMTFLYKQILSDKEKVSFIPEVFNDSKEVYLAVQAFNAKCISSIIDKIADLYKQHNAYNLEKIFVPAKSLTAFSQSVYGNWSLLSECIFEKEKGEKTLSEKKLEDLTKKIAKNDYSLIDLQSAYDIWADKNNIEFNKRISINSYFNLNEIRQQKKPDGTYEKVVSNLIEDVKSTYIRIDFDNIKDLQQEKNASIPIKEYLDAVQNLFHYLKLVDYKGDALKDEMFYSSYDEYLQILSEIMSLYNKTRNFVTKKVGEIKKIKLNFDCSSLLSGWGTDYGSKAAHIFKSDSCFYLGIINKKLDKTDIDSIYQNGNTMIEKIVYDFQKPDNKNTPRLFIRSKGTAYAPAVSTYDLPIESVIDIYDKGLFKTEYREKNLEVYKKSLIKLIDYFKLGFSRHDSYKHYNFCWKETKDYADISEFYADTMRSCYQLKTERINFDNLMTLVDEGKLFLFQIYNKDFSTGKDGGNGSTGRKNMHTLYWENLFSKENLDDVVLQLSGGAELFFRPKSLEEENATIHEKNSFIVNRTYLKEVKGNKEIYETIPEEIYQEIYQKLNGKTDTISDEAQELLSSGKVKYRAAPHRIIKDRHFTQDTYLFHCPISLNFKAQEITGKKFNDRVLEKIKNNSEIKIIGLDRGERNLIYLSLINQKGEIELQKTLNLVEQQKRLIDYQGKLVQKEGDRDKARKNWQTIGNIKELKEGYLSAVVHELATLMVDNNAIVVMEDLNFGFKRGRFAVERQVYQKFEHMFIDKLNYLVFKDRKVTEPGGVLNAYQLTDKLEAFKDLGKQSGFLFYVPAGYTSKIDPATGFANLLDMTNLTNVQKKRDFFAKFDSICFDEEKQMFAFTFDYKNFPGKGSQEMSRTKWTVYSNGERIQFCGKGKASKHIENLTEEFKTLFREFDYQNGNNILDSILEVGAALKAGEKPAKEIADFWDKLLVLFKLVLQMRNSDAKTGDDYIISPVMSESGNFFDSREQEKLGNSAKLPKDADANGAYHIALKGLYLLKAFDKTPEDQLKKVDMKISNADWFRFAQEKEYNK

SEQ ID NO: 247 - protein, 1334 aa, unidentified
  REGION 1..1334: note = Description of Unknown: uncultivated organism sequence
  REGION 1..1334: note = Category: MG31 effectors
  REGION 1..1334: note = Description: MG31-19 effector
MRTIDEFCGQKNGYSLSKTLRNKLIPVGKTEDKIKEYHLMENDYGRAEAYVEVKNLIDDFHRSFIAERLDKVSLDWTNLFNALNEYQKNQKDKLLKAKCKKVLEAQQKEMRKKIVQLFTGDKDNKDPVYEKLFKKELIEELLPEAIKKDTSGIITQKEEALAKFHQFCTYFTNFHENRKTIYSAEDKSTAISNRIVNENFPKYVANIKVFEYLSKNFPKIIDDTENQLKNDLSGKKLKDIFTVNGFNNVLSQKGIDFYNIIIGGIPEKEGIPRKQGINEAINLLRQGLPPERKNELKQRMTFLYKQILSDKEKVSFIPEVFNDSKEVYLAVQVFNAKCISSIIDKIADLYKQHNAYNLEKIFVPAKSLTAFSQSVYGNWSLLSECIFEKEKGEKTLSEKKLEDLTKKIAKNDYSLIDLQSAYDIWADKNNIEFNKRISINSYFNLNEIRQQKRLDGTYEKVVSNLIEDVKSTYIRIDFDNIKDLQQEKNASIPIKEYLDAVQNLFHYLKLVDYKGDALKDEMFYSSYDEYLQILSEIMSLYNKTRNFVTKKVGEIKKIKLNFDCSSLLSGWGTDYGSKAAHIFKSDSCFYLGIINKKLDKTDIDSIYQNGNTMIEKIVYDFQKPDNKNTPRLFIRSKGNAYAPAVSTYDLPIESVIDIYDKGLFKTEYREKNLEVYKKSLIKLIDYFKLGFSRHDSYKHYNFCWKETKDYADISEFYADTMRSCYQLKTERINFDNLMTLVDEGKLFLFQIYNKDFSTGKDGGNGSTGRKNMHTLYWENLFSKENLDDVVLQLSGGAELFFRPKSLEEENATIHEKNSFIVNRTYLKEVKGNKEIYETIPEEIYQEIYQKLNGKTDTISDEAQELLSSGKVKYRAAPHRIIKDRHFTQDTYLFHCPISLNFKAQEITGKKFNDRVLEKIKNNSEIKIIGLDRGERNLIYLSLINQKGEIELQKTLNLVEQQKRLIDYQGKLVQKEGDRDKARKNWQTIGNIKELKEGYLSAVVHEIATLMVDNNAIVVMEDLNFGFKRGRFAVERQVYQKFEHMFIDKLNYLVFKDRKVTEPGGVLNAYQLTDKLEAFKDLGKQSGFLFYVPAGYTSKIDPATGFANLLDMTNLTNVQKKRDFFAKFDSICFDEEKQMFAFTFDYKNFNRKDAQEMSRTKWTVYSNGKRIQFCGKGKASKHIENLTEEFKTLFREFDYQNGNNILDSILEVGAALKAGEKPAKEIADFWDKLLVLFKLVLQIRNSDAKTGDDYIISPVMSEDGIFFDSREQEKLGNNAKLPKDADANGAYHIALKGLYLLKAFDKTPEDQLKKVDMKISNADWFRFAQEKEYNK

SEQ ID NO: 248 - protein, 1334 aa, unidentified
  REGION 1..1334: note = Description of Unknown: uncultivated organism sequence
  REGION 1..1334: note = Category: MG31 effectors
  REGION 1..1334: note = Description: MG31-21 effector
MRTIDEFCGQKNGYSLSKTLRNKLIPVGKTEDKIKEYHLMENDYGRAEAYVEVKNLIDDFHRSFIAERLDKVSLDWTNLFNALNEYQKNQKDKLLKAKCKKVLEAQQKEMRKKIVQLFTGDKDNKDPVYEKLFKKELIEELLPEAIKEDTSGIITQKEEALAKFHQFCTYFTNFHENRKTIYSAEDKSTAISNRIVNENFPKYVANIKVFEYLSKNFPKIIDDTENQLKNDLSGKKLKDIFTVNGFNNVLSQKGIDFYNIIIGGIPEKEGIPRKQGINEAINLLRQGLPPERKNELKQRMTFLYKQILSDKEKVSFIPEVFNDSKEVYLAVQAFNAKCISSIIDKIADLYKQHNAYNLEKIFVPAKSLTAFSQSVYGNWSLLSECIFEKEKGEKTLSEKKLEDLTKKIAKNDYSLIDLQSAYDIWADKNNIEFNKRISINSYFNLNEIRQQKKPDGTYEKVVSNLIEDVKSTYIRIDFDNIKDLQQEKNASIPIKEYLDAVQNLFHYLKLVDYKGDALKDEMFYSSYDEYLQILSEIMSLYNKTRNFVTKKVGEIKKIKLNFDCSSLLSGWGTDYGSKAAHIFKSDSCFYLGIINKKLDKTDIDSIYQNGNTMIEKIVYDFQKPDNKNTPRLFIRSKGNAYAPAVSTYDLPIESVIDIYDKGLFKTEYREKNLEVYKKSLIKLIDYFKLGFSRHDSYKHYNFCWKETKDYADISEFYADTMRSCYQLKTERINFDNLMTLVDEGKLFLFQIYNKDFSTGKDGGNGSTGRKNMHTLYWENLFSKENLDDVVLQLSGGAELFFRPKSLEEENATIHEKNSFIVNRTYLKEVKGNKEIYETIPEEIYQEIYQKLNGKTDTISDEAQELLSSGKVKYRAAPHRIIKDRHFTQDTYLFHCPISLNFKAQEITGKKFNDRVLEKIKNNSEIKIIGLDRGERNLIYLSLINQKGEIELQKTLNLVEQQKRLIDYQGKLVQKEGDRDKARKNWQTIGNIKELKEGYLSAVVHELATLMVDNNAIVVMEDLNFGFKRGRFAVERQVYQKFEHMFIDKLNYLVFKDRKVTEPGGVLNAYQLTDKLEAFKDLGKQSGFLFYVPAGYTSKIDPATGFANLLDMTNLTNVQKKRDFFAKFDSICFDEEKQMFAFTFDYKNFPRKGSQEMSRTKWTVYSNGKRIQFCGKGKAYKHIENLTEEFKTLFREFDYQNGNNILDSILEVGVDLKIGEKPTKEISDFWDKLLVLFKLVLQMRNSDAKTGDDYIISPVMAEDGFFFDSREQEKLGNSAKLPKDADANGAYHIALKGLYLLKAFDKTPEDQLKKVDMKISNADWFRFAQEKEYNK

SEQ ID NO: 249 - protein, 1332 aa, unidentified
  REGION 1..1332: note = Description of Unknown: uncultivated organism sequence
  REGION 1..1332: note = Category: MG31 effectors
  REGION 1..1332: note = Description: MG31-22 effector
MRTIDEFCGQKNGYSLSKTLRFELKPQGKTLENINKAGLVKVDEQRAKDYQDVKKLLDNYHKYFIDDILKNASEKDLDWKPLKDAVEEYQKDKTKDEQLKKEQDKMRSSIVKCFSADKKRFDHLTAATPYDLFKTELPEWLSKNSFPNLNNKAVETFKKFSTYFTGYQETRKNIYSAEAISTAVPFRIVHDNFPKFLQNLSIYKWINEKCPEVIKNAQNEIGSILAGKKLEDFFTLNSFNIFLTQTGANEQRGIDFYNQLIGGVKQQNIQIKGINQCINEYWQQHPEFAKENRRVKMVPLYKQILSDRSTLSFVIESIENDKELFDAVTKFNESITLIKDTETEKTSVLENISTLIKNISDFDANHVFVNAKDLAGISLVLFGKWDALQIRMNEFAKATFSTKQERSRWVKNLEENSTTKRKGVFSFAELDRVLAFSSEEINATEISIKDYFDTQYKKFFDAEKNEVVVTKEVTVLSVDDLLISIQSKWNSLQKVVNNSTTENQLKENTENVAILKDYLDCVNELFTRLKVLNVDKSEARDTSFYSVYDEVMETLSEIMPLYNKVRNYITKKSFDIGKYKLNFDNPTLASGWDLNKEDANTCVILEKDGNYYLGVMNAKNKPKFSAIQPDDSVPCYKKMVYKLLPGPNKMLPKVFFSTKGIATFNPPKEILEGYNAGKHKKGDTFDLNFCHKLIDYFKSAINQHPDWKNFNFKFSDTSTYKDTSDFYKEISEQGYKLSFVNVPVSIIDSWVDEGKLYLFQIYNKDFSPNSTGTPNMHTLYWRNLFSKENLDDVVLKLNGEAELFYRGVGIKNPVVHSVGSKVVNRTTKDGKTISEAIHDEIYKYVNRKIPELSQETKKLYENGLVVVKTIQKNHELIKDKHYTQEKFLFHVPITINYKASGNSYINENVRQFLKNNPDVNIIGLDRGERHLIYMSLIDQKGNIIQQKTFNTVERKKNGATVSVDYHEKLDQKEKERDAARKNWQTIGKIAELKEGYLSAVIHELVTLMIEHNAIIVMEDLNFGFKRGRFHVEKQVYQKFEHMLIDKLNYLVFKDRGLKESGGVLNGYQLAGIFESFQKLGKQSGFLFYVPAGYTSKIDPATGFANLLDMTNLTNVQKKRDFFAKFDSICFDEEKQMFAFTFDYKNFNRKDAQEMSRTKWTVYSNGKRIQFCGKGKASKHIENITEEFKTLFREFDYQNGNNILDSILEVGAALKAGEKPAKEIADFWDKLLVLFKLVLQMRNSDAKTGDDYIISPVMSEDGIFFDSREQEKLGNNAKLPKDADANGAYHIALKGLYLLKAFDKTPEDQLKKVDMKISNADWFRFAQEKEYSK

SEQ ID NO: 250 - protein, 1332 aa, unidentified
  REGION 1..1332: note = Description of Unknown: uncultivated organism sequence
  REGION 1..1332: note = Category: MG31 effectors
  REGION 1..1332: note = Description: MG31-23 effector
MRTIDEFCGQKNGYSLSKTLRFELKPQGKTLENINKAGLVKVDEQRAKDYQDVKKLLDNYHKYFIDDILKNASEKDLDWKPLKDAVEEYQKDKTKDEQLKKEQDKMRSSIVKCFSADKKRFDHLTAATPYDLFKTELPEWLSKNSFPNLNNKAVETFKKFSTYFTGYQETRKNIYSAEAISTAVPFRIVHDNFPKFLQNLSIYKWINEKCPEVIKNAQNEIGSILAGKKLEDFFTLNSFNIFLTQTGANEQRGIDFYNQLIGGVKQQNIQIKGINQCINEYWQQHPEFAKENRRVKMVPLYKQILSDRSTLSFVIESIENDKELFDAVTKFNESITLIKDTETEKTSVLENISTLIKNISDFDANHVFVNAKDLAGISLVLFGKWDALQIRMNEFAKATFSTKQERSRWVKNLEENSTTKRKGVFSFAELDRVLAFSSEEINATEISIKDYFDTQYKKFFDAEKNEVVVTKEVTVLSVDDLLISIQSKWNSLQKVVNNSTTENQLKENTENVAILKDYLDCVNELFTRLKVLNVDKSEARDTSFYSVYDEVMETLSEIMPLYNKVRNYITKKSFDIGKYKLNFDNPTLASGWDLNKEDANTCVILEKDGNYYLGVMNAKNKPKFSAIQPDDSVPCYKKMVYKLLPGPNKMLPKVFFSTKGIATFNPPKEILEGYNAGKHKKGDTFDLNFCHKLIDYFKSAINQHPDWKNFNFKFSDTSTYKDTSDFYKEISEQGYKLSFVNVPVSIIDSWVDEGKLYLFQIYNKDFSPNSTGTPNMHTLYWRNLFSKENLDDVVLKLNGEAELFYRGVGIKNPVVHSVGSKVVNRTTKDGKTIPEAIHDEIYKYVNRKIPELSQETKKLYENGLVVVKTIQKNHELIKDKHYTQEKFLFHVPITINYKASGNSYINENVRQFLKNNPDVNIIGLDRGERHLIYMSLIDQKGNIIQQKTFNTVERKKNGATVSVDYHEKLDQKEKERDAARKNWQTIGKIAELKEGYLSAVIHELVTLMIEHNAIIVMEDLNFGFKRGRFHVEKQVYQKFEHMLIDKLNYLVFKDRGLKESGGVLNGYQLAGIFESFQKLGKQSGFLFYVPAGYTSKIDPATGFANLLDMTNLTNVQKKRDFFAKFDSICFDEEKQMFAFTFDYKNFNRKDAQEMSRTKWTVYSNGKRIQFCGKGKASKHIENLTEEFKTLFREFDYQNGNNILDSILEVGAALKAGEKPAKEIADFWDKLLVLFKLVLQIRNSDAKTGDDYIISPVMSEDGIFFDSREQEKLGNNAKLPKDADANGAYHIALKGLYLLKVFDKTPEDQLKKVDMKISNADWFRFAQEKEYSK

SEQ ID NO: 251 - protein, 1332 aa, unidentified
  REGION 1..1332: note = Description of Unknown: uncultivated organism sequence
  REGION 1..1332: note = Category: MG31 effectors
  REGION 1..1332: note = Description: MG31-24 effector
MRTIDEFCGQKNGYSLSKTLRFELKPQGKTLENINKAGLVKVDEQRAKDYQDVKKLLDNYHKYFIDDILKNASEKDLDWKPLKDAVEEYQKDKTKDEQLKKEQDKMRSSIVKCFSADKKRFDHLTAATPYDLFKTELPEWLSKNSFPNLNNKAVETFKKFSTYFTGYQETRKNIYSAEAISTAVPFRIVHDNFPKFLQNLSIYKWINEKCPEVIKNAQNEIGSILAGKKLEDFFTLNSFNIFLTQTGANEQRGIDFYNQLIGGVKQQNIQIKGINQCINEYWQQHPEFAKENRRVKMVPLYKQILSDRSTLSFVIESIENDKELFDAVTKFNESITLIKDTETEKTSVLENISTLIKNISDFDANHVFVNAKDLAGISLVLFGKWDALQIRMNEFAKATFSTKQERSRWVKNLEENSTTKRKGVFSFAELDRVLAFSSEEINATEISIKDYFDTQYKKFFDAEKNEVVVTKEVTVLSVDDLLISIQSKWNSLQKVVNNSTTENQLKENTENVAILKDYLDCVNELFTRLKVLNVDKSEARDTSFYSVYDEVMETLSEIMPLYNKVRNYITKKSFDIGKYKLNFDNPTLASGWDLNKEDANTCVILEKDGNYYLGVMNAKNKPKFSAIQPDDSVPCYKKMVYKLLPGPNKMLPKVFFSTKGIATFNPPKEILEGYNAGKHKKGDTFDLNFCHKLIDYFKSAINQHPDWKNFNFKFSDTSTYKDTSDFYKEISEQGYKLSFVNVPVSIIDSWVDEGKLYLFQIYNKDFSPNSTGTPNMHTLYWRNLFSKENLDDVVLKLNGEAELFYRGVGIKNPVVHSVGSKVVNRTTKDGKTIPEAIHDEIYKYVNRKIPELSQETKKLYENGLVVVKTIQKNHELIKDKHYTQEKFLFHVPITINYKASGNSYINENVRQFLKNNPDVNIIGLDRGERHLIYMSLIDQKGNIIQQKTFNTVERKKNGATVSVDYHEKLDQKEKERDAARKNWQTIGKIAELKEGYLSAVIHELVTLMIEHNAIIVMEDLNFGFKRGRFHVEKQVYQKFEHMLIDKLDYLVFKDRGLKESGGVLNGYQLAGIFESFQKLGKQSGFLFYVPAGYTSKIDPATGFANLLDMTNLTNVQKKRDFFAKFDSICFDEEKQMFAFTFDYKNFNRKDAQEMSRTKWTVYSNGKRIQFCGKGKASKHIENLTEEFKTLFREFDYQNGNNILDSILEVGAALKAGEKPAKEIADFWDKLLVLFKLVLQIRNSDAKTGDDYIISPVMSEDGIFFDSREQEKLGNNAKLPKDADANGAYHIALKGLYLLKVFDKTPEDQLKKVDMKISNADWFRFAQEKEYSK

SEQ ID NO: 252 - protein, 1332 aa, unidentified
  REGION 1..1332: note = Description of Unknown: uncultivated organism sequence
  REGION 1..1332: note = Category: MG31 effectors
  REGION 1..1332: note = Description: MG31-25 effector
MRTIDEFCGQKNGYSLSKTLRFELKPQGKTLENINKAGLVKVDEQRAKDYQDVKKLLDNYHKYFIDDILKNASEKDLDWKPLKDAVEEYQKDKTKDEQLKKEQDKMRSSIVKCFSADKKRFDHLTAATPYDLFKTELPEWLSKNSFPNLNNKAVETFKKFSTYFTGYQETRKNIYSAEAISTAVPFRIVHDNFPKFLQNLSIYKWINEKCPEVIKNAQNEIGSILAGKKLEDFFTLNSFNIFLTQTGANEQRGIDFYNQLIGGVKQQNIQIKGINQCINEYWQQHPEFAKENRRVKMVPLYKQILSDRSTLSFVIESIENDKELFDAVTKFNESITLIKDTETEKTSVLENISTLIKNISDFDANHVFVNAKDLAGISLVLFGKWDALQIRMNEFAKATFSTKQERSRWVKNLEENSTTKRKGVFSFAELDRVLAFSSEEINATEISIKDYFDTQYKKFFDAEKNEVVVTKEVTVLSVDDLLISIQSKWNSLQKVVNNSTTENQLKENTENVAILKDYLDCVNELFTRLKVLNVDKSEARDTSFYSVYDEVMETLSEIMPLYNKVRNYITKKSFDIGKYKLNFDNPTLASGWDLNKEDANTCVILEKDGNYYLGVMNAKNKPKFSAIQPDDSVPCYKKMVYKLLPGPNKMLPKVFFSTKGIATFNPPKEILEGYNAGKHKKGDTFDLNFCHKLIDYFKSAINQHPDWKNFNFKFSDTSTYKDTSDFYKEISEQGYKLSFVNVPVSIIDSWVDEGKLYLFQIYNKDFSPNSTGTPNMHTLYWRNLFSKENLDDVVLKLNGEAELFYRGVGIKNPVVHSVGSKVVNRTTKDGKTIPEAIHDEIYKYVNRKIPELSQETKKLYENGLVVVKTIQKNHELIKDKHYTQEKFLFHVPITINYKASGNSYINENVRQFLKNNPDVNIIGLDRGERHLIYMSLIDQKGNIIQQKTFNTVERKKNGATVSVDYHEKLDQKEKERDAARKNWQTIGKIAELKEGYLSAVIHELVTLMIEHNAIIVMEDLNFGFKRGRFHVEKQVYQKFEHMLIDKLNYLVFKDRGLKESGGVLNGYQLAGIFESFQKLGKQSGFLFYVPAGYTSKIDPATGFANLLDMTNLTNVQKKRDFFAKFDSICFDEEKQMFAFTFDYKNFPGKGSQEMSRTKWTVYSNGKRIQFCGKGKASKHIENITEEFKTLFREFDYQNGNNILDSILEVGAALKAGEKPAKEIADFWDKLLVLFKLVLQMRNSDAKTGDDYIISPVMSESGNFFDSREQEKLGNSAKLPKDADANGAYHIALKGLYLLKAFDKTPEDQLKKVDMKISNADWFRFAQEKEYSK

SEQ ID NO: 253 - protein, 1332 aa, unidentified
  REGION 1..1332: note = Description of Unknown: uncultivated organism sequence
  REGION 1..1332: note = Category: MG31 effectors
  REGION 1..1332: note = Description: MG31-26 effector
MRTIDEFCGQKNGYSLSKTLRFELKPQGKTLENINKAGLVKVDEQRAKDYQDVKKLLDNYHKYFIDDILKNASEKDLDWKPLKDAVEEYQKDKTKDEQLKKEQDKMRSSIVKCFSADKKRFDHLTAATPYDLFKTELPEWLSKNSFPNLNNKAVETFKKFSTYFTGYQETRKNIYSAEAISTAVPFRIVHDNFPKFLQNLSIYKWINEKCPEVIKNAQNEIGSILAGKKLEDFFTLNSFNIFLTQTGANEQRGIDFYNQLIGGVKQQNIQIKGINQCINEYWQQHPEFAKENRRVKMVPLYKQILSDRSTLSFVIESIENDKELFDAVTKFNESITLIKDTETEKTSVLENISTLIKNISDFDANHVFVNAKDLAGISLVLFGKWDALQIRMNEFAKATFSTKQERSRWVKNLEENSTTKRKGVFSFAELDRVLAFSSEEINATEISIKDYFDTQYKKFFDAEKNEVVVTKEVTVLSVDDLLISIQSKWNSLQKVVNNSTTENQLKENTENVAILKDYLDCVNELFTRLKVLNVDKSEARDTSFYSVYDEVMETLSEIMPLYNKVRNYITKKSFDIGKYKLNFDNPTLASGWDLNKEDANTCVILEKDGNYYLGVMNAKNKPKFSAIQPDDSVPCYKKMVYKLLPGPNKMLPKVFFSTKGIATFNPPKEILEGYNAGKHKKGDTFDLNFCHKLIDYFKSAINQHPDWKNFNFKFSDTSTYKDTSDFYKEISEQGYKLSFVNVPVSIIDSWVDEGKLYLFQIYNKDFSPNSTGTPNMHTLYWRNLFSKENLDDVVLKLNGEAELFYRGVGIKNPVVHSVGSKVVNRTTKDGKTIPEAIHDEIYKYVNRKIPELSQETKKLYENGLVVVKTIQKNHELIKDKHYTQEKFLFHVPITINYKASGNSYINENVRQFLKNNPDVNIIGLDRGERHLIYMSLIDQKGNIIQQKTFNTVERKKNGATVSVDYHEKLDQKEKERDAARKNWQTIGKIAELKEGYLSAVIHELVTLMIEHNAIIVMEDLNFGFKRGRFHVEKQVYQKFEHMLIDKLNYLVFKDRGLKESGGVLNGYQLAGIFESFQKLGNQSGFLFYVPAGYTSKIDPATGFANLLDMTNLTNVQKKRDFFAKFDSICFDEEKQMFAFTFDYKNFNRKDAQEMSRTKWTVYSNGKRIQFCGKGKASKHIENITEEFKTLFREFDYQNGNNILDSILEVGAALKAGEKPAKEIADFWDKLLVLFKLVLQMRNSDAKTGDDYIISPVMSESGNFFDSREQEKLGNSAKLPKDADANGAYHIALKGLYLLKAFDKTPEDQLKKVDMKISNADWFRFAQEKEYNK

SEQ ID NO: 254 - protein, 1332 aa, unidentified
  REGION 1..1332: note = Description of Unknown: uncultivated organism sequence
  REGION 1..1332: note = Category: MG31 effectors
  REGION 1..1332: note = Description: MG31-27 effector
MRTIDEFCGQKNGYSLSKTLRFELKPQGKTLENINKAGLVKVDEQRAKDYQDVKKLLDNYHKYFIDDILKNASEKDLDWKPLKDAVEEYQKDKTKDEQLKKEQDKMRSSIVKCFSADKKRFDHLTAATPYDLLKTELPEWLSKNSFPNLNNKAVETFKKFSTYFTGYQETRKNIYSAVAISTAVPFRIVHDNFPKFLQNLSIYKWINEKCPEVIKNAQNEIGSILAGKKLEDFFTLNSFNIFLTQTGANEQRGIDFYNQLIGGVKQQNIQIKGINQCINEYWQQHPEFAKENRRVKMVPLYKQILSDRSTLSFVIESIENDKELFDAVTKFNESITLIKDTETEKTSVLENISTLIKNISDFDTNHVFVNAKDLAGISLVLFGKWDALQIRMNEFAKATFSTKQERSRWVKKLEENSTTKRKGVFSFAELDRVLAFSSEEINATGIRIKDYFDTQYKKFFDAEKNEIVVTKEVTVLSVDDLLISIQAKWNSLQKLINNSKNENQLKENEENVAILKDYLDCVNDLFTRLKVLNVDKSEARDTSFYSVYDEVMETLSEIMPLYNKARNYITKKTFDIGKYKLNFDNPTLASGWDLNKEDANTCVILEKDGSYYLGVMNAKNKPKFSAIQPDDSVPCYKKMVYKLLPGPNKMLPKVFFSTKGIATFNPSKEILEGYNAGKHKKGDTFDLNFCHKLIDYFKSAINQHPDWKNFNFKFSDTSTYKDTSDFYKEISEQGYKLSFVNVPVSIIDSWVDEGKLYLFQIYNKDFSPNSTGTPNMHTLYWRNLFSKENLDDVVLKLNGEAELFYRGVGIKNPVVHAVGSKVVNRTTKDGKTIPEAIHDEIYKYVNRKIPELSQDAKKLYENGLVVVKTIQKNHELIKDKHYTQEKFLFHVPITINYKASGNSYINENVRQFLKNNPDVNIIGLDRGERHLIYMSLIDQKGNIIQQKTFNTVERKKNGATVSVDYHEKLDQKEKERDAARKNWQTIGKIAELKEGYLSAVIHELVTLMIEHNAIIVMEDLNFGFKRGRFHVEKQVYQKFEHMLIDKLNYLVFKDRGLKESGGVLNGYQLAGVFESFQKLGKQSGFLFYVPAGYTSKIDPATGFANLLDMTNLTNVQKKRDFFAKFDSICFDEEKQMFAFTFDYKNFNRKDAQEMSRTKWTVYSNGKRIQFCGKGKASKHIENLTEEFKTLFREFDYQNGNNILDSILEVGAALKAGEKPAKEIADFWDKLLVLFKLVLQIRNSDAKTGDDYIISPVMSEDGIFFDSREQEKLGNNAKLPKDADANGAYHIALKGLYLLKAFDKTPEDQLKKVDMKISNADWFRFAQEKEYNK

SEQ ID NO: 255 - protein, 1332 aa, unidentified
  REGION 1..1332: note = Description of Unknown: uncultivated organism sequence
  REGION 1..1332: note = Category: MG31 effectors
  REGION 1..1332: note = Description: MG31-28 effector
MRTIDEFCGQKNGYSLSKTLRFELKPQGKTLENINKAGLVKVDEQRAKDYQDVKKLLDNYHKYFIDDILKNASEKDLDWKPLKDAVEEYQKDKTKDEQLKKEQDKMRSSIVKCFSADKKRFDHLTAATPYDLFKTELPEWLSKNSFPNLNNKAVETFKKFSTYFTGYQETRKNIYSAEAISTAVPFRIVHDNFPKFLQNLSIYKWINEKCPEVIKNAQNEIGSILAGKKLEDFFTLNSFNIFLTQTGANEQRGIDFYNQLIGGVKQQNIQIKGINQCINEYWQQHPEFAKENRRVKMVPLYKQILSDRSTLSFVIESIENDKELFDAVTKFNESITLIKDTETEKTSVLENISTLIKNISDFDANHVFVNAKDLAGISLVLFGKWDALQIRMNEFAKATFSTKQERSRWVKKLEENSTTKRKGVFSFAELDRVLAFSSEEINATEISIKDYFDTQYKKFFDAEKNEVVVTKEVTVLSVDDLLISIQSKWNSLQKVVNNSTTENQLKENTENVAILKDYLDCVNELFTRLKVLNVDKSEARDTSFYSVYDEVMETLSEIMPLYNKVRNYITKKSFDIGKYKLNFDNPTLASGWDLNKEDANTCVILEKDGNYYLGVMNAKNKPKFSAIQPDDSVPCYKKMVYKLLPGPNKMLPKVFFSTKGIATFNPPKEILEGYNAGKHKKGDTFDLNFCHKLIDYFKSAINQHPDWKNFNFKFSDTSTYKDTSDFYKEISEQGYKLSFVNVPVSIIDSWVDEGKLYLFQIYNKDFSPNSTGTPNMHTLYWRNLFSKENLDDVVLKLNGEAELFYRGVGIKNPVVHSVGSKVVNRTTKDGKTIPEAIHDEIYKYVNRKIPELSQETKKLYENGLVVVKTIQKNHELIKDKHYTQEKFLFHVPITINYKASGNSYINENVRQFLKNNPDVNIIGLDRGERHLIYMSLIDQKGNIIQQKTFNTVERKKNGATVSVDYHEKLDQKEKERDAARKNWQTIGKIAELKEGYLSAVIHELVTLMIEHNAIIVMEDLNSGFKRGRFHVEKQVYQKFEHMLIDKLNYLVFKDRGLKESGGVLNGYQLAGIFESFQKLGKQSGFLFYVPAGYTSKIDPATGFANLLDMTNLTNVQKKRDFFAKFDSICFDEEKQMFAFTFDYKNFNRKDAQEMSRTKWTVYSNGKRIQFCGKGKASKHIENLTEEFKTLFREFDYQNGNNILDSILEVGAALKAGEKPAKEIADFWDKLLVLFKLVLQIRNSDAKTGDDYIISPVMSEDGIFFDSREQEKLGNNAKLPKDADANGAYHIALKGLYLLKVFDKTPEDQLKKVDMKISNADWFRFAQEKEYSK

SEQ ID NO: 256 - protein, 1332 aa, unidentified
  REGION 1..1332: note = Description of Unknown: uncultivated organism sequence
  REGION 1..1332: note = Category: MG31 effectors
  REGION 1..1332: note = Description: MG31-29 effector
MRTIDEFCGQKNGYSLSKTLRFELKPQGKTLENINKAGLVKVDEQRAKDYQDVKKLLDNYHKYFIDDILKNASEKDLDWKPLKDAVEEYQKDKTKDEQLKKEQDKMRSSIVKCFSADKKRFDHLTAATPYDLFKTELPEWLSKNSFPNLNNKAVETFKKFSTYFTGYQETRKNIYSAEAISTAVPFRIVHDNFPKFLQNLSIYKWINEKCPEVIKNAQNEIGSILAGKKLEDFFTLNSFNIFLTQTGANEQRGIDFYNQLIGGVKQQNIQIKGINQCINEYWQQHPEFAKENRRVKMVPLYKQILSDRSTLSFVIESIENDKELFDAVTKFNESITLIKDTETEKTSVLENISTLIKNISDFDANHVFVNAKDLAGISLVLFGKWDALQIRMNEFAKATFSTKQERSRWVKNLEENSTTKRKGVFSFAELDRVLAFSSEEINATEISIKDYFDTQYKKFFDAEKNEVVVTKEVTVLSVDDLLISIQSKWNSLQKVVNNSTTENQLKENTENVAILKDYLDCVNELFTRLKVLNVDKSEARDTSFYSVYDEVMETLSEIMPLYNKVRNYITKKSFDIGKYKLNFDNPTLASGWDLNKEDANTCVILEKDGNYYLGVMNAKNKPKFSAIQPDDSVPCYKKMVYKLLPGPNKMLPKVFFSTKGIATFNPPKEILEGYNAGKHKKGDTFDLNFCHKLIDYFKSAINQHPDWKNFNFKFSDTSTYKDTSDFYKEISEQGYKLSFVNVPVSIIDSWVDEGKLYLFQIYNKDFSPNSTGTPNMHTLYWRNLFSKENLDDVVLKLNGEAELFYRGVGIKNPVVHSVGSKVVNRTTKDGKTIPEAIHDEIYKYVNRKIPELSQETKKLYENGLVVVKTIQKNHELIKDKHYTQEKFLFHVPITINYKASGNSYINENVRQFLKNNPDVNIIGLDRGERHLIYMSLIDQKGNIIQQKTFNTVERKKNGATVSVDYHEKLDQKEKERDAARKNWQTIGKIAELKEGYLSAVIHELVTLMIEHNAIIVMEDLNFGFKRGRFHVEKQVYQKFEHMLIDKLNYLVFKDRGLKESGGVLNGYQLAGIFESFQKLGKQSGFLFYVPAGYTSKIDPATGFANLLDMTNLTNVQKKRDFFAKFDSICFDEEKQMFAFTFDYKNFNRKDAQEMSRTKWTVYSNGKRIQFCGKGKAYKHIENLTEEFKTLFREFDYQNGNNILDSILEVGAALKAGEKPTKEIADFWDKLLVLFKLVLQMRNSDAKTGDDYIISPVMSESGNFFDSREQEKLGNSAKLPKDADANGAYHIALKGLYLLKAFDKTPEDQLKKVDMKISNADWFRFAQEKEYNK

SEQ ID NO: 257 - protein, 1332 aa, unidentified
  REGION 1..1332: note = Description of Unknown: uncultivated organism sequence
  REGION 1..1332: note = Category: MG31 effectors
  REGION 1..1332: note = Description: MG31-30 effector
MRTIDEFCGQKNGYSLSKTLRFELKPQGKTLENINKAGLVKVDEQRAKDYQDVKKLLDNYHKYFIDDILKNASEKDLDWKPLKDAVEEYQKDKTKDEQLKKEQDKMRSSIVKCFSADKKRFDHLTAATPYDLFKTELPEWLSKNSFPNLNNKAVETFKKFSTYFTGYQETRKNIYSAVAISTAVPFRIVHDNFPKFLQNLSIYKWINEKCPEVIKNAQNEIGSILAGKKLEDFFTLNSFNIFLTQTGANEQRGIDFYNQLIGGVKQQNIQIKGINQCINEYWQQHPEFAKENRRVKMVPLYKQILSDRSTLSFVIESIENDKELFDAVTKFNESITLIKDTETEKTSVLENISTLIKNISDFDTNHVFVNAKDLAGISLVLFGKWDALQIRMNEFAKATFSTKQERSRWVKKLEENSTTKRKGVFSFAELDRVLAFSSEEINATGIRIKDYFDTQYKKFFDAEKNEIVVTKEVTVLSVDDLLISIQAKWNSLQKLINNSKNENQLKENEENVAILKDYLDCVNDLFTRLKVLNVDKSEARDTSFYSVYDEVMETLSEIMPLYNKARNYITKKTFDIGKYKLNFDNPTLASGWDLNKEDANTCVILEKDGSYYLGVMNAKNKPKFSAIQPDDSVPCYKKMVYKLLPGPNKMLPKVFFSTKGIATFNPSKEILEGYNAGKHKKGDTFDLNFCHKLIDYFKSAINQHPDWKNFNFKFSDTSTYKDTSDFYKEISEQGYKLSFVNVPVSIIDSWVDEGKLYLFQIYNKDFSPNSTGTPNMHTLYWRNLFSKENLDDVVLKLNGEAELFYRGVGIKNPVVHAVGSKVVNRTTKDGKTIPEAIHDEIYKYVNRKIPELSQDAKKLYENGLVVVKTIQKNHELIKDKHYTQEKFLFHVPITINYKASGNSYINENVRQFLKNNPDVNIIGLDRGERHLIYMSLIDQKGNIIQQKTFNTVERKKNGATVSVDYHEKLDQKEKERDAARKNWQTIGKIAELKEGYLSAVIHELVTLMIEHNAIIVMEDLNFGFKRGRFHVEKQVYQKFEHMLIDKLNYLVFKDRGLKESGGVLNGYQLAGVFESFQKLGKQSGFLFYVPAGYTSKIDPATGFANLLDMTNLTNVQKKRDFFAKFDSICFDEEKQMFAFTFDYKNFNRKDAQEMSRTKWTVYSNGKRIQFCGKGKASKHIENLTEEFKTLFREFDYQNGNNILDSILEVGAALKAGEKPAKEIADFWDKLLVLFKLVLQIRNSDAKTGDDYIISPVMSEDGIFFDSREQEKLGNNAKLPKDADANGAYHIALKGLYLLKAFDKTPEDQLKKVDMKISNADWFRFAQEKEYNK

SEQ ID NO: 258 - protein, 1332 aa, unidentified
  REGION 1..1332: note = Description of Unknown: uncultivated organism sequence
  REGION 1..1332: note = Category: MG31 effectors
  REGION 1..1332: note = Description: MG31-31 effector
MRTIDEFCGQKNGYSLSKTLRFELKPQGKTLENINKAGLVKVDEQRAKDYQDVKKLLDNYHKYFIDDILKNASEKDLDWKPLKDAVEEYQKDKTKDEQLKKEQDKMRSSIVKCFSADKKRFDHLTAATPYDLFKTELPEWLSKNSFPNLNNKAVETFKKFSTYFTGYQETRKNIYSAEAISTAVPFRIVHDNFPKFLQNLSIYKWINEKCPEVIKNAQNEIGSILAGKKLEDFFTLNSFNIFLTQTGANEQRGIDFYNQLIGGVKQQNIQIKGINQCINEYWQQHPEFAKENRRVKMVPLYKQILSDRSTLSFVIESIENDKELFDAVTKFNESITLIKDTETEKTSVLENISTLIKNISDFDANHVFVNAKDLAGISLVLFGKWDALQIRMNEFAKATFSTKQERSRWVKNLEENSTTKRKGVFSFAELDRVLAFSSEEINATEISIKDYFDTQYKKFFDAEKNEVVVTKEVTVLSVDDLLISIQSKWNSLQKVVNNSTTENQLKENTENVAILKDYLDCVNELFTRLKVLNVDKSEARDTSFYSVYDEVMETLSEIMPLYNKVRNYITKKSFDIGKYKLNFDNPTLASGWDLNKEDANTCVILEKDGNYYLGVMNAKNKPKFSAIQPDDSVPCYKKMVYKLLPGPNKMLPKVFFSTKGIATFNPPKEILEGYNAGKHKKGDTFDLNFCHKLIDYFKSAINQHPDWKNFNFKFSDTSTYKDTSGFYKEISEQGYKLSFVNVPVSIIDSWVDEGKLYLFQIYNKDFSPNSTGTPNMHTLYWRNLFSKENLDDVVLKLNGEAELFYRGVGIKNPVVHSVGSKVVNRTTKDGKTIPEAIHDEIYKYVNRKIPELSQETKKLYENGLVVVKTIQKNHELIKDKHYTQEKFLFHVPITINYKASGNSYINENVRQFLKNNPDVNIIGLDRGERHLIYMSLIDQKGNIIQQKTFNTVERKKNGATVSVDYHEKLDQKEKERDAARKNWQTIGKIAELKEGYLSAVIHELVTLMIEHNAIIVMEDLNFGFKRGRFHVEKQVYQKFEHMLIDKLNYLVFKDRGLKESGGVLNGYQLAGIFESFQKLGKQSGFLFYVPAGYTSKIDPATGFANLLDMTNLTNVQKKRDFFAKFDSICFDEEKQMFAFTFDYKNFPGKGSQEMSRTKWTVYSNGERIQFCGKGKASKHIENLTEEFKTLFREFDYQNGNNILDSILEVGAALKAGEKPTKEIADFWDKLLVLFKLVLQMRNSDAKTGDDYIISPVMSESGNFFDSREQEKLGNNAKLPKDADANGAYHIALKGLYLLKAFDKTPEDQLKKVDMKISNADWFRFAQEKEYNK

SEQ ID NO: 259 - protein, 1332 aa, unidentified
  REGION 1..1332: note = Description of Unknown: uncultivated organism sequence
  REGION 1..1332: note = Category: MG31 effectors
  REGION 1..1332: note = Description: MG31-32 effector
MRTIDEFCGQKNGYSLSKTLRFELKPQGKTLENINKAGLVKVDEQRAKDYQDVKKLLDNYHKYFIDDILKNASEKDLDWKPLKDAVEEYQKDKTKDEQLKKEQDKMRSSIVKCFSADKKRFDHLTAATPYDLFKTELPEWLSKNSFPNLNNKAVETFKKFSTYFTGYQETRKNIYSAEAISTAVPFRIVHDNFPKFLQNLSIYKWINEKCPEVIKNAQNEIGSILAGKKLEDFFTLNSFNIFLTQTGANEQRGIDFYNQLIGGVKQQNIQIKGVNQCINEYWQQHPEFAKENRRVKMVPLYKQILSDRSTLSFVIESIENDKELFDAVTKFNESITLIKDTETEKTSVLENISTLIKNISDFDANHVFVNAKDLAGISLVLFGKWDALQIRMNEFAKATFSTKQERSRWVKNLEENSTTKRKGVFSFAELDRVLAFSSEEINATEISIKDYFDTQYKKFFDAEKNEVVVTKEVTVLSVDDLLISIQSKWNSLQKVVNNSTTENQLKENTENVAILKDYLDCVNELFTRLKVLNVDKSEARDTSFYSVYDEVMETLSEIMPLYNKVRNYITKKSFDIGKYKLNFDNPTLASGWDLNKEDANTCVILEKDGNYYLGVMNAKNKPKFSAIQPDDSVPCYKKMVYKLLPGPNKMLPKVFFSTKGIATFNPPKEILEGYNAGKHKKGDTFDLNFCHKLIDYFKSAINQHPDWKNFNFKFSDTSTYKDTSDFYKEISEQGYKLSFVNVPVSIIDSWVDEGKLYLFQIYNKDFSPNSTGTPNMHTLYWRNLFSKENLDDVVLKLNGEAELFYRGVGIKNPVVHSVGSKVVNRTTKDGKTIPEAIHDEIYKYVNRKIPELSQETKKLYENGLVVVKTIQKNHELIKDKHYTQEKFLFHVPITINYKASGNSYINENVRQFLKNNPDVNIIGLDRGERHLIYMSLIDQKGNIIQQKTFNTVERKKNGATVSVDYHEKLDQKEKERDAARKNWQTIGKIAELKEGYLSAVIHELVTLMIEHNAIIVMEDLNFGFKRGRFHVEKQVYQKFEHMLIDKLNYLVFKDRGLKESGGVLNGYQLAGIFESFQKLGKQSGFLFYVPAGYTSKIDPATGFANLLDMTNLTNVQKKRDFFAKFDSICFDEEKQMFAFTFDYKNFNRKDAQEMSRTKWTVYSNGERIQFCGKGKASKHIENITEEFKTLFREFDYQNGNNILDSILEVGAALKAGEKPAKEIADFWDKLLVLFKLVLQMRNSDAKTGDDYIISPVMSESGNFFDSREQEKLGNSAKLPKDADANGAYHIALKGLYLLKAFDKTPEDQLKKVDMKISNADWFRFAQEKEYNK

SEQ ID NO: 260 - protein, 1332 aa, unidentified
  REGION 1..1332: note = Description of Unknown: uncultivated organism sequence
  REGION 1..1332: note = Category: MG31 effectors
  REGION 1..1332: note = Description: MG31-33 effector
MRTIDEFCGQKNGYSLSKTLRFELKPQGKTLENINKAGLVKVDEQRAKDYQDVKKLLDNYHKYFIDDILKNASEKDLDWKPLKDAVEEYQKDKTKDEQLKKEQDKMRSSIVKCFSADKKRFDHLTAATPYDLFKTELPEWLSKNSFPNLNNKAVETFKKFSTYFTGYQETRKNIYSAEAISTAVPFRIVHDNFPKFLQNLSIYKWINEKCPEVIKNAQNEIGSILAGKKLEDFFTLNSFNIFLTQTGAKEQRGIDFYNQLIGGVKQQNIQIKGINQCINEYWQQHPEFAKENRRVKMVPLYKQILSDRSTLSFVIESIENDKELFDAVTKFNESITLIKDTETEKTSVLENISTLIKNISDFDANHVFVNAKDLAGISLVLFGKWDALQIRMNEFAKATFSTKQERSRWVKNLEENSTTKRKGVFSFAELDRVLAFSSEEINATEISIKDYFDTQYKKFFDAEKNEVVVTKEVTVLSVDDLLISIQSKWNSLQKVVNNSTTENQLKENTENVAILKDYLDCVNELFTRLKVLNVDKSEARDTSFYSVYDEVMETLSEIMPLYNKVRNYITKKSFDIGKYKLNFDNPTLASGWDLNKEDANTCVILEKDGNYYLGVMNAKNKPKFSAIQPDDSVPCYKKMVYKLLPGPNKMLPKVFFSTKGIATFNPPKEILEGYNAGKHKKGDTFDLNFCHKLIDYFKSAINQHPDWKNFNFKFSDTSTYKDTSDFYKEISEQGYKLSFVNVPVSIIDSWVDEGKLYLFQIYNKDFSPNSTGTPNMHTLYWRNLFSKENLDDVVLKLNGEAELFYRGVGIKNPVVHSVGSKVVNRTTKDGKTIPEAIHDEIYKYVNRKIPELSQETKKLYENGLVVVKTIQKNHELIKDKHYTQEKFLFHVPITINYKASGNSYINENVRQFLKNNPDVNIIGLDRGERHLIYMSLIDQKGNIIQQKTFNTVERKKNGATVSVDYHEKLDQKEKERDAARKNWQTIGKIAELKEGYLSAVIHELVTLMIEHNAIIVMEDLNFGFKRGRFHVEKQVYQKFEHMLIDKLNYLVFKDRGLKESGGVLNGYQLAGIFESFQKLGKQSGFLFYVPAGYTSKIDPATGFANLLDMTNLTNVQKKRDFFAKFDSICFDEEKQMFAFTFDYKNFNRKDAQEMSRTKWTVYSNGKRIQFCGKGKASKHIENLTEEFKTLFREFDYQNGNNILDSILEVGAALKAGEKPAKEIADFWDKLLVLFKLVLQIRNSDAKTGDDYIISPVMSEDGIFFDSREQEKLGNNAKLPKDADANGAYHIALKGLYLLKAFDKTPEDQLKKVDMKISNADWFRFAQEKEYNK

SEQ ID NO: 261 - protein, 1294 aa, unidentified
  REGION 1..1294: note = Description of Unknown: uncultivated organism sequence
  REGION 1..1294: note = Category: MG32 effectors
  REGION 1..1294: note = Description: MG32-1 effector
MTIFDSFTGLYKLSKTLRFELKPVGKTVEFLKEHNGLLGDFKRAEDYPKVKAILDEAHKDLIERALTGVELDWQPLADALEESRIGEKNTNLKDVQKKFREKIATLLSEDKGYEKLTDPTPRNFIQEKLKLTSNNLITPLKTFEKFACYFKGFQENRKNVYSSEEIVTAVPYRVVNDNFPKYYSNVKVFESLQAKYPGIIKAVEDNLKDYLNGCKLSSIFTLNNYSSCLTQSGISFINTIIGGYSVKDAPKIRGVNEEVNQYLQKHPELLREERPPRMTLLFKQILSDRETQSFVMTQFQNDTEAIAAIDAFAELLKEEKVLSFVVELLSTISSTTQNIYVAGSELAKISMRLSGYWGLIRDAQESCIETILAMTKVTKAKEKELREALEANVFALTDLLALDLTLVDEEDNEKKYSLLDYWSRENCDSVIQKVKDTETAYNTLKARVTTSNWLHESHDNVEIVKAYLDALQELLHYLKPLRVSNEINKNQGFYAEFDALYDTLELIIPLYNRVRNYLTRKVGDAQKVRLYFDLTTRTEGWMESKIKERKTVLFERDGAYYLGFIPSKNRLPAFNKFIPQGGDATYRRMVYKQIGNVSNYLSIKQMKPTLLRQISLASSDEKREYYTNILKWLGGEYDADKKVWKNGKFDKHTLSALELAQLISYVINEFIPNYDNLRGYKFKFNAPESYPNWKSFTDHVQMMGCYSINFEEVSKCKIDDLVERGDLYLFQLWNKDFSENSTGLPNLHTLYWRSLFAPENLQQAILQLNGGAELFYRFAPLQKPQTIHKKGTKLVNRHTCDGKLIPEVYYQEIYKWANGKLPEGLSATAKDWMAHATIKDAKHQITKDRRYTEDKYFFHVPITFNFTIANKSKSLNSLIQDATRNNPDVNIIGLDRGERNLLYLTLINQKGEILQQKSFNVVEHVNSEGKTIETNYHDKLKDRERDRDRARKSWDTIGKIKDLKEGYLSAVIHEIVTLMLEHNAIIVLEDLNSDFKRGRFCVERQVYQKFEKMLIDKLNYLSLKTRAITVPGGILKGYQLTEKFESFQKLGKQSGILFYVPAAYTSKIDPTTGFTNLFKLKKCTNAANRKVFFELFDEIRYDEKRKAFAFTFDYDKFKTSQTSYQKKWTVYSAETRLTYQREKDGNGREIIIRPTTLITDAVKLLGIEVKDGLNLLEVIQKTPAEPRTAKFYGDLFYAFERTLQMRNSSSETGDDYIESPVENTDGIRFDTREEAKKGKDAKLPIDADANGAYHIALKGLWYLKNDFNRDKDGKIQKITHAQWLKFMQAKEWLK

SEQ ID NO: 262 - protein, 1460 aa, unidentified
  REGION 1..1460: note = Description of Unknown: uncultivated organism sequence
  REGION 1..1460: note = Category: MG37 effectors
  REGION 1..1460: note = Description: MG37-1 effector
MASTNQSAVPTTQRAYMLRLHPARPFGNHEWKREAADMQAALWATHEAVNRGAKTFGEWLLTLRGGLSYRLADEPITEATGRSERTPTDRARRNRRILLALSWFSVEDESGAPVNSDVIVAYGDGCKLRQEAQQERNRKLIEALGSVLHAQGVPPSEIGELQAPGTWLGDCAQSLSSAIRPDAVWVNRSEVFSQLCTELPGLDADYAAVTTFSFFGGSEKYFYVDDGAAEENEAGEAGEEAADFRQKARQWISTNFGTGKKSDNARISAALKSLAGGNLDEFSGRSKADLVKYCVGLLGIDPSNATEDALRVAVGWNTGRPSKGRLAIQNLPDLLTKDGIGVFRRKIMEEADEKSKNASAKNVPAWIANMRAKIEAGIGIPYVTDRNLIGEYSVMLDHAARRVSIAQTWTKRAEAERRRFSDDSERMHDVPHAARSWLDRFSETRSSDTGAVGEYRIRPRALQGWELVVQRWSKSNCRTEEDRIAAVREIQADWEDNKKIGDIPLFEALATDDARCVWSPDGSSDPDILKRYVAASHARAKQAAFKVPAYRHPHPLSHPVFCDFGNSRWKIRFAVHEREYARRNGKGTVNKPGDAQGLQMGLWNGNGVQPHEMRWASKRLSVDLALDDLAVSDAVPVTLGSRFGRAALPSVLPVSVLNVFDEGDWNGRLQVPRSQLERIASLLAKNKVAAAKEFRQKLRWSLTFSPRLQPTGPFHDFAAQHGITPNRKGEYFPNGEQNRITKREGKAKLVLSRLPGLRLLSVDLGHRFAAACAVWESLSGPDFAKEIFGLTIESGSAEGLYLHTRHMDESGKERSTIYRRIGSDALPDGSDHPAPWARLSRQFLIKLQGEERSARKAAPTEIYSVRELEAGFGRVSEKDDLPTQVDELMSHTIRVSRLALRRHGDRARIAFAMISSYKPMPGDRKYNFFPNDTSDGFDDTPEQRHRKHIEFIQDALLLWHDLISSKGWQDQAAEQLWKQHIATLLGYQHPEPINRDGSGPERKKKRNENFDRLRGAAEALINNAPLRLTLNAEWKGRWESDDQDWRSHLRRLQDWARPPASKGSQAIRHVGGLSLTRLATLTELRRKVQVGFFTRLLPNGDKARIGERFGQKTLGVIEEMREQRVKQLASRITEAALGIGRVQPGTKHDPRRPRVRVDLPCHAIVIESLRNYRPDDLQTRRENRALMEWSSGKVRKYLEEACYLYGLHLREVPPNYTSRQCSRTGLPGIRCADVPIEQFRAAPFWRKIVDSARKRISQNKGTEEDRFFCDLDETYGNDVNPQAGRVATLRLPRKGGDLFVSAPVWAQLNRKDQYGNDRVSARPNDWSSKRALQADLNAAANIGLRALLDPDFPGTWWYVPCTARDGRATQDKVKGSSCFVAENWRILSVSERSATKREVVNAWHDPSTCSLSNRLDWRETTHYWNTVRARAVEALRQFNGLPRSNSAPVHNSLESALRER

SEQ ID NO: 263 - protein, 804 aa, unidentified
  REGION 1..804: note = Description of Unknown: uncultivated organism sequence
  REGION 1..804: note = Category: MG37 effectors
  REGION 1..804: note = Description: MG37-2 effector
LAELDLFNGRTIKAVRLRWQSKRLTNDLALHQTAVIDDATPVSRANRLGRAAAGAGSRSAVRILGVFDHKHWNGRLQAPRAQLHKLAKIRDNATVPEPARRQKYERGLSTIRWILTFSPRLQQKGPWLEYAAAQNLSAKSPHFAENRGRGWLAQHLLGRLDGLRILSVDLGQRYAAACAVWEAMSGDQVRATCASAGAPEPDKSALSIRVSVGGRRTILRRVGEDAWARLDRCFVIRLAGEDVPARKASPAEIQAVQTLCRELGYSDASRAAAAVDKLMSYALRVLRLGLQRHARRAMVVFGLAAKEKVVLGNQLRALSEDERTDSIGTALADWWTFAVSSRWPDPHAAALWDEHIADRAAGIELPPDLESFSFRERLLVREKLLKDVRPIAQALRPEEVEQLTEIWRLQWLGEEARWCKRLRWIKDWLLPRGSGAQCNSIRRVGGLSLRRLNNLRALYRLEKSFAGRLRVGVGGHRCESQVPSEEFGRKTLTALERLRENRVKQTASRIVAAALGLGKDLKRGHGERFAPCHAVVIENLTNYRPDEVRSRRENRQLMDWCAAKVKKYLNESCDLHGILLREVQAAYTSRQDSLSGAPGVRCADVPIRDFMACGGYWERELRRADKANSSGRSDARSRYLIALRDRISAAIPYPAAAATKGAVRIPVDGGPVFVSADPQSPAAHGTQADMNAAANIGLRALLDPDWAGRWWYVPCNASTGVPVADGLKGSALIQPNLTLFSSHNGAEKKPKRQVVNLWRDVSARPLNVGIWRTYAQYRASVMERVTAILLTGLQTLGDDVDLPF

SEQ ID NO: 264 - protein, 1484 aa, unidentified
  REGION 1..1484: note = Description of Unknown: uncultivated organism sequence
  REGION 1..1484: note = Category: MG37 effectors
  REGION 1..1484: note = Description: MG37-3 effector
MPDEALVNGSTAGTDLMVVTQRAYTLRLQGVDPQDHSWRDALWKTHEAVNKGAWAFGDWLLTLRGGLDHSLADAKVKGGKGNPDRDPTDEERKARRILLALSWLSVESKKGAPEKYRLDKQSSARSNLNPEEALREILKGRGLGKSEIESWVQDCSASLSAPIRDDAVWVNRSKAFDDAVKSVGCSLTRDEAWDMLERFFGSRDAYLAPAKGSEDESSETEQEDKAKDLVQKAGQWLSSRFGTGKGADFSRMAKIYEEIANRAGKAQPGMTGDKAIADLATALSKFSPTSNDLQGVLGLISGPGYKSATRKLLKRFRDKTPVTQEDFQNLQDKAREDAQKCKNKTGSKGHRPYADAVLRDVESVCGFTYLQDGGSARHSEFAVMLDHAARRVSLAHTWIKRAEAERSRFQEDAKKVDQVPEAAKKWLNNFCLERSRAAGALEPYRIRRRAVDGWKEVVAAWSKPDCKTTEDRIAAARALQDDPEIDKFGDIQLFEALAEDDAVCIWHKDDDPANPPDPQPLLDYVAATDAEFKKRHFKVPMYRHPDELLHPVFCDFGNSRWNICFDVHKNTKTPFPRTLCLTLWTGSEGMKPVPLRWQSKRLARDLAFGQDTRKDGASDVTRADRLGRAASNVGKNDAVNIAGLFEEKHWNGRLQAPRRQLEAIARYVEKHGWNEKAKNIRDAIQWSVTFSAKLQPNGPWCAYAKEHGLRKDPQYWPHTEVNKDRKGHARLILSRLPGLRVLSVDLGHRYAAACAVWEAISTRQFQQNIEDKKILRGGTDAESLYCHTEHTTDGKKHTTIYRRIGADTLPDGKPHPAPWARLDRQFLIKLQGEAEGAREASNEEIWAVHKMETVLGRSVPLIDRLVAAGWGSTEKQKARLDAIKKLGWVPIKRADASEDADTEEEEELAFRPSLSVDDLMSSAVRTMRLALKRHGDRARIAFAMTAAYKPMPGDRRYYFTESKDLSATEDATARNSKHIEFIQDALLLWYGLISSRGWRDEAARQLWDDHVAKLHGYKAPEEIGEDVSGAEREKKQKENREKLYDVGKALAQNESLRKTLHHAWKTRWEEDDGRWKKQLRWFKDWILPRGKYASDPSIRKVGGLSLTRLATLTEFRRKVQVGFFTRLKPYGTRAETKEQFGQSTLDALEHLREQRVKQLASRIVEAALGIGSENKQHWEGGKRPRARSKDPRFAPCYAVVIEDLTHYRPEETRTRRENRQLMSWSSSKVKKYLAEACQLHGLHLREVSAGYTSRQDSRTGAPGIRCHDVPVKEFMRSPFWRKQVAQAEKKQDEGKGDARERFLCVLNAKWKGQPEADWEKAGAVRVPLKGGEIFVSADQNSPAAKGLHADLNAAANIGLRVLTDPDWPGKWWYVPCDPVSFLPVKDKVEGSAVVKPDQPLPKSAQAQSGDGAKDKKKPGKRGASKSKESKKVVNLWCDISSSPLECREEWKEYAAYQNEVQSRVIHILEKQIKRLRQATARGVQ

SEQ ID NO: 265 - protein, 1500 aa, unidentified
  REGION 1..1500: note = Description of Unknown: uncultivated organism sequence
  REGION 1..1500: note = Category: MG37 effectors
  REGION 1..1500: note = Description: MG37-4 effector
MATAINYPTTQRAYTLRLRGIDPQDQSWRDALWATHEAVNRGAKVFGEWLLTLRGGLDHQLADAPVKVRGGTTRLPSDEERRDRRVLLALSWLSVEDAHGAPPDASLIVAKGTDSADCRARKLADALIAILQARSVAASEIGDPSKPPEDQPGTWLGDCMGSLSAAIRDDAVWVNRSKAFDAATQSCPSLTRDEIWDFLEPFFASPDAYLKPERAESDEGDSTSAATEDKAKDLVQKAGGWLSKRMGAGGGANFQDLARAYQAIAQWASSAQPGQSAQQAVGSLAGYLSQHGFSPTANDATGVLAVISGPGYKSATRNHITAIATSPEITPQDLSKLQELATKDKAGCSSKIGGKGPRPYATMILQQVEAACGFTYLQSDGPARHREFSVMLDHAARRVNVAHSWIKNAEAERRQFESDARRIKKVPQDALNWLRGYCEERGGASGSLEGYRIRRRAIDGWDQVVIRWSRSDCQSADDRIAAARQLQDDPEIDKFGDIQLFEALAAEEALCVWKPDGNPTAQPLKDFVAATEADAKKKRFKVPAYRHPDPLRHPVFTDFGNSRWGIEYSAHRAPAKCDELGQQVDRLTQAVAEAQRNLDGATAAQRASRESKLAEAQSKLVAAQTEFAAINDPHRVELKLWNGQAVAAIPMRWSSKRLIADLSLRRATQPSSDQRIGVTRADRLGRAAGNADDGRPVTITGLFQQDHWNGRLQAPRAQLDAIAKHVDKHGWDAKARRQIARIRWVVSFSAELSQQGPWFEFCHRFGEDAPARPFVSRHGEYAVKHRDNDQRKGHAKLILSRLPGLRVLAVDLGHRYAAACAVWEAISSDQMRQACAAANAPAPHPLAMYIHLKSTTAKGKPTTTIYRRIGPDKLPDDTPHPAPWARLDRQFLIKLPGEDRPARAASPDEIKAVEDFEDSVGRVRTAVDPPRKRGVDLLMHDAVRTARLALARHGRRARIAFQLISQVRILPGGRPQTLDDAGRRDLLNDTLADWYALATDSRWTDAAARQLWNERLAALNGGFTIDPPADASQPEAERTRAQRRQAEQELRHRLASLVEALFCNPTLCQQLHQAWTDRWNADDQQWRSRLKWLSRWLLPRGGSRRDGSRRHVGGLSLTRISTLIDFRRKVQVGYFTRLRPDGSRAEIGPQFGQSTLDAIQRLKDQRIKQLTSRIVEAALGIGVEQDRIWDAAKRKWRTVKRPREPRYHVDDQGVQQRDPRFQACHAVVIEDLSHYRPEETRTRRENRATMDWKSAETRKRLADHCQLYGLHLRDVNPQYTSRQDSRTGAPGCRCVDVSVADFLTKPAWRKQVAQARGKVASNRGDARDRLLVELDHQLTTANSLRGEMDSLRIPVNGGEVFVSADPRSPLAAGIQADLNAAANIGLRALMDPDFLGTWWYVPCDPSTKKPHIEKVKGSILATVGALQATSEEAAAPPRRGRGGTRSAAPREVINLWRDPSAVRIQDATAGEVWDVTPVYWSIVKDRVVDVLRQRNTKSGD

SEQ ID NO: 266 - protein, 1427 aa, unidentified
  REGION 1..1427: note = Description of Unknown: uncultivated organism sequence
  REGION 1..1427: note = Category: MG37 effectors
  REGION 1..1427: note = Description: MG37-5 effector
MTQHAYTLKLRSLYEQRSTNDEKTIVLKAKDAKHLWQTHLLINRGAQVFGDWLLTMRGGLSPSLADELIMEGKGTNKRNREPTEQEKADRHILLALSWLSVESYEGAPDKYVIASAVDDKDKRSKALITALEKVLKRQKITTNDINIWRRDCEDVFSSAIRDDAVWVNRADAFNDLSAEINWDYNDASSLLFHFIKQKDYFNLESKDNDKNNTIKDKESFGQVARGWLSANWGKGKKSDFSEIINKLQKIVNYDFNSLYKKSGYKIISVITQHLTTKKDSDNKETFKKLCKYIGWQGRSSKGRLALEKLYNKKSVTKKDIVYLNEKLQQEIKEKKSKNRVIPKWVAKIQKYLEEKINIKYQPLDMSRNLIGEFGVMFDHALRHVSVAHSWIKNAEINRRRFHEDAQKIDNVTKDAKEWLNEYTHEKQEFTGALGKYIINPRAIDGWKDILKGWKGCSNYEERVEVINTIQTNKNDADKHFGDANLFKRLAKDDTRAVWINNDNKFDETILKNYVDAKKASYDMQRFKVPAYRHPHPLLHPVYCDYGNSRLNVKYDAFDIINYVLNNKKIKGAEKVINKLSISLWDGTSFQNIPFFWGGKRFKTDLALDNINNLYSSNKHLSLKNSIETTKADRFGRSLVTADSIRLEIYNKGEWNARLQVDRRLLENINKKLKASNINCYSDIFSIKTSNAMKIQQLVYKLPWFLTTSPELQSAHTLKLGPWADYINSCKDKSPFLRNNKISYIGWPHYNKNKKRNKKGSMILSHLPNLRVLSVDLGHRYGATCVVWETISNKDIINLCKKHNVNQPKVDTIYHVIKTDKKIKIHFRRIAGNTLPDGLPHPASWARLERQFMIKLQGEDRSSRKIFNNEKQIAKQVAEFCGNLHDEKAFFNNNKNIEQLMSATVSILLDGIRRHNDIAKIAYYLSPERGRNPGDESLKKGLENALQLWHQLWNSKHYKHEFAKETWDKYIISFFSNKERQELTSIGDNKNKTCRKKQKAIFKNIAQKLSADDRMMMYKAWDNYWHERDGHGDKGKTKLCRQCIRLVRDWIMPRRDSDYVFSKQFRNVGGLSLTRINTFKKLYRVIKAYAGRPEPENIKINIAEKGDTSSKGMGDRILKAMENMRDTRIKQLASRIVEAALGLGKEQGKKDKNTKDISRPRENIFKPCHALIIENLKNYRPDELQTRRENRQLMTWSSHRIFDFLKDECDLFGIHLRTVSPSYTSRQDSRTGAPGIRCTDIPLTNFLKENSYWQQQVKKADEKKLKDDYSSFIVNAYSILIKKYGHTPPKDKWIRLPRRGGEIFVTADNNSPIAKGIHADINAAANIGLRALLDPDWAGSWWYVPCNKDGTPKSTEIKGSTIFKEINKLPLQGDIGGKGDIVNLWSDVSSSNLENKVWKYSTNYKSNVRKRVIERLMQQSILKKDQND

SEQ ID NO: 267 - protein, 1338 aa, unidentified
  REGION 1..1338: note = Description of Unknown: uncultivated organism sequence
  REGION 1..1338: note = Category: MG37 effectors
  REGION 1..1338: note = Description: MG37-6 effector
MAKETTTQRSYTVSLCKPELGAKAWKALAATHIGMAKGAKACGDMLLNMAAGIAPCAIEELGFSGAEAVRNARRMLTLTWFDVESEDGSPQEFVVPVEELPQKLRDHLISAGLDREEADSWLEDCQDVFATPIREDSCWIDRRSSFEAMEARLGVDISQSDIEDFCFGQFAILGSLKDYLIIPDYESLQPDGISDAPSKIQAARNMLSSRLGAGIGSDTAAMADAYDLINRALEGLSSGEHCPKNEFRRVIELELDDSMPDISFEEFVNSKIKGIGRPTATAQRMEAALACREFIPWSQIEALMEKSADDARKQRAKVGLKGRRPYFDAIMGDLEKKTGIPYPAEGNQTPARNWYSCLFDHAARGVSAHHTWVKRAESTRNATYANNEAFETLPDEARAFLSKYEKERSLSLGAVEPYVIRRKAITGWTKDHVKQLHNAKSAEERVEILKEAQSQGDMGDMTLLIDLVRDDALCAWHDVEGKPAEKILEVWAKHQELERERLHFKTPSYRHPDHLLHPVFADFGKSRPEATYTFGESLEQRTVTLMLVDGGGFSRFTFHWNSKRLMDDFDFSALEKEGKAAACAMTTRFGNSLEEERKPRLLLTKAAKKPIVSDVGTRLQLTRASLERCAKRQNDAMKNPDELDWFLSLALNIKPAPFTPKALIAQAKERKDENKARTSALSKLRYSRIHGLTFIGVDLGHRKAASCSVWKTCSAEEIEQLCIEAGHELPDKNTLHLTLDCIDRRINARRIGADTLPSSEQHPAPWAVLQREFAIELPGAKEEEQRAATKNELSFLANPYAISVETRSAKAKKSAYRTTSEAQYAAVEAIRRDVKQHASMASFIHLIRSKKITKPGGAEMLLSDDELVKTVEKRLEKELGNKYAKPAPWVENLPRSNDPSTCAHILCTEKEYVDALEKQWEEDDENIRIALRILRNWIFKGIEPYSDSRTACKGVGGLSLNRIATMQMAYQLVRSFSMRPFPTDTRRGIAMAERGELAELGRRMSAHINTMREQLAKHVASRIVEAALGLGGSQNTSEKRNVRTPGDRFQPCDLVVIESLTNYRPEQTRSRAENRRIMQWASARVGEMLRDECEIYGIALYETPAAYTSRQDSRTGLPGFRFKEVPVAAFVNGGSYHGVNIDRALSSDCENERRFYGELLKRWNKGKGEWDEPLRPEKTVWTLKRGAWVSKNGMLLKKGMAPQPIPIVANGSELFMASTDEGVLKIQADINAAGNIALRGVTDPDWAGSWWRVNIQAKSGMVEKRHRGSLAFDGTAIDPEGKAPHEGVIGAWSTVGATPLSDEKRKWSTYQKYWDDQRSKIFARLCRRYGIPPAIEEE

SEQ ID NO: 268 - protein, 1397 aa, unidentified
  REGION 1..1397: note = Description of Unknown: uncultivated organism sequence
  REGION 1..1397: note = Category: MG37 effectors
  REGION 1..1397: note = Description: MG37-7 effector
MAVKTTQRAYTLRLTGTDRNDQTWRENLWRTHEVVNKGAKAFGDWLLTLRGGLSHKLAEPEPDAKLPKGYTRDDLRRDRRILLALSWLSVESKVGAPERLIVAEADDPQRKEKVVKALERILNQRRCSPADAASWVANCRDSLSAAIREDAVWVNRKEAFDDLAGNWNGLTDDDALMTLSGFFGEASEYLCLPEGDSDSAGADGEHFSNLARAWLSSNWGTGTKSDKTQIAHALDVLAKANLSRLVGRAGTELAAALVGLLGKKLEDDQDPWEVLRLLIGWSTGRSSKGRMAIEKASSVSALAPEDLTRLQTKLGEEAASKLGKAGVSSPTWSADLRREIESVTQMQFVTGRNLIGEYATMLDHAARRVSQTHSWVKLAEARRQTFTAETARLGAVPRDIRDWLDAFCERRSMESGALAGYRIRRRAVDGWDEVVRAWSKSGNRTEADRVKAARGVEADPEMDKFGDIQLFEALADDEAKCVWLRDGKPDSGPLKDYVRAKDAEDRMRRYKVPAYRHPDPLLHPVFCDFGCSRWTISFGVHDSVRELDGLREALAKLAGSTEEMAEARRLKAKKAIAEARETLMKPEVLHGLSMGLWDGSAITPIGLKWQSKRLPGDLALADAGSTELTWLSRADRLGRAAGAVSSKDSAGIIGLFDQKEWNGRLQAPRVQLEAVARCKDTAKRARLRYRLEWLVTLSAELQPQGPWCDYAKAHDIKDDPKYWPHSDENKKRQGHAKLILSRLPSLRVLSVDLGHRYAATCAVWEALSEKEVRKVCSAAGQAAPKPDDTWLRLKTGQRTAVYRRTSADTWAHLDRQFTIKLQGENAPARMASPMEMKLVQELEKALGRTRSNENPFPQQVDELMSEAVFILRRGLRCHGDRARIAFNLTTDKRLLSGGRQEKLDKPGRVTLLQETLASWRNLADDNAWQDGCAKQWWDDFVAPLAADATLPATPAEDALLPTIKAYRRKLTDSLKSVAEVLSGNPQLRQKLHVLWATRWRADDAGLRVHLHEVHRWILPRGKGRADATIRHAGGLSLRRLATIRGIWQLQKAYSMRPDPDDLRKNVPKAGVTNEEFGRRTLDSFERLRENRVKQLASRIVEATLGIGREQSKVNCKDPKRPRERVYATCHAVVVEDLDNYRPDEVRTRRENRQLMQWSAAKVRDYLAESCQLHGLHLRKVYAGYTSRQDSRTGRPGVRCSDVPVPDFLRRIKPRIVDLRKKGDSESRFLAAAYDFWSGKPHTKGETVRIPQRGGDIFVSADPNSPAAKGLQADLNAAANIGLKALLDPDWPGKWWYVPCDAKTHIPVPEKVKGGAADIPDALAPVSSGDDDGKKRKRKTASGDITNFWRDPAATAVAQDGWVETPEYWSRVKDQVIRILMRQLSGKELAGIPYEPRL

SEQ ID NO: 269 - protein, 1148 aa, unidentified
  REGION 1..1148: note = Description of Unknown: uncultivated organism sequence
  REGION 1..1148: note = Category: MG37 effectors
  REGION 1..1148: note = Description: MG37-8 effector
DERGAPNGKGLRVATGRDTGDQRREAVEAALREILEKRGVNEEEIRAWLRDCGPSVEARIRDDAVWVNRSAVFDEVANGWDTANARGDAHTLLSFILGDEFLTPPTPNKLKKAADQVDEGDEDEQQERQQAIKASSRGAGQKTRHPFSHLLGQGGPFGKPTRNLLLRDRWRDHIKAELEQSTGIPVVDSQKDKGKMKKASGPSHTELQREMFSKAASRLAQIVTKQRQQEADRLARKEADDELCKMESDSSFADALAALRAYCDEYRVTSGAIGEFLIRPRQITGWESVLRRWASIGEQDPERALEARIDAVKEAQDADEEKKFGDVNLFFRLAEDKFKAAWQRAGKPDPTILQRFVKGMKARSDTERLKVAAFRHPDPCRYPVFAQFGVSRPDIRFRRLKAFADAPAGDDPRAVGMLLWHPKLKSARLTLMFGASKRLDREIGSACDNALRGTDRLPEVSRRGRLGAAAAGLQTADTLARVVRVFDLRSVKSRPAGDEQGDGDGDENGAEKLKAPKWNGTLSTNRRDLAEIGKLVNEDAKKAARSRLRWTLTVSMEMEGRGPWFRYVVASQDQTPFVRTVRKDKPNDKNDLGKGYSERKGDKRVEAEGRPYQEFNKPLKENKNQTALVEDSSTARGGKACLILSRLPSLRLLSVDLGHRFAAACAAWETLAKDAFEKECRDAEANGAKIVLGPEGCKPDEADYVHVVWPEKNSNAATNKARAEGRGKFQPVTVYRRIGSDQIPDGTAHPAPWARLDRQFFIKLQGENEGAREASNEEIWAVHQLEAELGRTAPLIERMVRGGFGQHEKQKRRLEALRGMGWEPATSDVLPGTADEDEGEARKVSRSVDELMFAAVRTMRLALRRHGDRARIAFAMTADHKPMPGGRKYYFDKAEDASTNDDEATRRGKHIEFFQDALSLWHDLFSSRGWKDGAAKALWDQHIATLSGYLAPEEIAEDLTGSERKKKRKENRDKLRVTAEALAKDSNRRRGLQEKWKQRWEADDGAPAEVDQTTGRKLKEGSGWHARLRWFQNWVMPSSRQGLKSIRHVGGLSLTRLALLTEFRRKVQVGFFTRLHPDGTKTETKEEFGQSTLDTLEHLRQQRVKQLASRIVEAALGIGRIKIPKRGKAPQRPRQAVDAPCHAVVIES

SEQ ID NO: 270 - protein, 777 aa, unidentified
  REGION 1..777: note = Description of Unknown: uncultivated organism sequence
  REGION 1..777: note = Category: MG37 effectors
  REGION 1..777: note = Description: MG37-9 effector
DIKWLLTFSPKLRPLGPWLEYGGKEKIKERQEVEEKGGRGNDARLLLCRLPRLRVLSVDLGHRYAAACAVWETLGEEDFKREIKGRKVLCGGSSGECMYCHTLHRDREGKVLKTIYRRIGADTLPDGRPHPAPWARLDRQFLIKLQGEREGAREASVEEIWKVHELEARLGRTKPLIDRLVAAGWGQTPGQKKRLRILEGLGWKQTQGVVDVTKDNEMSYKPSLSVDELMFSTVRTLCLALGRHGDRARIAHALTADYKKMPGGQRYYFNRAEDASVGDDESVRHEKHVEYILDALLRWHDLFEAKGWQDEEARELWDKYIANLSCCLEVSEMDDSLTDAELKKRRKDFKERLRPVAEAIVKDGKLRKKIQQEWKRRWERDDEKWREDIRWFKHWIFPRKKQAGPSIYRMGGLSLTRLATMTEFRRKVQVGFFTRLHPDGTTGEIGEDFGRKVLEDLEVMREQRVKQLVSRLVEAALGIGSEDLSHWEGQKRPQQRIEDPRFSPCHAIIIEDLTHYRPDETRTRRENRQLMTWSSSKVKKYLAEACELHGLYLLEVPARYTSRQDSRTGAPGIRCSDVSVAEFKNSPYWRKEVARAKAKNEKNQGDARDRYLCELDAQLAGSGRLKNVRVPIAGGEIFVSADTGSPATKGIQADLNAAANIGLRALVDPDWPGKWWYVPCDSSSFKPINDRVKGCKVIDTQESLKEASPGLAVKGEKNSEKKRQRRAKHREVVNLWRDISAKPVSAAYGPWDEYSVYWNRVQDQVVKILRNNLALSK

SEQ ID NO: 271 - protein, 755 aa, unidentified
  REGION 1..755: note = Description of Unknown: uncultivated organism sequence
  REGION 1..755: note = Category: MG37 effectors
  REGION 1..755: note = Description: MG37-10 effector
DRLGRAAAGVPASATVRIAGIFEQKDWNGRLQAPRARLNAIAARVARHGWDDKAKRMRARLRWLITFSARLQPSGPWVDYTATFPDDASAKPFVSRKGDYAVRHQGNDAREGHAKLVLSRLPGLRVLSVDLGHRYAAACAVWETLAKVVFEKERHDAEAKGAHVVLGPEGCKPEEAIYAHFVWPEKESNAATKKARQEGREKFHPVTVYRRIGPDELVDTSTGEVKEHPAPWARLDRQFLIKLQGEDHEARKASPAEVEAVQELERAVGREPPDQRSLRVDDLMSETVRTVRLTLQRHGRRARIAFNLTASKRLLPGGREEVLTDEGRVGLLADTLADWYALFAGKGWNDEWARQQWETYVTPLLQGAALPQIPEDAEATPKARKKYRADLTENLKPAAESLAQNEPLRMKLHCLWATRWSKDDIALRKCLRWLRDWILPRGKKVKEKAGRAIRHVGGLSLTRIATIKSLYQVQKAFHMRPEPEDLRKNAPSQGDDALLDFGRSILDVMEHLREQRVKQLASRIVEAALGIGIERQVGKKTPKRPRQRLYWKDEKGNEHGDRRFAPCHAVVIENLTHYRPDETRTRRENRQLMSWSSSKVKKYLAEACQLNGLHLREVQAGYTSRQDSRTGAPGVRCQDVPVKEFMRSPFWRKQVAQAEKKQAGDKGDARERLLCDLNAEWKGKPEADWEKAGTVRVPLKGGEIFVSARPCSCCKHGKRGGAPGLQADLNAAANIGLKALTDPDWPGKWWYVPCD

SEQ ID NO: 272 - protein, 788 aa, unidentified
  REGION 1..788: note = Description of Unknown: uncultivated organism sequence
  REGION 1..788: note = Category: MG37 effectors
  REGION 1..788: note = Description: MG37-11 effector
DWNGRLQAPRAQLNAIAARVTRHGWDDKAKQMRDRLRWLIAFSARLQPSGPWVEYARAFPDDAPAKPFVSRKGDYAVRHQDNDARKGHAKLILSRLPGLRLLSVDLGHRYAAACAVWETLSTEQVRKACQEAGNEPPKDSDLYLHLKNGQRTVVYRRIGPDTIEAVDESTGEIKPVPHPAPWARLDRQFLIKLQGEDHEARKASPAEAEAVQELERAVGREPPDQRSLRVDDLMSKTVHTVRLALRRQHGRRASIAFNLTAAKRLLPGGREEDLDEEGRVELLADRLSDWYTLFKGKGWNDEWAKEQWETHIAPLLQGAALPQISEDAEATPKARKKYRADLTEQLKPAAESLARNPSLCKKLHCLWATRWRDDDGALRKRLRWLRDWILPRGKNARRDPAIRHVGGLSLTRIATIKALYQVQKAFRTRPEPDDLRKNIPAKGDDALRDFGRSVLDVMEHMREQRVKQLASRIAEAALGVGRVKRFAGGKDPKRPREQVDRPCHAIVIENLAHYRPEETRTRRENRQLMTWSSSKVRKYLAEACQLYGLHLSEVNAGYTSRQDSRTGAPGIRCQDVPVQKFMQSPSWRREVAHAEKKHAEGKSEARERFLCDLNAKWKGREAEWEKAGTVRIPLNGGEIFVSAGPCKCCERNDRNGPAGLQADLNAAANIGLKALTDPDWPGKWWYVPCDPKTFKPVKDKVAGSAAIRLDKPLKDLPAAQGTDGARKKPSKTKAQQREIVNLWRDVSSQPISANDDWREYKPYWDHVQERVVKILRQWAGLTPNYKNQ

SEQ ID NO: 273 - protein, 1249 aa, unidentified
  REGION 1..1249: note = Description of Unknown: uncultivated organism sequence
  REGION 1..1249: note = Category: MG37 effectors
  REGION 1..1249: note = Description: MG37-12 effector
FGTGKGADFNHMSRVYRKIAEWVNSSSATPGQNGREFMVSLAEGLAEFNPRSKDLDGVKSLISGPGYKSATRNLLDHLWGSDTVTEDHLQRLREAASNDAASCSGKVGEKGRRPYADKILLDVEETCGFSYLTDSNGGDVLTKTRDSYPENYDWGTSRHKSFAVMLDHAARRVSIAHTWIKKAESRRQRFEADAQKIHEVPHNIREWLDNFCTEWSDITGALDGYRIRRRAIDGWKEVVKAWSLPDCRTKEDRVAAARQLQDNPELDKFGDIQLFEALAEDDALCVWHRNGELDSEPDPQPLIDYVAAEEAEFKKQQFKVPAYRHPDPLLHPVFCDFGNSRWDITFSAHRSGQNRNEQHDSYFTMTLWDGMRIGNIDLRWHSKRLTRDLALKDKNSPVKPQKEVTRADRLGRAAAGVSGYEAVRVAKLFQEKYWNGRLQAPREQLEAIARHVKQHGWDQRACLMRDRIRWTVTFSAPLQPSGPWLKYVEQHTSLSKWPHNEDNKTRKEMARLILCRLPGLRVLSVDLGHRFAAACAIWESLSSLDFQKETSSRKILRGGTGPDHLFCHTEHRDESGKRHVTIYRRIGADLLPDGTTHPAPWARLDRQFLIKLQGEEEGTREASNAEIWAVHQFEKAIGRALPLIDRLTNAGWGSTEKQQQRLQELNKLGWFPARQEKADLPDDEEVDFFRPSIAVDDLMASATRSARLALRRHGDRARIAFALKGEYKTLPGNRKYYFNSPRDASAEHDEKTRHSEYVQFLRDALEMWYNLASSNTWYDRKAREWWVEYIPEVPLPRDDTKIPARGTSGSDKQALKQQLLSVAERLQKNAELRRQLSDAWEKQWKEDDQKWRGYLRWLRQWILPRGGRVDRRAIRHTGGLSLARLATITALRRQVQVAYYTRLRPDGSRAEISENFARKTLDALEELRLQRVKQLASRIVEAALGVGSENRNHWEKERRRPRQQICDPRFNPCQAVVIERLDHYRPEEVRTRRENRQLMTWSAAKVKKYLAEECLLNGLHLREVSAAYTSRQDSRTGAPGMRCQDVSPREFAKSPLWRKLVGRKTTGQTNDLNPIQCFLIDMDETLRNGSWPGRTIRLPLRGGELFISADPSSPAAQGLQADLNAAANIGLRALTDPDWPGRWWYVPCDPATSRPKADRVNGSSAINISNPLRNVPTDNSPSTSTKKRGAKKTGSGDDKTVNLWRDISCAPVSSENGPWQEFSDYWEYVTQRVLGILAAHKQYGDSVPY

SEQ ID NO: 274 - protein, 839 aa, unidentified
  REGION 1..839: note = Description of Unknown: uncultivated organism sequence
  REGION 1..839: note = Category: MG37 effectors
  REGION 1..839: note = Description: MG37-14 effector
GRAGGGGTGDVAARYVKRLHKKYGNCRPQAPRAQLADIARHVQQHGLDQRACLMRDRIRWTVTFSAPLQPSGPWLKYVEQHTSLSKWPHNEDNKTRKEMARLILCRLPGLRVLSVDLGHRFAAACAIWESLSSLDFQKETSSRKILRGGTGPDHLFCHTEHRDESGKRHVTIYRRIGADLLPDGTTHPAPWARLDRQFLIKLQGEEEGTREASNAEIWAVHQFEKAIGRALPLIDRLTNAGWGSTEKQQQRLQELNKLGWFPARQEKADLPDDEEVDFFRPSIAVDDLMASATRSARLALRRHGDRARIAFALKGEYKTLPGNRKYYFNSPRDASAEHDEKTRHSEYVQFLRDALEMWYNLASSNTWYDRKAREWWVEYIPEVPLPRDDTKIPARGTSGSDKQALKQQLLSVAERLQKNAELRRQLSDAWEKQWKEDDQKWRGYLRWLRQWILPRGGRVDRRAIRHTGGLSLARLATITALRRQVQVAYYTRLRPDGSRAEISENFARKTLDALEELRLQRVKQLASRIVEAALGVGSENRNHWEKERRRPRQQICDPRFNPCQAVVIERLDHYRPEEVRTRRENRQLMTWSAAKVKKYLAEECLLNGLHLREVSAAYTSRQDSRTGAPGMRCQDVSPREFAKSPLWRKLVGRKTTGQTNDLNPIQCFLIDMDETLRNGSWPGRTIRLPLRGGELFISADPSSPAAQGLQADLNAAANIGLRALTDPDWPGRWWYVPCDPATSRPKADRVNGSSAINISNPLRNVPTDNSPSTSTKKRGAKKTGSGDDKTVNLWRDISCAPVSSENGPWQEFSDYWEYVTQRVLGILAAHKQYGDSVPY

SEQ ID NO: 275 - protein, 1402 aa, unidentified
  REGION 1..1402: note = Description of Unknown: uncultivated organism sequence
  REGION 1..1402: note = Category: MG37 effectors
  REGION 1..1402: note = Description: MG37-15 effector
HTLADTKVKGGKGKPDRDPTDEERKARRILLALSWLSVESKLGAPADFIIASGKVVAALEEILKSRNVAKNEIDEWKNDCSASLSAAIRDDAVWINRSKAFDDAVKSIGSSLTREEAWDMLERFFGIRDAYLAPAKGSEDESSEAEQEDKAKDLVQKAGQWLSSRFGTGKGADFRRMADVYNKIAEWAGNPQTSTTGNEAINNLAAALSEFNPASNDLQGVLGLISGPGYKSATRNLLTQIAAKATVTQQDLASLKDKATKDAQKCNQNTGSKGKRRYSDAILNNVEAVCGFTYLQDGDSARHSEFAVILDHAARRVSLAHTWIKRAEAERSRFEEDAKKVDQVPEAAKDWLNNFCLERSGLSGAQEPYRIRRRAVDGWKEVVTAWSKADCKTAEDRIAAARALQDDPEIDKFGDIQLFEALAENDAVCVWHKDGDAAKAPDPQPLIDYALAAEAEFKKRHFKVPAYRHPDALLHPIFCDFGKSRWGICFDVHKNAQTPFPRALCLTLWTGSGMVSVPLCWQSKRLARDLALGQDAQKDGTPKVTRADRLGRAASNVGKSDMVNIAGLFEQKDWNGRLQAPRQQLEAIAKRVDKHGWNDETAKKMLDRLQWLITFSARLQPQGPWCAYAKKHGLKENPQYWPHAKENENRKGHARLILSRLPGLRVLSVDLGHRYAAACAVWEAVNAEQVKEACKAAGRVEPEASDLYLHLKRKVTKQKKGNQVVVEETTIYRRIGADTLPDGKLHPAPWARLDRQFLIKLQGEEERVREASNEEIWAVHQLEAELGRTVPIIDRLVKAGWGQAGKQKTRLEALRELGWTPAKEAQGSDETEEGEPRKPSLSVDELMSSAVRTMRLALKRHSDRARIAHYLITDEKTKPGGIKERLDENGRIDLLQDALVMWHDLFSSRGWRDDAARQLWDDHIAKLSGYKAPEEIGEESSSPERRNKQKENREKLHDVAKALAQDVTLRKALHDAWKKRWEEDDGRWKKQLRRFKDWVLPRGKHASDPTIRKVGGLSLPRLATLTEFRRKVQVGFFTRLHPDGTRAETGEKFGQSTLDALEHLREQRVKQLASRIVEAALGIGSEGGKGWDGAKRPRQRISEPRFAPCHAIIIEDLTHYRPEETRTRRENRQLMTWSSSKVKKYLAEACQLHGLHLREVSASYTSRQDSRTGAPGTRCQDVPVKEFMRSPFWRKQVAQAEKKQAESKGDSRERFLCGLNAMWKDKAVADWEKAGAVRVPLKGGEVFVSADRISPSAKGLQADLNAAANIGLRALTDPDWPGKWWYVPCEPASFRPVKDKVDGSAVVNPDQPLRQSAQAQSGDAAKDKKKRGNKGAGKSKEVVNLWRDISSSPLECIEFGEWKEYAAYQNEVQSRVIRILEEQIKGRDKQPHEGSKEDDIPF

SEQ ID NO: 276 - protein, 820 aa, unidentified
  REGION 1..820: note = Description of Unknown: uncultivated organism sequence
  REGION 1..820: note = Category: MG37 effectors
  REGION 1..820: note = Description: MG37-16 effector
IAGLFEQKHWNGRLQAPRHQLEAIARYVGKHGWDQKAQKMRDAISWLVTLSANLQPQGPWCEFAERFHLRSDPKYRPHADINKNRKGHGRLILSRLPGLRVLAVDLGHRHAAACAVWEALSTEAFKDEVSAKRILRGGTDNDALYCHAEQETGGRKHVVIYRRIGSDTLPDGKPHPAPWARLDRQFLIKLQGEEEGVRQASNDEIWSVHQLEAELGRKRPLIDLLYKTRWAQKKNQTGTENKKLAELRNRGWVPTDDTHDPHDTEKHTSASPSLAVDELMSYAVRTMRLALKRHGDRARIAHYLITDEKTLPGGVRQKLDEKGRIDLVQDALVIWHGLFSSAAWRDDAAKQLWDDHISKLAGYKILNEIEEDLSALERRKKERQIRDELRETAAALAQKGDLRIALYDAWKRRWKEDDAQWKKRIRWFKDWILPRGKSANSRAIRRVGGLSLTRIATLTEFRRKVQVGFFTRLRPDGTKTEINEQFGQSVMDAIERLREQRVKQLASRIVEAALGIGRMKRPKKGKTPKRPDIRVDKPCHAVVIENLTHYRPEETRTRRENRQLMTWSSSKVHKYLDEACRLHGLHLRGEIPAAYTSRQDSRTGAPGLRCQDVSVDEFRRSPFFRKQVAQAKERMDENRGDARDRFLCDLDSTNGPGTFRIPLSGGEIFVSADPASPAAKGIQADLNAAANIGLRALLDPDWPGKWWYVPCEAASFKPVADKVKGSHAVKLDQPLRSPAEDNSAHGRRKSGKGDGRSKEVINLWRDVSSHPLECTAGGVWKEYAAYHEDVQCRVIKILDQQLNNGNRRGLDEFEADPLPF

SEQ ID NO: 277 - protein, 801 aa, unidentified
  REGION 1..801: note = Description of Unknown: uncultivated organism sequence
  REGION 1..801: note = Category: MG37 effectors
  REGION 1..801: note = Description: MG37-17 effector
KKQRFKVPAYRHPDAFLHPVFCDFGNSRWSIDYAVHRAPEKLARAQQLLEKKKEELTRAEQALSKASDPSKRSSIEKKLKTLNVAFKQQEAEVLWLESHHAMTMGLWNGSRIEDTPLLWQSKRFGSDIGQAGAEHPLVASRADRFGRAVAMAKDNAPVVPSGLFDLADWNGRLQAPRRQLDAIAAIHDRTDLSVEEKRQLVAKRIRTIRWLVTFSAKLQSRGPFIAYAAQHGLDWRYGAHGIENKSREGLAKLVLCRLPGLRILSVDLGHRYAAACAVWETLSAAQMQNACLEAGMEAPSQRTLYLHLKHFVNGKEKKTIYRRIGADTLPDGSPHPASWARLDRQFLIKLQGEDRDARPATCDEVVAVEQLETELGYVRPIKRKGREHLVDELMSDALRTLRLGLQRHGARARIAFNLTATKRTRPGGIQELLDQESRIGLLTETLLEWNELYAGERWADELARDMWNKQIQPLLGGTILQETNNQDVTPSAAKRRMQREETREKLRPVAKQIAENDSLCRQLNVLWSTRWQIEDAAWRMRLRWMRRWLLPRGINRDPQFRKSIRDVGGLSLIRIASFKSLYQVQKAYWMRPHPDDLRRNIPERGDSSLTSFGQRVLDAMERMRENRVKQLASRIAEAALGIGDETSVNAKNGRQKRPTERSNDPRFAPCHAVVIEDLTHYRPDETQTRRENRQLMSWSSSKVKKYLGEACQLNGLYLREVPPAYTSRQDSRTGAPGLRCNDVTVAEFYTSRFWRKQVEAAEKNQKDGKKGDARERYLLSIDERIRSEAYDRDVFRIPVKG

SEQ ID NO: 278 - protein, 1468 aa, unidentified
  REGION 1..1468: note = Description of Unknown: uncultivated organism sequence
  REGION 1..1468: note = Category: MG37 effectors
  REGION 1..1468: note = Description: MG37-18 effector
KQAAVTQRAYTLRLRGVDPQDQSWRDALWATHEAVNKGAKAFGDWLLTLRGGLDHALADAKVKGGKGKPDRDPTDEERKGRRILLALSWLSVESEKGAPEEYLVPHDLDKQSGTRSNWKTVDALREILRGRRLDESEIESWVRDCSASLSAAIRDDAVWVNRSKAFDDAVESVSSSLTRDEVWDMLERFFGSREAYLAPAKGAEDESAEVEQEDKAKDLVQKAGQWLSSRFGTGKGADFSRMATVYKEIANWAGKAQPGMTGDKAIADLAGALSEFSPTSNDLRGVLSLISGPGYKSATRNFLSQLATRTVVAESDLQSLQKSAKHDAQKCTANTGAKGQRPYSRVVLEQVESACGFTYLQDGGPARHSEFAVMLDHAARRVSLAHTWLKRAEAERRRFEEDAGRMGNVPASVKQWLDSFCADRSEASGALEPYRIRRRAVDGWKEVVAAWSKADCKTAEDRIAAARALQDDPEIQKFGDIQLFEVLADDEALCVWHKDGDSAKAPDPQPLIDYVLATDAEFKKRQFKVPAYRHPDALLHPVFCDFGNSRWDISFAVHEAGKSTVRKKKGQWQNSDPHALSMTLWTGSTVEPRRLRWQSKRLTRDLAFKEGKQNGNAPTVGRADRLGRAAAGVPEHGAVSIAGIFELEDWNGRLQAPRAQLNAIAARVARHDWDAKAKQMRDHLRWLITFSAKLQPSGPWLEYAAAFPDDAPAKPFVSRKGDYAVRHQGNDAREGHAKLILSRLPGLRVLSVDLGHRYAAACAVWETLSAKQVKAACQAAGHEPPKDSDVYLHLTKKVKKQKKGKEVEVEETTIYRRIGADTLPDGKPHPAPWARLDRQFLIKLQGEEEGAREASNQEIWAVHQMETVLGLSVPFIDRLIAAGWGCTEKQKSRLEELKKIGWTPAPKAESSGVQKENEEVDVCKPSLAVDELMSGAVRTVRLALQRHGRRARIAFNLTASKKLLSGGREEGLTDEGRVELLADTLADWYALFTGKGWTDEWARQQWETHVTPLLQGAALPKIPEDAEAAPKARKEYRADLTEHLKPVAETLAKDESLCARLHCLWATRWRENDVALRKRLRWLRDWILPRGRKAEADRAIRRVGGLSLTRIATIKSLYQVQKAFHMRPEPEDLRKNIPSKGDDALLDFGRSILDVMEHLREQRVKQLASRIAEAALGIGRMKRFAGGKDPKRPRERVDRPCHAVVIENLTHYRPDETRTRRENRQLMSWSSSKVKKYLAEACQLNGLHLREVSASYTSRQDSRTGAPGVRCQDVPVKEFMQSPFWRKQVAQAEKKQAKGKGDARERFLCDLNAKWKGRPEADWEKAGAVRVPLKGGEIFVSADEKSPAAKGLQADLNAAANIGLRALTDPDWPGKWWYVPCDPTNFKPAKDKVAGSPAICLDKPLKDTDGKAGARSREVVNLWRDVSSQPISANDDWREFTPYWNDAEARVVNILRQSAGLARDQGER

SEQ ID NO: 279 - protein, 804 aa, unidentified
  REGION 1..804: note = Description of Unknown: uncultivated organism sequence
  REGION 1..804: note = Category: MG37 effectors
  REGION 1..804: note = Description: MG37-19 effector
LAELDLFNGRTIKAVRLRWQSKRLTNDLALHQTAVIDDATPVSRANRLGRAAAGAGSRSAVRILGVFDHKHWNGRLQAPRAQLHKLAKIRDNATVPEPARRQKYERGLSTIRWILTFSPRLQQKGPWLEYAAAQNLSAKSPHFAENRGRGWLAQHLLGRLDGLRILSVDLGQRYAAACAVWEAMSGDQVRATCASAGAPEPDKSALSIRVSVGGRRTILRRVGEDAWARLDRCFVIRLAGEDVPARKASPAEIQAVQTLCRELGYSDASRAAAAVDKLMSYALRVLRLGLQRHARRAMVVFGLAAKEKVVLGNQLRALSEDERTDSIGTALADWWTFAVSSRWPDPHAAALWDEHIADRAAGIELPPDLESFSFRERLLVREKLLKDVRPIAQALRPEEVEQLTEIWRLQWLGEEARWCKRLRWIKDWLLPRGSGAQCNSIRRVGGLSLRRLNNLRALYRLEKSFAGRLRVGVGGHRCESQVPSEEFGRKTLTALERLRENRVKQTASRIVAAALGLGKDLKRGHGERFAPCHAVVIENLTNYRPDEVRSRRENRQLMDWCAAKVKKYLNESCDLHGILLREVQAAYTSRQDSLTGAPGVRCADVPIRDFMACGGYWERELRRADKANSSGRSDARSRYLIALRDRISAAIPYPAAAATKGAVRIPVDGGPVFVSADPQSPAAHGTQADMNAAANIGLRALLDPDWAGRWWYVPCNASTGVPVADGLKGSALIQPNLTLFSSHNGAEKKPKRQVVNLWRDVSARPLNVGIWRTYAQYRASVMERVTAILLTGLQTLGDDVDLPF

SEQ ID NO: 280 - protein, 904 aa, unidentified
  REGION 1..904: note = Description of Unknown: uncultivated organism sequence
  REGION 1..904: note = Category: MG37 effectors
  REGION 1..904: note = Description: MG37-20 effector
LTRAEQALSKASDPSKRSSIEKKLKTLNVAFKQQEAEVLWLESHHAMTMGLWNGSRIEDTPLLWQSKRFGSDIGQAGAEHPLVASRADRFGRAVAMAKDNAPVVPSGLFDLADWNGRLQAPRRQLDAIAAIHDRTDLSVEEKRQLVAKRIRTIRWLVTFSAKLQSRGPFIAYAAQHGFDWRYGAHGIENKSREGLAKLVLCRLPGLRILSVDLGHRYAAACAVWETLSAAQMQNACLEAGMEAPSQRTLYLHLKHFVNGKEKKTIYRRIGADTLPDGSPHPASWARLDRQFLIKLQGEDRDARPATCDEVVAVEQLETELGYVRPIKRKGREHLVDELMSDALRTLRLGLQRHGARARIAFNLTATKRTRPGGIQELLDQESRIGLLTETLLEWNELYAGERWADELARDMWNKHIQPLLGGTILQETNNQDVTPSAAKRRMQREETREKLRPVAKQIAENDSLCRQLNVLWSTRWQIEDAAWRMRLRWMRRWLLPRGINRDPQFRKSIRDVGGLSLIRIASFKSLYQVQKAYWMRPHPDDLRRNIPERGDSSLTSFGQRVLDAMERMRENRVKQLASRIAEAALGIGDETSVNAKNGRQKRPTERSNDPRFAPCHAVVIEDLTHYRPDETQTRRENRQLMSWSSSKVKKYLGEACQLNGLYLREVPPAYTSRQDSRTGAPGLRCNDVTVAEFYTSRFWRKQVEAAEKNQKDGKKGDARERYLLSIDERIRSEANDRDVFRIPVKGGEIFVSACGQDGGSNANRKAPPGLQADLNAAANIGLRAIFDPDWEGRWWYIPCDATTICPVAKKFNGCKAVDSSKPLRIVAEKVAVSSSGIDEKRSGRKGIALTDGSRIVNLWRDPSGAPIRRDVPSNSEWQDYAEYWNKVQSRVIANLRKSYGLREI

SEQ ID NO: 281 - protein, 869 aa, unidentified
  REGION 1..869: note = Description of Unknown: uncultivated organism sequence
  REGION 1..869: note = Category: MG37 effectors
  REGION 1..869: note = Description: MG37-21 effector
LWDGTHIEDTPLIWQSKRFGSDIGQPVEAQPLPVSRADRFGRAVALAQDNVPVIPSGLFDLSDWNGRLQAPRRQLEAIAAIRDSAKLSVNEKQQLVAKRIQSIRWLLTFSAKLQSHGPFIAYAAQHGFDWRYGAHGPENKSRQGLAKLILCRLPGLRILSVDLGHRYAAACAVWETLNAGQIQKACLDAGKEAPGPCTLYLHLKQIANGKEKKTIFRRIAADTLPDGSPHPAPWARLDRQFLIKLQGEDRDARLATSEEIAAVEQMENELGVVRQLKRKGRELLVDELMSDALRTLRLGLRRHGVRARIAFNLTANKRIRPGGKEEVLDQEGRVLLLTETLLAWYELYTAERWTDEPARELWNRHIQPLLGATILQNTVNQEDTPSAAKRRKLREETSGKLKHVAEEIAKNDSLCRQLHVLWSAQWQTEDVIWRTRLRMMRRWLLPRGVKRNAQLRISIRDVGGLSLTRIASFKSLYQVQKAYQMRPHPEDPRLNIPERGDSRLENFGQRVLDAMERMRENRVKQLASRIAEAALGIGGETGISSKDGSQKKRPTERSSDPRFAPCHAVVIEDLTHYRPDETQTRRENRQLMSWSSSKVKKYLGEACELNGLYLREVSPAYTSRQDSRTGAPGLRCNDVTVVEFNNSPFWRKQVGAAEKNQKEGNKGDARERYLLSIEEGIRGAANDRDIFRIPVKGGEIFVSACITDGGNNAKKNAPPGLQADLNAAANIGLRAIFDPDWEGRWWYIPCDAATLCPDAKKFIGCKAVDPTKPLRVVAEEGAISASGIGSKKSGRKKNAATDGTRIVNLWRDPSGAPIHRDVLRSPEWQDYAGYWNEVQHRVIRNLKTCYEQTSQQEDPFVSQDADKPF

SEQ ID NO: 282 - protein, 1171 aa, unidentified
  REGION 1..1171: note = Description of Unknown: uncultivated organism sequence
  REGION 1..1171: note = Category: MG37 effectors
  REGION 1..1171: note = Description: MG37-22 effector
MAAETTTRAYTIKISGEGNWRKLLWDTHVAVNRGAWVWGDWLLTLRGGLPASLTADHPDRRVLLALSWLSVESPASLAPDKHIVAYGTDEDRAAKVMARFREILSRKQVSDVAGWEGACEPALSARIRDDAVWVDRSAAFSGMQAKFPGLTTDWAANTLFDLLGGSEAYFAMPDDEEPAPTEAKDFVQKAGGWLSRNWGAGQKSDSTAISARLRRLADTPPKTVAGTSGDDAIARLLELVDADSESADAKNRSKLLKKAIGWKGRSSKGAVALQKLASASRVTPEQWEQTRTKFLEEADAQDSKATHRGVKPPWMDDLRNALEGWIGVPYRTTRDLIWEHGVSLDHALRRVSSAHSWIKRAEVERRQFQEAAEKEILPKATKRLDDFCTTRSGESGAIGEYVIHRRAIDGWDKIVRAWRQLSETATAKDRTQAARDVQSNLDDNEKFGDIFLFEALAADDAKCVWRDAKGRPDSQILKDYSAQTVAEHNQRRFKVPAYRHPDPLRNPIYVDFGNSRWGISYEALAASQRRQSLQVKLVKAKTDEAREKLRQDLAESADLRGVTLNLWTGVGVEPTKLRWHGSRLWKDLDLAHFGLPGDVSVTRADRLGRAVAGQPQGAVSVAEVFAAKDWNGRLQVPRKQLSRLADLVYGKENGVRRGADYFRLIATVENSRAKKEFERFNWFLTTSARFQPSGPWIEFIEKGLPSGIEYRSGRSGSYLNYEANKDRKGRARIQLARIPGLRVLSFDLGHRYAAACAVWETLTEAALQREIKGRQVLSGGVKAKSIYLHTYHTGDNGKSHRTIYRRTGEGMWARLDRQFLIKLQGEDWTARRAHHEEWEGFNKFRTFLGMQPSAELLRIDELQREAVKLARVGLRRLGDAARVALAMTATSKPISGGRTSGAFTPEERIGYLQEALVRWQELAQSGEFVDDWAKEQWHAWVIAKLGGPQSIAVEPDSRASDRKKRKETTAAPLKPVAEIIAEPQSRIAVELNHMWTERFRKLEHDWRLHLRWLRRLILPSKRDNDKNPRQIRNVGGLSVQRLQTIRALYETLKAFRMRPEPDDLRKNVPAWGDESLAQFGRRVLNRLERLREQRIKQLASRIVEGALGAGRMNVVRGRDHKRPQMSVDAPCHVVVAEDLEFYRPEETRFRRENRRLMDWAARNVRKYIVEG

SEQ ID NO: 283 - protein, 1478 aa, unidentified
  REGION 1..1478: note = Description of Unknown: uncultivated organism sequence
  REGION 1..1478: note = Category: MG37 effectors
  REGION 1..1478: note = Description: MG37-23 effector
MAASISPTQRAYTLRLTGHKNDENWRDALWRTHEAVNKGAKAFGEWLLTLRGGLDHNLATATLGKKPPSDRDVRDRRVLLALSWLSVEDERGAPTEFIVAKGAGAPEERKRKVRQRFEEILLGRGLSPDEAKEWATDCDDSLSAAIRDDAVWVDRSAAFDAARNRIGDTLTREEPWDVFNRFFRSQANYFAGIERPPDVLEDNDESDLESDDSKDERAKDLAQHAGKWLSNRFGGGSGANFGEMAEAYDALARAIREIPEGIPGDKAFFHLAVSLAAFQPKSDDLSGIRSLVSGPGHKSATHNLLEKLSSSGSSDQLIHQISEAAAQDASNCREKLGIKGPRTWSDTILKNVEDATGITYQHDGAGGARHTEYSVILDHAARRVSAGHSWIKRAESLRLRFERDKQRLDEVPADALAFLDLYCEDRTGLSGAAGRYRIRRRAIDGWTDVVRAWGKCADSQERIDRARELQSDPEMKFGDIQLFEALAEDAARCVWQSSGKPDPEILKSYVFARDAEDRMQRYKVPAYRHPDPLRNPVFCDFGKSRWSIDFAAHSGTPEKLDKARRGIEKAQVALEKAQAKKVRAGDNTAADKAQKDVEKCERQLAEKKAELQWLENPRSLRLGLWTGRQLEPTQLRWRSKRLAADLCIGGERGAPEGEVSRADRLGRAVGGVAAGGNPEIVGLFDLKDWNGRLQVPRAQLDAIARLLEKGRKSKADEAIRYLDWLVSFSAKLQPQGPWVDYAETTGLVRPDPKYWPHSDANKKRKERGRLILSRLPGLRLISVDLGHRYGASCAVWEAVSGKAVADACGAAGLAPPSADRVHLSIPCSKDGARRKQFYRRIAGDLLPDGKPHPAPWARLDREFTIKLQGEDKTPRKPFSNERKDVAAFKDWLGYSREKGGREPATVLDLMTHAVWLARLGLGRHGCRARIAWGLTANERLLPGGCKAAFNDAADQERFLTDLLLEWHGLAQPGSRNDPAAKQLWEEHIQPMGAETPQEEADTSFRERKKAREKLAERLAPVAAALRKNESLRKKLSIAWEQRWSRDDGEWKKRLKWLNRWLLPRGIMVEDEKTGRQRPPHAIRLKTIRNVGGLSLDRLAAIRSLYQVQKQYRMKPEPDNPRKNVPEKDDHSLDNFGKKTLDALEKMREQRVKQLASRIAEAALGIGSENARHWEGSRRPCERIADPRFAPCHAVVIENLTHYRPDETRTRRENRQLMAWSSSKVKKYLQEQCELHGLHLREVQAAYTSRQDSRTGAPGMRCVDVPVREFLREGGFWRGRVGKEQEKKEPERTHVEQLLVDLHGLWSKAPEAARWNKSVRVIQRGGEVFVPAAASSPIGKGLQADLNAAANIGLKALVDPDWPGAWWYVPCIAGSLIPVADKIKGAECAFADSKAPLRRNKESGEGNQRPAKSKGKSGKTKEIYNLWRDPGTGILAPGGWAFHKNYWQDVERRVAQNLRVSNGLAASIEPPPITEDVPY

SEQ ID NO: 284 - protein, 788 aa, unidentified
  REGION 1..788: note = Description of Unknown: uncultivated organism sequence
  REGION 1..788: note = Category: MG37 effectors
  REGION 1..788: note = Description: MG37-24 effector
MAEKNSKEQPVVTTQRAYTLRLSGTDKHDNSWCDRLWKTHEAVNKGAKVFGDWLLTMRGGLCHTLAEADVPGKGKKPARRPTQQEIKNRRIVLALSWLSVESKCGAPESYIVPHDSNTATGERKNWKTVEALREILRSRGLTEERAIEWADDCRDSLRATIREDAVWVNRSKAFDLAATNIGASLTREELWDFLQPFFANRHSYLEMDTVASATNGDSETDTEESKAASSDEKAKDLSQKAGQWLSSRFGTGPGADFSRFSKVYEVLATACRSIAPEVSGVEAINRLAIAIKKCSPSSNDIEGILGLISGPGYKSATRNILQQINRLQSVSEQDLSRLCDACEKDASQSRQKVGGKGSRPYADAILQDVERTCGICYARTEDHPSRHWQYAVILDHAARRVSMAHSWIKRAEEQRSKFEIEKNKLLRVPRDALAWLAAFCAKRSSDSGANDAYRIRRSAVDGWKQVVAAWAALPAKSEIAGSELRSDAERARIQVARELQDTVEKFGDIQLFEALAIREAKCVWMPDGKPDAQPLLDYVFGTDAIAKKQRFKVPAYRHPDAFLHPVFCDFGNSRWSIDYAVHRAPGKLTKARQLLEKKSAEISKAELALGKMDDALRHAAISETLQNLRAAYKQQQAEVAWLKTLQAITMGLWDGNGIQDTQLLWRSKRFGANIGQPDAVHPSPVSRADRFGRAVALAEDNVPVIPSGLFDLPEWNGRLQAPRRQLEAIAAMRDSAKLSAGEKQQLVAKRIHSIRWLVTFSAKLQSHGPFITYAEQHGFDWRYGMHGF

SEQ ID NO: 285 - protein, 918 aa, unidentified
  REGION 1..918: note = Description of Unknown: uncultivated organism sequence
  REGION 1..918: note = Category: MG37 effectors
  REGION 1..918: note = Description: MG37-25 effector
MAEKNSKEQPVVTTQRAYTLRLSGTDKHDNSWCDRLWKTHEAVNKGAKVFGDWLLTMRGGLCHTLAEADVPGKGKKPARRPTQQEIKNRRIVLALSWLSVESKCGAPESYIVPHDSNTATGERKNWKTVEALREILRSRGLTEERAIEWADDCRDSLRATIREDAVWVNRSKAFDLAATNIGASLTREELWDFLQPFFANRHSYLEMDTVASATNGDSETDTEESKAASSDEKAKDLSQKAGQWLSSRFGTGPGADFSRFSKVYEVLATACRSIAPEVSGVEAINRLAIAIKKCSPSSNDIEGILGLISGPGYKSATRNILQQINRLQSVSEQDLSRLCDACEKDASQSRQKVGGKGSRPYADAILQDVERTCGICYARTEDHPSRHWQYAVILDHAARRVSMAHSWIKRAEEQRSKFEIEKNKLLRVPRDALAWLAAFCAKRSSDSGANDAYRIRRSAVDGWKQVVAAWAALPAKSEIAGSELRSDAERARIQVARELQDTVEKFGDIQLFEALAIREAKCVWMPDGKPDAQPLLDYVFGTDAIAKKQRFKVPAYRHPDAFLHPVFCDFGNSRWSIDYAVHRAPGKLTKARQLLEKKSAEISKAELALGKMDDALRHAAISETLQNLRAAYKQQQAEVAWLKTLQAITMGLWDGNGIQDTQLLWRSKRFGANIGQPDAVHPSPVSRADRFGRAVALAEDNVPVIPSGLFDLPEWNGRLQAPRRQLEAIAAMRDSAKLSAGEKQQLVAKRIHSIRWLVTFSAKLQSHGPFITYAEQHGFDWRYGMHGFENKSRQGLAKLILCRLPGLRILSVDLGHRYAAACAVWETLSTGQIQKSCGVAGMEAPGPRTLYLHLKQIVDGKEKKTIYRRIGADTLPDGSPHPAPWARLDRQFLIKLQGEDRDARPATSEEIAAVEHME

SEQ ID NO: 286 - protein, 1503 aa, unidentified
  REGION 1..1503: note = Description of Unknown: uncultivated organism sequence
  REGION 1..1503: note = Category: MG37 effectors
  REGION 1..1503: note = Description: MG37-26 effector
MAELDPTQRAYTLRLQGQRREDYSWSDALWATHEAVNKGVKVFGDWLLTLRGGLDPGLAERPVKDKKGERPPEDKERKNRRILLALSWLSVESEQGAPEKYIVASGRDLTSERIEKVKTAFHEILKCKGLDENQIQAWTTDCLPSLSAAIREDAVWVNRNKAFEDAKRQYDITDEDVWDILEPFLGNVDAYFFIKDLPADDQDESAEESSGGGEEPKDLVKQAGQWLSSRFGTGKGADFDRMSAVYEKMAELTSRLEGEMTSGAFFESLAEHLSEFNPDSSEPQAILKLVSGPGYKSATRNLIKKFAEQPTLNSDDLMNFTNAAREDAQESRNKVGSKGQRNYADAILSSVERVCGFTYLTASDGSDVSVETRYQLPENYTWGTSRHKEFAVMLDHAARRVSIAHSWIKKAEARRNKFEADAQKIKDIHPDVKAYLDAYCESRASLVGSLEEYLIRPRAVSGWEEVVKAWAKLEKQPGWDNKEPDQRKQARVDVARELQDQIEKFGDIQLFESLASDDATLVWHKDGKADGEPDPELLKNYVKATVANFNKQRFKVPAYRHPDAYYHPVFCDFGNSRWDVRFSVHEAHTVLAEKKAQLERLQQEMQTTRNLTKKSKLQSQIKDLEEELRWLENPRLVQMKLWTGKSIAPVILRWQSKRLVQDLALKQNASTAPEVVSVSRADRLGRAAAGLSANHIVQVKNIFDEDHWNGRLQAPREQLEELARHVEKHGWDARAIKLRRSIQWLVTFSPKLEPWGPWCEYVNTHPDFKGLKTKNPSAWPHAEENKKRSGDARLILCRLPNLRVLSVDLGHRYAAACAVWETLSKEDFIKQTEGKKIKAGGTGSDSLYCHVEHECDGKKRTIIFRRIGSDILPDGSEHPAPWARLDRQFFIKLQGEQEGAREASNEEIWQVHELEKELGVNTPLIDRLVTTGWGETDGQQARLEDLRKRGWKPKTSLGITVDESAEEHDEEEARFRPSLSVDDLMAYTVRSLRLALKRHGDRARIAFAMEGKYMHVSGGRKYYFDEQRDASEGASSDERGKSYTEYLAKALQIWADLAYRVAYEPENNCQNGAESASKEAASFDSKYSDPKAEELWTKYIAHLPEYEKLERFGGSKKRAETQKKKKNEERLEKLAKALIDDVDRRTKIHDEFKAYWEEEDKRWSDRIKRVKRWLTGKGLGDTAESNSKHGRKVGGLSLTRIATLTEFRRKVQVGFYTRLRPDGSKKEIKEGFSQKLLDALEELREQRVKQLCSRIIEAALGVGSENVEHWEDTKKRPRGPLSAKDPRFAPCHAIVIENLEHYRPKEVRTRRENRQLMTWSAGHIRKLLKEETYLYGLHLREVSPSFTSRQDSRTGAAGIRCSDVTVREFLYSPRWRKRVLQARENGNKDVESEFLHMIDERLNDKQKHHTLSSVIRLPDRGGEIFVSSDPRSPAAVGIQADLNAAANIGLRALMDPDWPGKWWYVSCSASSFAPAQKYVKGSACMPPRLPVQRNESTDLDDGS

SEQ ID NO: 287 - protein, 1100 aa, unidentified
  REGION 1..1100: note = Description of Unknown: uncultivated organism sequence
  REGION 1..1100: note = Category: MG37 effectors
  REGION 1..1100: note = Description: MG37-27 effector
MAELELPKTQRAYTLRLRGADPADSSWRDALWATHEAVNKGAQVFGDWLLTLRGGLDHTLADTKVKGAKGKPDRDPTRDERCDRRILLALSWLSVESAPRQGDTHEKFVIASGKDDTPSSRDKKVVGKLREILKKRGLKDDDLAGWISDCEPSLSAAIRDDAVWVDRSAAFDAAQKCVGLSLTREEVWDLLQPFFGSREAYLASLEAAEDSDSEAAAEDKAKDLVQEAGQWLSSRFGTGKGADFAGMVNVYNTIAAWAKEQTGKTNRFGSEALSSLGKRLTVFKPKTNDADGILGLISGPGYKSATRNIILAWKEPSAQVTAENVAKLGEAAAEDAQKCTTNIGGKGHRQWSDALLREVEAACGFTYLQNDGPARHSEFAVMLDHAARRVSMGHNWIKRAESERRKFKADAAKVNNVPSKARSWLDQFCEQRAGISGAIDAYRIRKRAVGGWKEVVVKWNRPACKTVEDRVAAARELQDDPDIDKFGDIQLFEALAEDDAVCVWRMNGEANAQSLIDYAAATDAGARQRRFKVPAYRHPDPLSHPVFCDFGNSRWDISFSVHKARSDKAETEKKVALKKEAVEKARCAVEKDRGDNKETEAQSKLKKAQADLAEAEAKLAWLSSRHAISMGLWNGVKVGNSTPLFWSCKRLTNDMALRQNGYPTASMKVTRADRLGRAAVGATSDALIDILGVFDEEHWNGRLQAPRTQLNAIAAHVSKHGWDVKARKMRDRIRWLVSFSAKLRATGPWIDYAKKFSENAPAKPFVSRWGEYAVKHKENDSRAGHAKFALSRLPGLRVLSVDLGHRFAAACAVWEALPISTMKQEIVDRKIVAGGTAEHDLYCHVAKPTAKIAESGRNKGKPITEITIYRRIGADTLAKDTPHPAPWARLDRQFFIKLQGEEEGAREASNEEIWAVHQMETALGRSVALIDRLVAAGWGGTDKHKQKARLEALTKLGWQRSSEKPPYGKRPSLSVDELMSSAVRTLRLALKRHGDRARIAHYLIADEKTKPGGIKEKLDIKKGRIELLQDALVLWHDLFSSRGWRDDSARQLWDTHIARLSGYQTPEEIGEEASARERTAKEKETREKLSGAAQSLASNE

SEQ ID NO: 288 - protein, 1448 aa, unidentified
  REGION 1..1448: note = Description of Unknown: uncultivated organism sequence
  REGION 1..1448: note = Category: MG37 effectors
  REGION 1..1448: note = Description: MG37-28 effector
MAEQVAATQRAYTLRLRGVDPQGPSWREALWRTHEAVNKGAKAFGDWLLTLRGGLDHALADAKVKDGKSERCPTDDERKGRRILLALSWLSVESEKGAPAEHFVPHDLDKQSGTRSRWKTVDALKEILKGRGLCESEIELWVQDCSASLSATIRDDAVWVNRSKAFDTICNGQKIVEARKDCQTMLWYLLGDDYLTLPKKPEKPKEEPTETEGEPSEEESNQERRSAVIQSGKGAGQRTRHPFSHIFGDSTGFGKPLRKLDLRDHWKTHLETRVTASQIPMRDAKKKKEEGVSQKEGVSPEEGVSPTELHREMFSKAASRLAQIWTKQKQQEVERQNRKAADEALKTLEADTQCKSALDLLDALCVERGTASGAQEEYRIRPRQIDGWDRVVKAWDPTANTCDPTVAEEQRIAAAKRLQDEDSDEKFGDINLFIALAEDKYKAVWWHANAPKPEILKTYVKGKKARADAVRLKVAAFRHPDPYFNPVFCQFGVSRPRIEFRRLRDFTSKPEGRDVRAVGLLLWNGEKADLHVLHAVSKRMDREVGDACGSVQKGAADLAEVTRRSRLSIATLAQLPEKGSVRVAHVFDRKKVKARKTNEKGAGAEGASEPAREKEPEWNGTLLGERRALEAIGRLVEDGKHTEAKECRRRLHWWLIVSLEMRPQGPWLKYGEDNNLLEVRYDKQQKENVVATAPRNSRDEWRGLAYPFRHPCNEKGRKGMARHQLSRLSGLRVLSVDLGHRYAAACAVWETLTTGCFQTEIEGRRILRGGTGEDALYCHTEHEANGRTHTTIYRRIGPDKWPDRTPHPAPWARLDRQFLIKLQGEEDSAREASNDEIWAMHRMETALGRAVPLIDRLVAAGWGHTEKQKARLEGLKTLGWTPAPRAQQSADPEGTQEEGYRPSLCVDELMFSAVRTLRLGLRRHGDRARIAHYLITDEKIKPGGVKERLDENGRVELLLDALVLWHNLFSSRSWQDAAAKQLWDAHVAKMSGYQRPEEIREGISRQERKKKQEEIRHNLRCAAAALAKDANLRKALHDAWNERWKHDDEQWKKHLRWFKAWVLPHGPAANSCSIRKAGGLSLTRIATLTEFRRKVQVGFFTRLHPDGTKAQINEQFGQSTLDAIEHLREQRVKQLASRIAEAALGIGRMKRSEGGKDPRRPRARVDRPCHAVVIENLTRYRPEETRTRRENRQLMSWSSSKVKKYLAEACQLNGLHLREVQAGYTSRQDSRTGAPGIRCQDVPVKEFMQSPFWRRQVAQAEKRQAEGKGDARECFLCELNAKWKGKPEADWEKAGAVRIPLKGGEIFVSADPKSPAAKGLQADLNAAANIGLKALLDPDWAGRWWYVPCDPTSFKPVEDKVGGCAAICLDKPLKNASAAQDTDKPGKKRRKAGKQTGACVNLWRDVCSQPISAGDGWREFTPYWNGVQARVVNILRQAAGFARDPEER

SEQ ID NO: 289 - protein, 1420 aa, unidentified
  REGION 1..1420: note = Description of Unknown: uncultivated organism sequence
  REGION 1..1420: note = Category: MG37 effectors
  REGION 1..1420: note = Description: MG37-29 effector
MAERATVATTQRAYTLRLRGMDKSDNSWRDALWATHEAVNSGAKVFGDWLLTLRGGLSHKLADKPDVQGEPPSEQERKNRRILLALSWLSVEDRHGAPADFIVEQPVEALRTVLAARGLGEDELGSWIEDCSPSLSAHIREDAAWVNRSDAFDQFRSRTGGSADREYACRVVLGFLELKGPYFHVPSVDDDSSSSPAASGDDKPLVNEATGWLCDNWGVGKKTDKARVSGILDRLGRLDFDKFVGKSSIELLRFACQEIGLDAAEGAAAHTLCSNLIAHIGWQGRPSSARMALEAISAAPNVTDALAQRLTKKLRQEAAAKLEESGIAVPSWMPDERVRLERAIGLAYRDGKDRTFEFAVMLDHALRRVSGAHSWIKLAEGERRKFAEDAAKLQAVPAAVRELLNRFCEDRGGISGAVEAYRIRKRAIGGWDQIVAAWRACPDSEEARIDAARRVQAEWEDTDGKFGDIQLFEALATDDAKCVWENGPQPLQDYVAATTARADQLRFKVPAYRHPDPLRHPVFCDFGNSRWTIKFAVHERHKLNGGRPRKNVDADWLRDDSALSMQLWNGEALAPKPMRWSCKRLVNDLAIKQKPVSDGDAVTAVTRADRLGRAAAGATRDQQVRIANIFDEKDWNGRLQAPRVQLDAIARHVDRCGWDAKAQTMLRRIRWLVSFSPKLTPRGPWVDYCSQFDDASATRPFVSGKGEYAVKHAGNEARQGHARLILSRLPGLRVLSVDLGHRFAAACAVWQTITARQMEEACRTRGHQAPSPDDLFIHLKRRIRKTVKDKEREVEQTDVYRRIGPDRLPDGTEHPAPWARLERQFVIRLQGEGNARRATRDERDRVKDFETHIGFRNAADERMPSMVDELQFHALRLARLGIARHACRAKIAWALTSLCSLRPGGGQECFAEGSPEHAEHLTRCLMDWHAMAAESRWNDSQMRDLWNQNVAAIDPDLKIVEPPIEPPSERPTRQEREKNQNQTEERIRAAVGRLTIDSRTAAAGEIARRWNDDDARWREHLRWLRSWLLPRGLKKDKARARLARRMGGLSLTRIAAFKSLYQVQKAFFMRPDPANPRKRVPSPGDESLERFGQRVLDAMERLRDQRVKQLASRIAEAALGIGAEGIPGRRPDRCVHDPCHAIVIEDLTHYRPDDLQTRRENRQLMDWSSSKVRKHLSEACQLHGLHLREVSPAYTSRQSSRTGLPGVRCQDVSIMTFLKAPHWRKRARVAKERLEAHRGGALDCYLCELDEQLSRLANDRKSPWPPLRLPVRGGDLFVSVDGHTVQADLNAAANIGLRALLDPDFGGRWWYVPCNSVGKPLPEKVKGCPLFTGKPLTSADANPPTPRPAGKGRKKGARTDEPRTINLWRNPVAQPPESTTAWTTFDRFWPNVEAQVVKALQQQNEHRARIARNPLEETPF

SEQ ID NO: 290 - protein, 1392 aa, unidentified
  REGION 1..1392: note = Description of Unknown: uncultivated organism sequence
  REGION 1..1392: note = Category: MG37 effectors
  REGION 1..1392: note = Description: MG37-30 effector
MAESLPATQRAYTLRLRGADPDDESWREALWRTHEAVNKGAKAFGDWLLTLRGGLSHELADEPVKAKGGRRQPSADEKRDRRIVLALSWLSVESERGAPQQFIVASGKDNDKQRQHKLVKALRDILQKRGVGKAELDEWVKACEGPLGAAIREDAVWVNRSAAFDQAVKRIGKSLSRDQVWDLLERFFGSKNAYLAPIVLKDEAEPSEKAKDLVQKAGQWLSSRFGKGKGAKFEVLSGAYQEIERWAKSARPSSPAHLMAHLARLLKAPSEDLDGVLSIISGPGYKSATRNLLKKLSGQQRVSSEDLARLAKTAADDRVKCKSKVGEKGKRPWADTILEDVQRACGFKYIPDGGPARHRQFAVMLDHAARRVSVAHTWIKRAEAKRRSFEEDARKIGQVPSQAKQWLDDFCLERSRSSGSLEGYRIRKRAADGWEHVVSRWAGADCTTVADRIAVVRELQSDPEIDKFGDIQLFEALAEDDATCVWKPEGEPDPQPLKDYVAAKDAEFKRRRFKVPAYRHPDPLLHPIFCDFGCSRWDIKFDVHEAYKRKERKSTQTQTNPHGLTMRLWDGTDVSDVRLRWRTKRLFGDLNLGGAGAGKDVSRADRLGRAAAGAQEGEAVQIAGLFEDKDWNGRLQAPRPQLDAIARRVDAHGWDKQAVRMRARLEWLLTFSARLRPRGPWTEFAKKNDLRPDPVYWPHAAENKNRQGRGRLILSRLPGLRLLSVDLGHRYAAACAVWEAVSAEAVKKACKEAGHPNVKEDDLYLHLKRKDQGKLRTTIYRRIGADRLGQPTPRKEVAHPAPWARLERQFLIKLQGEDETPRKARKDEFKAVENLERELGRERSEADKLPHRIDELMSEAVRTVRLALGRHGNRARIAHYLVATEKTMPGGVVQSLDQSGRVRQIAYALELWYELAASSKWKDDWAAELWEKQAWAKDVPLQKRDEETVTRQALKKEKKERCGKLEAAAENLLRDGARCRDLSARWAKRWGEEDKKFRERLRWLRDWILPRGKKAAKNPAIRHVGGLSLTRLATIRSLWQVQKAFFTRMTPEGRRRDEDGRPLTAGEGFGQKVLDALDRMRDQRVKQLASRIVEAALGVGKEQEKCANRDPRRPRECVFEPCHAIVIENLTNYRPEETRTRRENRQLMRWSAGKVKKYLSELCQLHGLHLREVGAEYTSRQDSRTGAPGIRCQDVPVREFMRSPFWRKQVAQAEKKLEKGEGGARERLLCELNANWKDSSEKELKEAGVIRVPLNSGEIFVSADAKSPAAKGLQADLNAAANIGLRALLDPDWPGAWWYVPCDAKTMKPSKEEASGSAAVDMEKPLVQVSEAKPGARGGRGKSEKPVVNLWRDVSARALEPGDWRRWEPYWNDVSARVVRLLRKQQGLPDFA

SEQ ID NO: 291 - protein, 1451 aa, unidentified
  REGION 1..1451: note = Description of Unknown: uncultivated organism sequence
  REGION 1..1451: note = Category: MG37 effectors
  REGION 1..1451: note = Description: MG37-31 effector
MAGNDQNTTQRAYTLRLCGTDPNDQSWRVALWCTHEAVNKGAYAFGDWLLTMRGGLDHTLADAPIADRDPTDEERKARRILLALSWLSVESELGAPEEFIIASGEDAEMERNGRVLTALEDVLKKRGLRKEKIQEWIEDCSPSLSAAIRKDAVWVNRSKAFDAAIGTYHGLTREYAYTVINSFFRLDDKYLQLPDIGVDDQSGAGADVAESPEFRTLARQWVSTNFGTGEKSDADLILKKLNILVAADLIRFAKQSKVSFIKEMCNLLGIQGEDVDALRTGIGWKTGRKSKGRLAIDSLPEQVTSESIQRLQQKFEEEVSDKQRKTRDVPGWMPSFRQAIEKECGMPFRGDRDHIGEFAVMLDHAARRVSQAHSWIKRAEAERRRFEEDARKMDDVPEKTKEWLDSFCSERSDTSGALEPYRIRKRAVDGWKEVVAAWSKADCLTTEDRIAAARALQDDPEISKFGDIQLFEALAEEDAMCVWHKDGDPANAPDPQPLIYYALASEADFKKRQFKVPAYRHPDALKHPVFCDFGKSRWAIDYEIHRNAKTPSPRALTLTLWTGKEMKPVSLRWQSKRLAHDLNIKSDGRGEGASLVTRADRMGRAASGVSKDDEVEIAGLFETKEWNGRLQAPRCQLEDIARHVDKHGWDSKASVMLNAVQWLVTFSARLQPQEPWREYAKNNENVNLNLDKKNRQPHTDENKNRKGRHAKLVLSRLPGLRVLSVDLGHRYAAACAVWETLSIESFRKEIRGRTILRGGKDAEALYCHTEHEENGNKHVTIYRRIGADKLPDGATHPAPWARLDRQFLIKLQGEGEEAREASNEEIWAVHRMESELGRAVPLIDRLVAAGWGRTEKQAERLEALKRLGWEPPLATAPVVEDASGEDADAYRPSLAVDELMSSAVRTLRLALKRHGDRARIAYAMTATYKSMPGDRKYYFTKAEELSSNDDQATREEKHIEFILDALVLWQSLISSRGWRDEAAKLLWDKHIAKLPVYEAPEELGEDITSVERKKKRDNNREKLYGVAKALVQDRPLRNELHDAWNKRWEQDDARWREWLRWSRDWILPRGRQAGDHSIRKVGGLSLNRLATLTEFRRKVQVGYYTRLRPDGTRKEIGEAFGQKVLDDLEQMREQRVKQLASRIVEAALGIGSEDRAHWEGGKRPRQRIDDRRFAPCHAVVIENLTHYRPEETRTRRENRQLMTWSSSKIKKYLKEACQLHGLHLCEVTASYTSRQDSRTGAPGIRCQDVAVREFMLSPFWRKQVKRAEAKQAENKGDSRERFLCELNAKWKNKTEVEWRNAGVVRIPLRGGAVFVSADRRSPASKGIQADLNAAANIGLRALIDPDWPGKWWYVPCFSSSFIPTDESTKGSEAITGKPLKERPTDDTGKMATRKRSGRSSRSSGGVVNLWRDVSSLPVSADKGPWEEYQPYWNKVQERVVRILHDNMVDSG

SEQ ID NO: 292 - protein, 1472 aa, unidentified
  REGION 1..1472: note = Description of Unknown: uncultivated organism sequence
  REGION 1..1472: note = Category: MG37 effectors
  REGION 1..1472: note = Description: MG37-32 effector
MAHQAAVTQRAYTLRLRGEDPQDRSWRDALWATHEAVNKGAKAFGDWLLTLRGGLDHALADAKVEGGKGKPDRDPTDEERKGRRILLALSWLSVESEKGAPEEYLVPHDLDKQSGARSNWKTVDALREILKGRGLGESEIESWVQDCSASLTAAIRDDAVWVNRSKAFDDLCPRFRGLDRDYAAKTISFFFGNQGTYLALPNRDNDEDATTAVQSGDSSDFRERARQWVSTNFGTGTKSDNARICSALHTLATSNLMSFDGCSKADFLKHLATLLGRSEPNKEPEEVLRIAIGWTTGRPSAGLLAIKSLPDPVTANDIDTLQRKFADEKAKKEEKADLLRVPEWIRTFRETVERECGIPYVGKRDHIGEYSVMLDHAARRVSIVHSWIKRAEAERRRFDEDAKRMANVPEPAKNWLETFCLERSGASGARDQYRIRRRAVDGWEEVVAAWSKADCKTAEDRIAAARALQDDPEIQKFGDIQLFEALADDDALCVWHKDGDSAKAPDPQPLIDYVLASDAESKKGRFKVPAYRHPDALLHPVFCDFGKSRWDIKFDVHEARKSTARKKEGATQNSDPHALSMTLWTGSTFKSQKLRWQSKRLTHDLALGQGKQDHRAPEVARADRLGRAAAGVPASATVRIAGIFEQKDWNGRLQAPRARLNAIAARVARHGWDDKAKRMRARLRWLITFSARLQPSGPWVEYTATFPDDASAKPFVSRKGDYAVRHQGNDAREGHAKLVLSRLPGLRVLSVDLGHRYAAACAVWETLAKEVFEKERHDAEAKGAHVVLGPEGCKPEEAIYAHFVWPEKESNAATKKARQEGREKFHPVTVYRRIGPDELVDTSTGEVKEHPAPWARLDRQFLIKLQGEDHEARKASPAEVEAVQELERAVGREPPDQRSLRVDDLMSETVRTVRLALQRHGRRARIAFNLTASKRLLPGGREEVLTDEGRVGLLADTLADWYALFAGKGWNDEWARQQWETYVTPLLQGAALPQIPEDAEATPKARKKYRADLTENLKPAAESLAQNEPLRMKLHCLWATRWSKDDIALRKCLRWLRDWILPRGKKVKEKAGRAIRHVGGLSLTRIATIKSLYQVQKAFHMRPEPEDLRKNAPSKGDDALLDFGRSILDVMEHLREQRVKQLASRIVEAALGIGIERQVGKKTPKRPRQRLYWKDEKGNEHGDRRFAPCHAVVIENLTHYRPDETRTRRENRQLMSWSSSKVKKYLAEACQLNGLHLREVQAGYTSRQDSRTGAPGVRCQDVPVKEFMRSPFWRKQVAQAEKKQAGDKGDARERLLCDLNAEWKGKPEADWEKAGTVRVPLKGGEIFVSARPCSCCKHGKRGGAPGLQADLNAAANIGLKALTDPDWPGKWWYVPCDPTNFKPARDKVAGSAAICLDKPLKNAPAAQDTEGPRKKRDEAGARSRGVVYLWRDVSSRPISANDAWREFTPYWNDVQARVVNILQQLAKNQGVR

SEQ ID NO: 293 - protein, 809 aa, unidentified
  REGION 1..809: note = Description of Unknown: uncultivated organism sequence
  REGION 1..809: note = Category: MG37 effectors
  REGION 1..809: note = Description: MG37-33 effector
MAKDNAPVVPSGLFDLADWNGRLQAPRRQLDAIAAIHDRTDLSVEEKRQLVAKRTRTIRWLVTFSAKLQSRGPFIAYAAQHGFDWRYGAHGIENKSREGLAKLVLCRLPGLRILSVDLGHRYAAACAVWETLSAAQMQNACLEAGMEVPSQRTLYSHLKHFVNGKEKKTIYRRIGADTLPDGSPHPASWARLDRQFLIKLQGEDSDARPATCDEVVAVEQLETELGYVRPIKRKGREHLVDELMSDALRTLRLGLQRHGTRARIAFNLTATKRTRPGGIQELLDQESRIGLLTETLLEWNELYAGERWADELAMDMWNKHIQPLLGGTILQETNNQDVTPSAAKRRMQREETRKKLRPVAKQIAENDSLCRQLNVLWNTRWQIEDAAWRMRLRWMRRWLLPRGINRDPQFRKSIRDVGGLSLIRIASFKSLYQVQKAYWMRPHPDDLRRNIPERGDSSLTSFGQRVLDAMERMRENRVKQLASRIAEAALGIGDETSVNAKNGRRKRPTERSNDPRFAPCHAVVIEDLTHYRPDETQTRRENRQLMSWSSSKVKKYLGEACQLNGLYLREVPPAYTSRQDSRTGAPGLRCNDVTVAEFYTSRFWRKQVEAAEKNQKDGKKGDARERYLLSIDERIRSEANDRDVFRIPVKGGEIFVSACGQDGGSNANRKAPPGLQADLNAAANIGLRAIFDPDWEGRWWYIPCDATTICPVAKKFNGCKAVDSSKPLRIVAEKVAVSSSSIDEKRSGRKGIALTDGSRIVNLWRDPSGAPIRRDVPSNSEWQDYAEYWNKVQSRVIANLRKSYGLREI

SEQ ID NO: 294 - protein, 1325 aa, unidentified
  REGION 1..1325: note = Description of Unknown: uncultivated organism sequence
  REGION 1..1325: note = Category: MG37 effectors
  REGION 1..1325: note = Description: MG37-34 effector
MAKETTTQRSYTVSLCKPELGAKAWKALAATHIGMAKGAKACGDMLLNMAAGIAPCAIEELGFSGAEAVRNARRMLTLTWFDVESEDGSPQEFVVPVEELPQKLRDHLISAGLDREEADSWLEDCQDVFATPIREDSCWIDRRSSFEAMEARLGVDISQSDIEDFCFGQFAILGSLKDYLIIPDYESLQPDGISDAPSKIQAARNMLSSRLGAGIGSDTAAMADAYDLINRALEGLSSGEHCPKNEFRRVIELELDDSMPDISFEEFVNSKIKGIGRPTATAQRMEAALACREFIPWSQIEALMEKSADDARKQRAKVGLKGRRPYFDAIMGDLEKKTGIPYPAEGNQTPARNWYSCLFDHAARGVSAHHTWVKRAESTRNATYANNEAFETLPDEARAFLSKYEKERSLSLGAVEPYVIRRKAITGWTKDHVKQLHNAKSAEERVEILKEAQSQGDMGDMTLLIDLVRDDALCAWHDVEGKPAEKILEVWAKHQELERERLHFKTPSYRHPDHLLHPVFADFGKSRPEATYTFGESLEQRTVTLMLVDGGGFSRFTFHWNSKRLMDDFDFSALEKEGKAAACAMTTRFGNSLEEERKPRLLLTKAAKKPIVSDVGTRLQLTRASLERCAKRQNDAMKNPDELDWFLSLALNIKPAPFTPKALIAQAKERKDENKARTSALSKLRYSRIHGLTFIGVDLGHRKAASCSVWKTCSAEEIEQLCIEAGHELPDKNTLHLTLDCIDRRINARRIGADTLPSSEQHPAPWAVLQREFAIELPGAKEEEQRAATKNELSFLANPYAISVETRSAKAKKSAYRTTSEAQYAAVEAIRRDVKQHASMASFIHLIRSKKITKPGGAEMLLSDDELVKTVEKRLEKELGNKYAKPAPWVENLPRSNDPSTCAHILCTEKEYVDALEKQWEEDDENIRIALRILRNWIFKGIEPYSDSRTACKGVGGLSLNRIATMQMAYQLVRSFSMRPFPTDTRRGRRMSAHINTMREQLAKHVASRIVEAALGLGGSQNTSEKRNVRTPGDRFQPCDLVVIESLTNYRPEQTRSRAENRRIMQWASARVGEMLRDECEIYGIALYETPAAYTSRQDSRTGLPGFRFKEVPVAAFVNGGSYHGVNIDRALSSDCENERRFYGELLKRWNKGKGEWDEPLRPEKTVWTLKRGAWVSKNGMLLKKGMAPQPIPIVANGSELFMASTDEGVLKIQADINAAGNIALRGVTDPDWAGSWWRVNIQAKSGMVEKRHRGSLAFDGTAIDPEGKAPHEGVIGAWSTVGATPLSDEKRKWSTYQKYWDDQRSKIFARLCRRYGIPPAIEEE

SEQ ID NO: 295 - protein, 938 aa, unidentified
  REGION 1..938: note = Description of Unknown: uncultivated organism sequence
  REGION 1..938: note = Category: MG37 effectors
  REGION 1..938: note = Description: MG37-35 effector
MALTVETTQRAYTMRLTGDSDNTHWRELLWKTHELTNRGAHAFGDFLLTMRGGLSHELATGNTSEETRTRRIILAMSWLSVESKEGSPQQFHVPQNWEGKKQLGQYKVLEALESILTKRGLDRKEIEAWINDCTASLQARIRDDAVWVNRSECFDAFCKEAGVSVNRASAKNNLFFFISEDQYFLLKDIGEESANVPDSNSLNLVQLARKWLSNYWGAGIGNDKRSIKDSLTTIAGLDYGHMFDRSGTDLLNYIAVKLRFGEVEGDWDLRRLKSCIGWRSGRSSSAAMALEKIAAEKNISKEAVERFVEKCADEAKTIKVPDKESQDTQTWNENIRGQLERAIGVPYRDEKDHIDEFSVMLDHGARHVSVAHSWMLLQEGKRIEFSKDAQKLNKVPEEARQYLDEYCELRTELTSAVGDYVIRKRAIEGWKEVVKAWSASDCRTPEDYVEAARQAQAEDVEGGKFGDINLFEALAEEDACCVWRNDKGKPDADILKNYVEARWAETQMKRFKVPMYRHPDALRHPVYCDFGSSRFSIDYAALRAKKDVPVNSLTLTVYDGASFKPLTLRWQSKRLMKDIIDLRPKDNKDGDAIVVSRADRLGRAAGGAGDVKKGLTIATVFDEKKWNGRLQVSRRQLDNLERKLMKAGVPDKDRCKTVQSHLPNLDWFITFSPKLSPQGPWIDYAMENKLKVNAKNIFNWRQRFEPKKRGTLTYAPLCRLPDLRVLSVDLGHRYAASCAVMQTMSTKQLCALCEDAGATPPAGDALYFVLSEQNGEKPKKKWFRRIGPDRLPDGAEHPAPWAMIERQFTIKLDGEDDTVRGARKEEIKNAVGFCENIGIDENDLPKNAVDELMGFCVRQYRLALRRHSDVARIAFAMTAQHRHGMGGRKETLDSSGILEEKTKALLLWDNLRNGRGKAKETAERIWGNYLAVHVDRLG

SEQ ID NO: 296 - protein, 1442 aa, unidentified
  REGION 1..1442: note = Description of Unknown: uncultivated organism sequence
  REGION 1..1442: note = Category: MG37 effectors
  REGION 1..1442: note = Description: MG37-36 effector
MANQAAVTQRAYTLRLRGVDPQDQSWRDALWATHEAVNKGAKAFGDWLLTLRGGLDHALADAKVKGGKRKPDRDPTDEERKGRRILLALSWLSVESEKGAPDRHVVPHDLNKQSGSRSWKTVDALREILKGRGLDESEIESWVQDCSASLSAAIRDDAVWVNRSKAFDDAVKSIDCSLTRDEVWDMLDRFLGSRDAYLAPAKGAEDESAEAEQEDKAKDLVQKAGQWLSSRFGTGKGADFSRMAAVYEKIADWAGKARAGMTGDAAVAGLAAALSEFSPASNDLQGVFRLISGPGYKSATRKLLKQLPARPSVAQEDLENLRDSACDDAEKCKANTGSKRQRAYADAILKDVESVCGFTYLQEGGPARHSEFAVMLDHAARRVSLAHTWIKRAEAERRRFEEDARRMDKLPARVKQWLDAFCFERSERLKASGEKKTYRIRRRAVDGWKELVAAWSNADCKTAEDRIAAARALQDDPEIEKFGDIQLFEALADDEALCVWHKDGDLAKSPDPQPLIDYVLATDAEFKKRQFKVPAYRHPDALLHPVFCDFGNSRWDISFDVHKAVKTSERNRKNMMAQDPHALSMTLWTGSTVEPQRLRWQSKRLARDLALKGRQDANARPVTRADRLGRAAAGVFAHSAVRIAGIFAQEDWNGRLQAPRAQLDAIAARVARHGWDAKARQMRDHLRWLITFSAKLQLSGPWAGPEPSPWVEYTKTFPDDAPAKPFVSRKGDYAVRHQGNDARNGHAKLILSRLPGLRVLSVDLGHRYAAACAVWETLSAEQLKAACQAAGHEPPKDSDLYLYLKKKVKKQKKGKALEVEETTVYRRIGADVLPDGKPHPAPWARLDRQFLIKLQGEDTEARKASSAEVGAVQELERAVGREPPDQRSLRVDDLMSETVRTVRLALQRHGRRARIAFNLTASKRHLPDGREEVLTAEERVKLLADTLADWYALFTGKGWHDEWARQQWETHIAPLLQGSVLPQIPEDAEDVPKARRKYQDDLMERLSPLARSLAGNDSLCRKLHCLWATRWRENDVILRKRLRWLRDWILPRGRNAEGDPAIRHVGGLSLTRIATIKSLYQVQKAFHMRSEPEDPSRNNPSKGDDALLDFGRSILDVMEHMREQRVKQLASRIAEAALGIGRVKRLAGGKDPKRPRQRVDRPCHAVVIENLTHYRPEETRTRRENRQLMSWSSSKVSKYLAEACQLHGLHLREVQAGYTSRQDSRTGAPGVRCQDVPVSEFMQSPFWRKQVAQAEKKRAEGKGDARERFLCDLNEKWKGQPEADWKRAAAVRVPLKGGEIFVSADEKSPAAKGLQADLNAAANIGLRALTDPDWPGKWWYVPCDPTNFKPAKDKVAGSAAICLDKPLKNAPAAQDTDGPRKKRGKAEARSREVVNLWRDVSSQPISANDDWREFTPYWNEVQARVVNILRQSAGFARDQGER

SEQ ID NO: 297 - protein, 843 aa, unidentified
  REGION 1..843: note = Description of Unknown: uncultivated organism sequence
  REGION 1..843: note = Category: MG37 effectors
  REGION 1..843: note = Description: MG37-37 effector
MAQQPQVPVTQRAYTLRLSRAPGECAACHTDACDCWRDVLWATHEAVNRGTKAFGDWLLTLRGGLCHTLADMKVPAKGKKPARESTEEERRDRRVLLALSWLSVEDERGAPNGDGLRIATGRGTGDQRGKAVKAALHEILKKRGLNETEIESWLSDCGASLEARIREDAVWVNRSVCFDKAAKSVGDTLTREEVWDFLEPFFGTREAYFTGLSDSEEEEDESTREDEKAKDLVQKAGQWLSARFGTGAGADFNLMGGAYQKIAGWASRAASGNQGAKTMERLADCLELPSDSRDLNGVLGVISGPGYKSATRNHLKTMAGKPQVAQDDLDRLKELAEKDAAKCKENVGRKGRRPWSDRVLEDVEKACGFTYLQNDGPARHKEFSVMLDHAARRVSIAHSWIKRAEQRRREFEEDAKKRDALSTRAPEAVEWLDRFCADRSTATGASADSGYRIRKRAVEGWPHVVKAWSRPSCTTEDDRITAAREVQGDSEIEKFGDIQLFEALATAEAVCVWRNQDNEPDASILTDYAAATTAEHDQKRFKVPAYRHPDALRHPVFCDFGNSRWMIRFACHEATKARNGSKRSVKNDAESTQGRHGLRMGLWNGQSVDDVDLHWSSKRLTADLALDDHPDANAVKVTRGDRLGRAASGAVAHAAVMNVFEERDWNGRLQAPRAQLDRIARLEDDAKRAQAETLRRRLRWLVSFSPRLRPSGPFIEYAASHGIKPNRRGEYYPNAPANKGRERLGKLVLSRLPGLRVLSVDLGHRFAHPGTAPIPEGAMRADEPSLLAYLVSSGPYMLEGADQVDYAKPSGERPPPPGLGENGMALVRNPSWQASSDSLRPAY

SEQ ID NO: 298 - protein, 1469 aa, unidentified
  REGION 1..1469: note = Description of Unknown: uncultivated organism sequence
  REGION 1..1469: note = Category: MG37 effectors
  REGION 1..1469: note = Description: MG37-38 effector
MARKSESVADPPTAEAPLTQRAYTLRLRAVDPQDDSWRDALWATHEAVNKGAKVFGEWLLTLRGGLGHELAEPPPLPKGKTRSDDETAALQKSRRILLALSWLSVEDARGAPDGAIRIASGEDADSVRRDKVLATLRSVLAGRGVGQRAIESWISDCADSLSARIRDDAVWVNRSAAFDTKTKELRGLTHKYATETILSFFGPADDYFSLPDADADDGATLAAGDDDSKFKQKARQWISTNFGTGEKSDTGQIIESLRKLAKAELDRFARRPKAELIEAMSRKVHGPTPDFDGLRAGIGWSTGRPSKGRLAVEKLPDRPTKTDIEALQQKFAEEADDKESKSGARDVPKWMPGFRAFVEAAIGMPFVGSRNHIGEFSVMLDHAARRVSIGHSWIKRAEAERRRFEADAQRLGTVPADAAAWLDAYVRDRSGSAGGEYRIRRRAVEGWDEILKRWKRPTCASAEDRIAAAREVQADPEIDKFGDIQLFEALASDDALSVWRNGNDIAPDRLKDYVFAHDARFKQRRFKVPAYRHPDALRHPVFGDFGNSRWKVEYSVLEAAKAARGDRRISAQDAEWIENPRGIRMGLWNGDAVKDFDLWWSCKRLSADLALRQPAHNGQVRSVSRADRLGRAASGIKPGESPSPAGLFSQAEWNARLQAPRSQLTDLAAYLDRSDGRWDDRARKMRDRIAWLVTFSAKLECRGPFIDYAARHGITPNRKGEYYPNADRNKADKREGHAKLMLSRLPGLRVLSVDLGHRFAAACAVWETLSRAELKKEIAGRSVIDGGAGATDLYLHTRHTDCAGKERKTIYRRIGSDQLPDGSDHPAPWARLDRQFLIKLQGEESRARKASADEIETIRQMEIQLGYVREAHKPLPAQIDELLSEGVRLVRLGLRRHGDAARIAYAFHPEAARLTPGGGVEAHTPDTRQQAILDALIRWHGMAMSDRWSDPCAMDAWQTRIQPALTTELPALTPDADRWERNRFRTALEAALTPVATALSREGAETLHTLWSERWEADDAAWRPRLRQLRRMLLPRGLRPVAGDTDAQAAARKARRGAARHTGGLSLTRIATIRELYQVQKAYAMRPEPDNPRKNIPESNDDRFAEFGRSILEAVERLREQRVKQLASRIAEAALGVGRAPRTGDHDRKRPLSPVDAACHAIVIESLRNYRPDELQTRRENRALMNWSAGKVRKYLEEACQLHGLHLREVMPNYTSRQCSRTGLPGLRCDDVPIDEFLTAPWWNKAVNAAAKRLQENGNDSLDRLLVALRENRSGATTDSDKCSQRTLRLPRAGGDLFVAAPPSGDATKGRHRGALQADLNAAANIGLRALLDPDFPGRWWYIPCIEDKAAGTAVPRADKVKGSVCFGPDSSKPEQVGSLLKPGAGDSSDGQSRPARRQRNRRSNAEGKETTNFWSDPRAAALRNAKDGGFWLPTPAYWRWVRKRVVDALWEANGLGAPPADLVRDGRA

SEQ ID NO: 299 - protein, 1510 aa, unidentified
  REGION 1..1510: note = Description of Unknown: uncultivated organism sequence
  REGION 1..1510: note = Category: MG37 effectors
  REGION 1..1510: note = Description: MG37-39 effector
MARKTESAAEPPAPEAPLTQRAYTLCLRGTDTQDDSWRDALWATHEAVNKGAKVFGEWLLTLRGGLSHELAEPPPPPKGKKRRDDDAIAVRKHRRILLALSWLSVEDERGAPNGVFRVASGRESDSARHGKVLEAFKKILESRGIIGDEADSWVNDCTASLSSAIREDAVWVNRSAMFDAAVLKIGPSLTRDEVWDILEPFFGSREAYFAGVELTDEKSSAEEKAKDLVQKAGQWLSSRFGTGTGADFESMSKVYAAMAEWADAAPAFPSGADAIKNLAHSLADFRPATDDAGGILGLISGPGYKSATRNIVKNWESRTTVVTRDDLRKFAETATNDEHKSMANVGAKGRRPWSDRVLEQVEHACGFTYLQTGGPARHKQFSVMLDHAARRVSIAHSWIKRAEAERRRFEADAQRLGTVPADAAAWLDAFVQERSGSAGGEYRIRRRAIEGWDEVLKRWARSDCKTAEDRIAAAREVQADPEIDKFGDIQLFEALASDDALCVWKNGDNFTPDQLKDYVFAHDARFKQRRFKVPAYRHPDALRHPVFGDFGNSRWKVEYSALEAAKAARGGRRIGTEDADWLGNPRSVRLGLWNGDAVNDFDLRWSCKRLSADLALWQPAHNGQVRSVSRADRLGRAASGIKPDDSPSPAGLFSQAEWNARLQAPRSQLNDLAAYLDRNGGRWDDKAKRMRDRLAWLVTFSAKLECRGPFIDYAARHGINANRKGEYYPNADRNKADKREGHAKLILSRLPGLRVLSVDLGHRFAAACAVWEALPRHEFEQEIRGREIIAGGTGPEQLFCHTRYTDKAGKARTTVYRRIGSDTLPDGSEHPAPWTRLDRQFLIKLQGEDAPARKASPDEIKLVERLENELGRRRDDGLPLPRRVDDLMAEAVRTLRLGLRRHGRVAKIAYAFNPDCPGIPGMGGALKAIARGNDDHIKFLVNALADWHAMATDAAWDGSDARQLWNQHIKPVPNGFEVAESTRTEPNAERTTRQQRRKTEEELREKLRPIAEHFARASKESTRGIYEAWRDLWESKDGPKRTKSNFAHTLIHDQAGKVIGSRTAPKQGAPSPEGWHLRLRQTTDWITGRRPPGNISLSPGWKQHVGGLSLTRISTMRALYQLHKAFAMRPRPDKVQGAPERGESNAGTAQSILDAMERMREQRVKQLASHIAEAALGVGRMKQTDGRDRKRPRSPVDAPCHAIVIESLRNYRPDELQTRRENRALMNWSAGKVRKYLEEACQLHALHLREVMPNYTSRQCSRTGLPGMRCEDVPIDEFLSAPWWKKMVNAADKRLQDNGTDSQDRLLVELQKKWSIASDQEKRAQRTLRLPRAGGDLFVTAPPNRAATVEDRSQGALQADLNAAANIGLRALLDPDFPGRWWYIPCIEDKAARTAVPRADKVKGSTCFGPDPSKPEQFGSFLKPDAGDSPEGHPRPARRSGTRPSKADGKQTTNFWSDPSATALRNAQDGGFWLPTPAYWRWVRKRVVAALWQANGLDAPPADLVRDDQA

SEQ ID NO: 300 - protein, 1475 aa, unidentified
  REGION 1..1475: note = Description of Unknown: uncultivated organism sequence
  REGION 1..1475: note = Category: MG37 effectors
  REGION 1..1475: note = Description: MG37-40 effector
MARKTESVVETPAPEAPLTQRAYTLRLRGTDTQDDSWRDALWATHEAVNKGAKVFGEWLLTLRGGLSHELADQRVIEGKGASKKERDPTDDERRDRRILLALSWLSVESAPRDKDDPRKPFLIGAANGPTSREQALREALADILQKRGLSTPEIGDPNVEPENQPDTWLGQCGPSLAARIREDAVWVNRSAMFDAVTSGWQKQDARSDAHTLLSFILSDDFLTLPTAKKQQGKKNDKDPEASENESEQEERQKAVKASSRGAGQRTRHPFSHLLGEGKPFGKPQRTLSLRDQWHGYIKPKLEEVGIPVLDAKASNKGKRKDAAPAHTELQREMFSKAASRVAQIVTKQRQQEADRLARREADADLRMMENDAAYADALKALQEYCDEYRVMSGATGEFLIRPRAVTGWDRVVKRWAGITEANPDAAREARIEAVKEAQDADEEKKFGDANLFMRLADERYRPVWQINGNADRTILERFVKGMKARSDSKRLKVAAYRHPDPYFNPIFCQFGVSRPAIRFGRLKAFSDSPAANDLRAVGMLLWHPNKKCAQITVMHGVSRRLDREIGSACDQVQQDAGKLPSVSRRGRLGAAAAGLASADAPARVAGVFDLKKVKSRAKDDAKEEHEDEGSGNGKLKEPTWNGTLSTNRRDLAAIARLIANGDAQKAERRRQQLRWTLTVSMDMECRGPFIEYAARHGINANSKGEYYPNADRNKADRRKGHAKLILSRLPGLRVLSVDLGHRFAAACAVWDALPKADFEQEIKGREIIAGGTGPEHLFCHTQHKDAAGKQRTTIYRRIGCDNLPDDAKHPAPWARLDRQFFIKLQGEETPARKASPEETKLVERLERELGRRRDDGQRLPRRVDDLMAEAVRTLRLGLRRHGRVARIAYAFNPDCPGIPGMGGSLKAIERGSNDHIQFLVNALADWYALATDSVWNSSAARRLWNEHIKPVPNGFEIAQPTQPEPNAEPTTRQQQRKSEEALREKLRPIAEHFAGADKESTRGIHEAWKNLWEEQDGTGRSKGDFDHTLLRDQNGKVVGSRTRPKAGQETAGGWHEHLRRVTDWITGRRYPGEESPSNGWKQNVGGLSLTRIATMRSLYQLHKAFAMRPRPDKVQGAPERGESNAGTAQSILDAMERMREQRVKQLASRIVEAALGVGRMKQTDCRDRKRPRSPVDAPCHAIVIESLRNYRPDELQTRRENRALMNWSAGKVRKYLEEACQLHGLHLREVMPNYTSRQCSRTGLPGMRCDDVPIDEFLTAPWWNKAVNAAAKRLQENGTDSLDQMLVALREKWSKASDSDKRGQRTLRLPRAGGDLFVAAPPNGAATGQKPRRALQADLNAAANIGLRALLDPDFPGRWWYIPCIEDKAAGTAVPRADRVKGSACFGPDPSKPEQSGSLKPGAGHSSDEHSRPVRQQATSRSNADGQETTNFWSDPRATALRNAEDGSWLPTPAYWRWVRKRVVAALWKMNGLDA

SEQ ID NO: 301 - protein, 1481 aa, unidentified
  REGION 1..1481: note = Description of Unknown: uncultivated organism sequence
  REGION 1..1481: note = Category: MG37 effectors
  REGION 1..1481: note = Description: MG37-41 effector
MARRSASTSKPPGPVAPTTQRAYTLRLRRAPGKCPHCEQDACDCWREALWATHAAFNRGAKAFGDWLLTLRGGLSHELAEQPSPPKNKEPTCEESDAIRKNRRILLALSWLSVEDDCSAPTGTFRVASGKDSEAERKNKVLTAFRSILTARRMRSQDVESWIADCAASLSAKIREDAVWINRSACFDQRALDLKVLSREYAKAAVMSFFGPLDEYFKLPDEADDTKPAVGGDGPDFRTLARQWVSTNFGTGKKSDSEAIAQNLRKLADANLAPFSGKPKAALIAHLSVELDGSTADIDGLCRAIGWNTGRPSKGRVAIERLPDPPTETSIQTMQQKFREEAEAKASSKGLRQVPEWMPAFQKSIERDCGMPFKLGEGRDHIGEFSVMLDHAARRVSIGHSWIKRAEAERRRFEADAQRLNHIPAAAKDWLDQFVQFRSGSSGAAAAGGEYRIRRRAIEGWDEIIKRWKRAACKSPEDRVAAAREVQADPEIEKFGDIQLFEALAADDAECVWRGDGNGTPDPLKDYVAATDALDKMRRFKVPAYRHPDPLAHPVFGDFGNSRGDIRFAVHEAAKATRGTKRIAKDQKEWIRERHGLRMGLWDGQSVRTADLRWSSKRLVDDLALRNHVTTRRTGPVSRADRLGRAAAGLGADEAACVAGLFELPDWNGRLQAPRAQLDAIAACVAANGGKWDDKARKLRDRIEWLVSFSAKLECCGPFMEYASQNGIQPNGKGEYYPHAERNKGRTGHAKLILSRLPGLRVLAVDLGHRFAAACAVWEALSKIAFDAETKGREVVSGGRAADDLYCHTRHLDCAGKARTTIYRRIGPDKLPDGSDHPAPWARLDRQFLIKLQGEERPARAAGPAETAAVQQIETDLGRARGQEDLPPRPVDSLMREAVRTIRIALRRHGDAARIAYAFKPGAKRLKPGGGAQDHTPETHADAILEALLRWHELATGARWRDPWAETQWKDWVQPHISATLPELANDADRWERKRHRAALEQVLRPVAQMLIQRPTDALHQVWSKHWADEDLKWPSRLRWLRNWLLPRGPRARSGAARNVGGLSLLRIATLRELYQTQKAYAMRPEPDDPRKRIAGRNDDRYDELGRSVLQVIERLREQRVKQLASRIVEAALGVGRAKPTRGRQRPQSRVDVPCHAVIIESLRNYRPDELQTRRENRAIMNWSAGKVRKYLEEACQLHGLHLREVMPNYTSREDSRTGLPGVRCVDVPVDPKLGKPKAYWWNSVLSTARKKSIGDAASHDKQGDATSRFIVELAGCLDRLKADGKPLPKTVRVPRIGGDLFVAAPPTSCTAPAHQPHPACDGARALQADLNAAANIGLRALLDPDFPAKWWYVPCIDDQRGLALPRADKVLGSACFPGDPATFGSLLKTRTAAGPAVDGQAAPDRKPRTGTHRPGSAKSRSLGDGKATTNYWSDRSARDLRPADEGGHWQPTNVYWNWVRKRALLGLYSFNGLSPPSDDRP

SEQ ID NO: 302 - protein, 871 aa, unidentified
  REGION 1..871: note = Description of Unknown: uncultivated organism sequence
  REGION 1..871: note = Category: MG37 effectors
  REGION 1..871: note = Description: MG37-42 effector
MATAIQYPTTQRAYTLRLRGIDPQDQSWRDALWATHEAVNRGAKVFGEWLLTLRGGLDHQLADAPVKVRGGTTRLPSDEERRDRRVLLALSWLSVEDAHGAPRDASLIVAKGTDSADCRARKLADALIAILQARSVAASEIGDPSKPPEDQPGTWLGDCMGSLSAAIRDDAVWVNRSKAFDAATQSCPSLTRDEIWDFLEPFFAGAEAYLRPERAESDESESASEAAQEEKAKDLVQKAGGWLSKRMGAGGGANFQDLARAYQAIAQWASYAQPGQSGQQAVEVLAGYLSQHGFSPTANDATGVLSVIRGPGYKSATRNYIITAIAKSPAITAQNLSQLQELATKDNERCSSKIGGKGSRPYSNMILQHVEAACGFTYLQSDGAARHREFSVMLDHAARRANVAHSWIKKAEAERRQFESDARRIENVPQDALNWLRRYCEERGGASGSLEGYRIRRRAVDGWDKVVIRWSRSDCQSADDRIAAARQLQDDPEIDKFGDIQLFEALAAEEALCVWKPNGNPTAQPLKDFVAATEADAKKKRFKVPAYRHPDPLRHPIFADFGNSRWGIEYSAHRAPAQCDELRQKVDKLAAAVADAQRKLEGTKAAQRASRESKLAEAQSKLVAAQKEFAAISDPYRVELKLWNGRAVAAIPMRWSSKRLIADLSLRRATEPSSDQRIGVTRADRLGRAAGNADDGRPVTITGLFQQDHWNGRLQAPRAQLDAIAKHVDKHGWDAEARRQIARIRWVVSLSAELSQQGPWFEFCNRFGEDAPARPFVSRQGEYAVKHRDNDQRKGHAKLILSRLPGLRVLAVDLGHRYAAACAVWEAVTCEQMQHACQAAGTTSPDAQAMFVHLKCSNARGKTVTTIYRRI

SEQ ID NO: 303 - protein, 1505 aa, unidentified
  REGION 1..1505: note = Description of Unknown: uncultivated organism sequence
  REGION 1..1505: note = Category: MG37 effectors
  REGION 1..1505: note = Description: MG37-43 effector
MATENGKEQPNVTTQRAYTLRLSGLDKHDNTWRDRLWNTHEAVNKGAKAFGDWLLTMRGGLCHTLAEVDVPGIGKKPVCLPTRQEIKNRRIVLALSWLSVESFHGAPESLLVSHDLDMAAGERKNWKTIDALHEILRRRGLCEEQIDQWAIDCRDSLSAKIREDAVWVNRSKSFDLAKAKIRESLSREDIWDFLQPFFGNKYSYLKMKTAVTTTSEDFEADAEESKDESSEEKAKDLSQKAGQWLSSRFGTGTGADFSRFCEVYDAIANYCHNIQAGVSGTEVCGSLADALHEFSPRSMNINGILELISGPGYKSATRNVLQKINNLQSVSQLDLDRVHDASVKDAQQSREKVGGKGSRPYANAVLQDVEAACGITYHNTDNGPSHHWQYAVILDHAARRVSMAHSWIKRAEEERGKFEIEKDKLLRVPADARVWLDAFCTRRSSESGAIDSYRIRRSAIDGWKQVVAAWAALPTEAEDKDSVLPSAAESARIQKARELQDTIEKFGDIQLFEALSLPDAKCVWLTNGKPDAQPLMDYVAGTDAVSKKQRFKVPAYRHPDAFLHPVFCDFGNSRWSIDYAVHRAPEKLARAQQLLEKKKEELTRAEQALSKASDPSKRSSIEKKLKTLNVAFKQQEAEVLWLESHHAMTMGLWNGSRIEDTPLLWQSKRFGSDIGQAGAEHPLVASRADRFGRAVVMAKDNAPVVPSGLFDLADWNGRLQAPRRQLDAIAAIHDRTDLSVEEKRQLVAKRTRTIRWLVTFSAKLQSRGPFIAYAAQHGFDWRYGAHGIENKSREGLAKLVLCRLPGLRILSVDLGHRYAAACAVWETLSAAQMQNACLEAGMEVPSQRTLYSHLKHFVNGKEKKTIYRRIGADTLPDGSPHPASWARLDRQFLIKLQGEDSDARPATCDEVVAVEQLETELGYVRPIKRKGREHLVDELMSDALRTLRLGLQRHGTRARIAFNLTATKRTRPGGIQELLDQESRIGLLTETLLEWNELYAGERWADELAMDMWNKHIQPLLGGTILQETNNQDVTPSAAKRRMQREETRKKLRPVAKQIAENDSLCRQLNVLWNTRWQIEDAAWRMRLRWMRRWLLPRGINRDPQFRKSIRDVGGLSLIRIASFKSLYQVQKAYWMRPHPDDLRRNIPERGDSSLTSFGQRVLDAMERMRENRVKQLASRIAEAALGIGDETSVNAKNGRRKRPTERSNDPRFAPCHAVVIEDLTHYRPDETQTRRENRQLMSWSSSKVKKYLGEACQLNGLYLREVPPAYTSRQDSRTGAPGLRCNDVTVAEFYTSRFWRKQVEAAEKNQKDGKKGDARERYLLSIDERIRSEANDRDVFRIPVKGGEIFVSACGQDGGSNANRKAPPGLQADLNAAANIGLRAIFDPDWEGRWWYIPCDATTICPVAKKFNGCKAVDSSKPLRIVAEKVAVSSSSIDEKRSGRKGIALTDGSRIVNLWRDPSGAPIRRDVPSNSEWQDYAEYWNKVQSRVIANLRKSYGLREI

SEQ ID NO: 304 - protein, 1520 aa, unidentified
  REGION 1..1520: note = Description of Unknown: uncultivated organism sequence
  REGION 1..1520: note = Category: MG37 effectors
  REGION 1..1520: note = Description: MG37-44 effector
MAYQNGKEQPTVTNQRAYTLRLSGTNDQDSIWRNRLWHTHEAVNKGAKTFGDWLLTMRGGLCHTLAEADVPGKGNKPARHPTPQEIRSRRVVLALSWLSVESQHGAPERHLVSHDLDIATGERKNWKTVEALREILHGRCLCKELIDEWANDCRDSLSATIREDAVWVNRSKAFDLAAKKIGASLTREELWDFLQPFFANKHGYLQMDTVAGVTNGDSETDAEEAKEDSSEEKAKDLSQKAGQWLSSRFGTGTGADFSRFSKVYEVLAARCGSVAVGVSGVEAIRILAGTLADFSPGSNDIEGMLGLMSGPGYKSATRNILQKINTLQTVSQQDLDRLREASEKDALQSKQKVGGKGSRPYANAILQDVEAACGICYAGTGESPARHWQYAVILDHAARRVSMAHSWIKRAEEQRSKFEIEKDKLDHVPKDALAWLDAFCARRSSESGASDAYRIRRSAVDGWKQVVAAWAALPPKPENQGSELLSDAESARIQAARELQDTVEKFGDIQLFEALSLTGAKCVWQPDGRPDAQPLLDYVAGTDAISKKQRFKVPAYRHPDALLHPVFCDFGNSRWNINYAIHRAPEKLTPAQQLLEKKKAEIDKAELTLAKAGDAAKQANISEKINGLRAAFIQQQEKVAWLNSRHAMTMSLWDGTHIEDTPLIWQSKRFGSDIGQPVEAQPLPVSRADRFGRAVALAQDNVPVIPSGLFDLSDWNGRLQAPRRQLEAIAAIRDSAKLSVNEKQQLVAKRIQSIRWLLTFSAKLQSHGPFIAYAAQHGFDWRYGAHGPENKSRQGLAKLILCRLPGLRILSVDLGHRYAAACAVWETLNAGQIQKACLDAGKEAPGPCTLYLHLKQIANGKEKKTIFRRIAADTLPDGSPHPAPWARLDRQFLIKLQGEDRDARLATSEEIAAVEQMENELGVVRQLKRKGRELLVDELMSDALRTLRLGLRRHGVRARIAFNLTANKRIRPGGKEEVLDQEGRVLLLTETLLAWYELYTAERWTDEPARELWNRHIQPLLGATILQNTVNQEDTPSAAKRRKLREETSGKLKHVAEEIAKNDSLCRQLHVLWSAQWQTEDVIWRTRLRMMRRWLLPRGVKRNAQLRISIRDVGGLSLTRIASFKSLYQVQKAYQMRPHPEDPRLNIPERGDSRLENFGQRVLDAMERMRENRVKQLASRIAEAALGIGGETGISSKDGSQKKRPTERSSDPRFAPCHAVVIEDLTHYRPDETQTRRENRQLMSWSSSKVKKYLGEACELNGLYLREVSPAYTSRQDSRTGAPGLRCNDVTVVEFNNSPFWRKQVGAAEKNQKEGNKGDARERYLLSIEEGIRGAANDRDIFRIPVKGGEIFVSACITDGGNNAKKNAPPGLQADLNAAANIGLRAIFDPDWEGRWWYIPCDAATLCPDAKKFIGCKAVDPTKPLRVVAEEGAISASGIGSKKSGRKKNAATDGTRIVNLWRDPSGAPIHRDVLRSPEWQDYAGYWNEVQHRVIRNLKTCYEQTSQQEDPFVSQDADKPF

SEQ ID NO: 305 - protein, 1434 aa, unidentified
  REGION 1..1434: note = Description of Unknown: uncultivated organism sequence
  REGION 1..1434: note = Category: MG37 effectors
  REGION 1..1434: note = Description: MG37-45 effector
MDKQVAVTQRAYTLRLQGADPQDQSWREALWQTHEAVNKGARAFGDWLLTLRGGLDHTLADAKVKGGKGKPDRDPTNEERRDRRILLALSWLSVESAPKDGDTRKPFVTATGQDSQAIREEKVLCALRGILEKRGVRGADLEGWIKDCTPSLSAAIRDDAVWVNRSEAFDKAVDSIGSSLTRDEVWDMLERFFGSRQAYLAPAEGAEDESAEAEQEDKAKDLVQKAGQWLSSRFGTGKGADFSRMAAVYEKIADWAGKARAGMTGDAAVAGLAAALSEFSPASNDLQGVLRLISGPGYKSATRNLLNQFAARPSVAQEDLENLRDSACDDAEKCKANTGSKGQRAYADAILKDVESVCGFTYLQDGGPARHSEFAVMLDHAARRVSLAHTWIKRAEAERRRFEEDARRMDKVPASVKAWLDGFCLERSEASGALEPYRIRRRAVDGWKELVAAWSNADCRTAEDRIAAARALQDDPEIEKFGDIQLFEALADDEALRVWHKDGDSAKAPDPQLLIDYVLATDAEFKKRQFKVPAYRHPDALLHPVFCDFGNSRWDISFDVHEAVKTGGRNRKNMMVPQDPHALSMTLWTGSTVEPQRLRWQSKRLARDLALKGRQGSNAPEVTRADRLGRAAADVPARATVRIAGVFEQEDWNGRLQAPRAQLDAIAARVARHGWDDKARQMRDHLRWLITFSAKLQPSGPWLDYAAAFPDDAPAKPFVSRKGGYAVRHQDNDAREGHAKLSLSRLPGLRVLCVDLGHRYAAACAVWETLSATQVGDACRAAGREPPRDSDLYLHLKKKVKKQKKGTEVEVEETTIYRRIGADILPDGKPHPAPWARLDRQFLIKLQGEDREARKAGPAELEAVQRVEKEVGREPPDQRALRVDELMSETVRTVRLALQRHGRRARIAFNLTAHKKLLPGGREEVLTAEERIGLLADTLADWYALFTGKGWNDHWARQQWEAHITPLLQGAALPQMPHDAEDMPKARREYEADLMKRLSPVAKSLAGNESLRRQLHCLWATRWRDDDVTLQKCLRRLRDWILPRGRKAKADGAIRHVGGLSLTRIATIKSLYQVQKAFYMRPQPQDLRKNIPSKGDDALVGFGRRILDAMEHMREQRVKQLASRIAEAALGIGRVKRLAGGKDPKRPRQRVDRPCHAVVIENLTHYRPEETRTRRENRQLMSWSSSKVRKYLAEACQLHGLHLREVQAGYTSRQDSRTGAPGVRCQDVPVKQFMQSPFWRKQVAQAEKKRAEGKGDARERFLCDLNAKWNDKLEADWEKAGAVRIPLKGGEIFVSADRDSPAAKGLQADLNAAANIGLKALLDPDWPGRWWYVPCDPATFKPAEDKVAGSAAICLDKPLKNASVAQSTDRRVKKGGKTEARSREVVNLWRDVSSQPISADDNWREFAPYWNDVQARVVRILRQSAGLATDQEER

SEQ ID NO: 306 - protein, 1469 aa, unidentified
  REGION 1..1469: note = Description of Unknown: uncultivated organism sequence
  REGION 1..1469: note = Category: MG37 effectors
  REGION 1..1469: note = Description: MG37-46 effector
MEIPTTQRAYTLRVSGRDKNDHGWRNWLWRTHEAVNKGAKVFGDWLLTLRGGIDHSLADVKDESERTNRRIVLALSWLSVESQNGAPPKRFHVSADGTTDALAEILRLRKVSKPEIESWQRDCRASLTAATRLDAVWVNRSALFDEAAREIGKSLTRDEVWDLFDRFFGSRDAYFEGLATADEDDEEGGGAEEERAKDLAQKARGWLSNRFGSGSGADFSAIADEYDGFAKWCRWFHEHPKESIETSAKQLRKALRIDELPERLASTPGPPNRVQTTYQAIVAAISDGKRLPKEEYAELAEIADSQAEAKRKLVGRKDSKPWANKILDDVIEACRIPYRDTAAEADLINEYSVILDHAARRICMAHSWIKLAEANRQEFTKDARKLDELREYAPAAVSQLDNLCDERTKVTGAIEDYRIRRGAITDWERVVKSWSRKKCVTSADRIAAAREVQAEPENEKPGDIQLYELLAAENYLSVWKQGDKATHKTLQDYVAATDAQAKQRRFKVPAYRHPDPLLHPVFCDFGESRWSVDYSAHRAPAGRNNAHALLAKRTADLAKAREAMFKAKNAELRQKAQEKVSKLESAAAQALDDTQFMELRHGLRIKLFDGSCVDERDLVWHSKRLDSDLALRSDSSPGDELPIAVSRADRLGRAAAGANADAAVAVADLFKLKEWNGRLQAPRAQLNAIAAVRDRKRNKDLSMGDRKARVERMISRLQWLVTFSAKLQPQGPWLTFCQRLPEGFNYDPKKRRLYHKANKNRKGRAQIILARIPGLRVLSVDLGHRFAAGCAVWETLSSGDMKRACNEAGVPVPSTDDLHKVIKRDKRRTIYRRIAADRLPDGTPHPGPWVRLDRQFLIKLQGEESAARLGSPAEIAAVDRLEAELGYSRARPRTKAESSVDLLMAEAVRLVRLGIGRLKRRMRIAHQLTARQVAGMAQKKVKLDDAGRREVLTKTLRDWHDLATSRDWRDEFAVRTWQTHILPLVAGAELPEVPQLETGAARKKRLTAAEERLAPVAERLVARDVTTMREEWAHFVRAEKQLWQKRLRWLRDWLLPRKGRRNAASIRRVGGLSVLRIATLKELYQVQKAYRMLGDPDDPTKGIPQRGDDSLDRFGQRVLTAMERLRENRVKQLASRVIEAALGFGREPGSTGNKQNARSQSQTHEPCHAVVIENLKNYRPDESMTRRETRQLMAWASATVAKYLDEGCQLYGLYIRQVPAAYTSRQDSRTAAPGTRCQDVSVERFLRPHWAVVRSVNDLLPDAESAGMDFQERVTAAEKLVRSGKGNAEQRFLVELYQHSRKLPEQKRRGRSVRIPQRGGELFVSADRRSPIARGIQADLNAAANIGLKALLDPDWAGAWWYVPVDDRTYKPVEKSVAGSAALSISQALSEPPQRGDDEKERNKKKPSTRRGSSGDPQEIINLWRFVSAKELPKDKWFDYQQFQNIVRKSVIDILRAQAGIPEDRVGTQ

SEQ ID NO: 307 - protein, 1379 aa, unidentified
  REGION 1..1379: note = Description of Unknown: uncultivated organism sequence
  REGION 1..1379: note = Category: MG37 effectors
  REGION 1..1379: note = Description: MG37-47 effector
MKKWGKRIISGVIAASLLTAAAISGSEQGTGTVASVVQAGTETSFMGKLLEGGYIDAFTSWTQEEQNKFYDGLSPQQQSVFLEVTNCQITRELIKSERSKEELEQFFDRLQPYFLILKKGNQEKPDDEIVIECINQIEGTDYHSSEQYIKQLVSEKKDHYLEFYNALKLVKDGKLEIESAVDDFYKELGFLKKDRVPANSAEVSRQPVQVQKKAAVKAVSDGYSNFKAVSSLKALKDAVASVKKGEKIAVRVDKGFNVTSVIRTNGRHVKIYADGESGHNLNRTAGYKDVMLEVNGGSLTLGAYDGDGRAKNNLYINGKNIAASAPLIEVASGHLYLNKYSRIIDGYFLADFAGGAGIALNSGTSCYMFGGRIDNCRAKSSKDVSSSSPKSSHGGGVLVGNGSSFYMFAGSIEHCQSIHGGGIMNYGTLRLYGGAISDCAASNQKKDALGGAVKVQGAIETDGKVSSTKGDLGVWKYTRSAAWIVNGKDGYQQGTTTGVVLKNNQADAGGAICLNNGSNGAIQDCNINGNHSTGNGAGICLSNGSYKKGAALELKTGAVIHGNESKGYGGGIYCADSVKGSLSGGTMYDNSAKYGAGIYHEAEFRMSGGTVRSNHSGNSGGGIYAKGKLSMTGGEISANTAATYGGGAILKTAGGSVSGGSIKGNSASANGGGLQIDGTVSLSNASVSSNSASGKGGGISVSSSGTCNLSSGNVSGNTAKAGGGGIYIDGTCKANGSSFTGNQSSGDGGAVYIASGTFTTFQANQAVNIQGNSASGNGSGIYNRNITVLNNNAHILNNQCKNGTQRGIFHEGSLFSIEGNTEIQQEIYLAKDRFVTASNRYFSNSNSLKAKISLDTANIRNGYAVVKGNVSNSADGNYKTGEALLNNQSAGGRFVYAGSGYVMRPGNLKKSSSGCAPFSIVLSQAYQIRYDKNSKEEVMNMPTAAVKYWEEDIKLSALTPTGGSGSFVAWNTKADGTGDGYQPGNVYTANADATLFALWPHYRVEYLPGIRSAAGTTDSQEQNKSEEILLRKNGFRSSEGKFVGWKQDIYHAKKRAERESVGYAELREEKDRGKNDYLLEFSKQMRGMLTEKQLQNSNLLLDKDDIFILKALWDLKPNIILKDKQTFIENEKVDRKRILELIESCSDVEDGNLIENVKIINIKYGKTKNGWCPSEQNFPEGMNSTDVMDTYFMKLEKDESVDVEITFQVADSAGNITSAKGLVCVIYNNPPKLYSHNLAFYQEDISTKPQDILKEIQNNYNVEDIEDEKKGLKIPVSIINPSPLLIEQFNSVGKYKIVYQAVDSLGKKTNLESEVYIAENNPFKDSYKFSIRFINKKYLYTLKKESKWIKDQILNAQLTSQLEKTREDAVLRYKFKVSK

SEQ ID NO: 308 - protein, 1481 aa, unidentified
  REGION 1..1481: note = Description of Unknown: uncultivated organism sequence
  REGION 1..1481: note = Category: MG37 effectors
  REGION 1..1481: note = Description: MG37-49 effector
MPKQNKPPVTQRAYTLRLRGTDLNDQSWRDALWKTHEAINKGAKAFGDWLLTLRGGLDHSLVDTKVKGGKGNPDRDPTDEERKTRRILLALSWLSVESKLGAPENFIVASGEESAQDRNNKVIAALEEILKSRGVAENEIDQWKKDCSASLSAAIREDAVWVNRSKAFDEAVKSVAFSLTRDEVWDMLERFFKSPTAYLDPAKGSEHEYSETEKEEKAKDIVQNAGQWLSSRFGTGKGADFSRMAEVYEKIAVWAGNAQAGTTWNEAIRNLAAALSKFSPKTNDLQGVDGLISGTGHKSRTKNLLKVLAAKSEVTIQDLEILKNNAAEDARKCFQKKGSKGHLPYSDAILRDVESVCGFTYLQNGGPARHFEFAVMLGHAARRVSLAHTWIKRAEAERRRFEEDAKKMDNVPVKTKEWLDEFIRERSGFSGALEPYQIRRRAVDGWKEVVAAWSKAVCKTAEDRIAAARALQDDPEIDKFGDIQLFEALAADDALCVWHNEGNATNAPDPQPLIDYVLAAEAEFKKRHFKVPAYRHPDPLLHPVFCDFGKSSWDIKFAVHSFSKKRGRSNNRMTESNDLHAFSMTLWTGVRMQPVSLYWQSKRLARDLALGKYVRNEGAIAVTRADRLGRAASNTSNNDLVTIAGLFEQEYWNGRLEAPRRQLEAIARYVEKHGWDDQAEKMRDQIKWFVTFSAKLQPQGPWCAFAQKLRLSINPQYWPFADANKKRKAHAKLILSRLPGLRVLSVDLGHRYAAACAVWEALSSEEVLQACRAVGHEDPKESDLYLHLKKKVTKQKKGNPVEVEETTIYRRIGADKLPDGTPHPAPWARLDRQFLIKLQGEEEGVRQASNEEIWQVHQLEAALGRSKPLINRLISSGWGITKNQQSRIEALKKLGWCPPEQPESGDVSDADEEEITYKPPLSVDELMSSAVRTMRLALKRHGDRARIAHYLITDEKTKPGGVKEKLDANGRTEMLQDALVLWHDLFSSRSWRDDAAKQLWDEHIIKLTGDKLPEEIGEDASESERGKKKKENREKLHDAAKALAEDESLRKTLHDLWKTRWEEDDRQWKKHLRWFSDWVLPRGKAADDPAIRKVGGLSLTRLATLTEFRRKVQVGFFTRLHPDGTRAETKEQFGLSTLDALERMREQRVKQLASRIAEAALGIGSQDKRHWEGGNRPRRRINDPRFAPCHAVVIEDLTHYRPEETRTRRENRQLMTWSSSKVKKYLAEACQLYGLHFREIFAGYTSVQDSRTGAPGIRCQDVPVKEFMRSPFWRKQVKQAETKLSENKGDARERFLCSLNAMWKDKAVTDWERAGVVRLPLKGGEVFVSADPLSPAARGLQADLNAAANIGLRALTDSDWPGKWWYVPCESSSLRPVKEKVEGSPAVNPTQALPQSAQKQSDGAGAKKKRKGSGTGKPKEVVNLWRDVSSSPLDDPNAGEWKEYTAYQNEVQWRVVRILEEELKGRFQRLYEGAKEDGIPF

SEQ ID NO: 309 - protein, 1188 aa, unidentified
  REGION 1..1188: note = Description of Unknown: uncultivated organism sequence
  REGION 1..1188: note = Category: MG37 effectors
  REGION 1..1188: note = Description: MG37-50 effector
MPKQNKPPVTQRAYTLRLRGTDLNDQSWRDALWKTHEAINKGAKAFGDWLLTLRGGLDHSLVDTKVKGGKGNPDRDPTDEERKTRRILLALSWLSVESKLGAPENFIVASGEESAQDRNNKVIAALEEILKSRGVAENEIDQWKKDCSASLSAAIREDAVWVNRSKAFDEAVKSVAFSLTRDEVWDMLERFFKSPTAYLDPAKGSEHEYSETEKEEKAKDIVQNAGQWLSSRFGTGKGADFSRMAEVYEKIAVWAGNAQAGTTWNEAIRNLAAALSKFSPKTNDLQGVDGLISGTGHKSRTKNLLKVLAAKSEVTIQDLEILKNNAAEDARKCFQKKGSKGHLPYSDAILRDVESVCGFTYLQNGGPARHFEFAVMLGHAARRVSLAHTWIKRAEAERRRFEEDAKKMDNVPVKTKEWLDEFIRERSGFSGALEPYQIRRRAVDGWKEVVAAWSKAVCKTAEDRIAAARALQDDPEIDKFGDIQLFEALAADDALCVWHNEGNATNAPDPQPLIDYVLAAEAEFKKRHFKVPAYRHPDPLLHPVFCDFGNSRWDIKFAVHSFSKKRGLSKNSMTESNDLHAFSMTLWTGVRMQPVSLYWQSKRLARDLAFGKYVRNEGAIAVTRADRLGRAASNTSNNDLVTIAGLFEQEYWNGRLEAPRRQLEAIARYVEKHGWDDQAEKMRDQIKWFVTFSAKLQPQGPWCAFAQKLRLSINPQYWPFADANKKRKAHAKLILSRLPGLRVLSVDLGHRYAAACAVWEALSSEEVLQACRAVGHEDPKESDLYLHLKKKVTKQKKGNPVEVEETTIYRRIGADKLPDGTPHPAPWARLDRQFLIKLQGEEEGVRQASNEEIWQVHQLEAALGRSKPLINRLISSGWGITKNQQSRIEALKKLGWCPPEQPESGDVSDADEEEITYKPPLSVDELMSSAVRTMRLALKRHGDRARIAHYLITDEKTKPGGVKEKLDANGRTEMLQDALVLWHDLFSSRSWRDDAAKQLWDEHIIKLTGDKLPEEIGEDASESERGKKKKENREKLHDAAKALAEDESLRKTLHDLWKTRWEEDDRQWKKHLRWFSDWVLPRGKAADDPAIRKVGGLSLTRLATLTEFRRKVQVGFFTRLHPDGTRAETKEQFGLSTLDALERMREQRVKQLASRIAEAALGIGSQDKRHWEGGNRPRRRINDPRFAT

SEQ ID NO: 310 - protein, 1298 aa, unidentified
  REGION 1..1298: note = Description of Unknown: uncultivated organism sequence
  REGION 1..1298: note = Category: MG37 effectors
  REGION 1..1298: note = Description: MG37-51 effector
MPKQPKPPLTQRAYTLRLRGADSNDQSWRDALWQTHEAVNRGAKAFGDWLLTLRGGLDHSLADAKVKGKSGKPDRDPTDEERKARRILLALSWLSVESKLGAPAHCIIASGTEASEDRNRKVLAALEEILRSRGVGPDEIKAWKDDCSPSLCAAIRDDAVWVNRSKAFDEAVKSIGSSLTRDEVWDMLEHFFGGRDAYLAPAKGSEDESSETEQEDKAKDLVKKAGQWLSQRFGTGEGANFSRLAKAYEKIATWADQALSGMAGDKTMADLATALSEFNPPSNDLEGVLEQIKGRGHKSATRNLLSDIAAKATVTQQDLARLKDTATKDAQESKRKAGLKGQRPYSAAILKDVEYVCGFTYLQEGGRARHDEFAVILDHAARRVSLAHTWIKRAEAERRKFEEDAKKIGQVPKAAKDWLDQFCLERSGVSGALEPYRIRRRALDGWKEVVAAWSKSDCKTVEDRIAAARALQDDPEIDKFGDIQLFEALAADDAVCVWHKDGDAAKTPDPQPLIDYALAAEAEFKKRHFKVPAYRHPDALLHPIFCDFGNSRWDICFAVHTNVQTPSPRALSLTLWTGSEMKQVPLCWQSKRLARDLAFGQDARKDGASDVTRADRLGRAASNVGKSHVVNIAGLFKQKHWNGRLQAPRRQLEAIDRYVKKHGWDQKAENMRDAIQWSVTFSARLQPRGPWYAYAKEHGLREHPRYWPHAQENKKRKGHARLILSRLPGLRVLSVDLGHRSAAACAVWEAVTAEQVKEACQAAGQRKPEESDLYLHLKKKVTKQKKGKDVEVEETTIYRRIGADTLPDGTPHPAPWARLDRQFLIKLQGEEEGVREASNEEIWAVHQMEAALGRSVPLIDRLVASGWGATEKQKARLNTLRNLGWKPLEKAEAQEVPDGGEEMSFSPSLSVDELMSSAVRTMRLALKRHGDRARIAHYLITDEKTKPGGLKEKLDEHGRIDLLVDALVMWHGLFSSRGWRDDAARQLWDEHIAKLSGYKAPEEIGEPSSGPERRNQQKENREKLYEVAKALAQDKTLRGALHDAWKKRWEEDDGRWKRQLRWFKDWILPRGKHASNPTIRKVGGLSLSRLATLTEFRRKVQVGFFTRLHPDGTRAETQEQFGQSTLDALEHLREQRVKQLASRIVEAALGVGSEDKRHWDGKKRPRQRIADPRFAPCHAIVIEDLTHYRPEETRTRRENRQLMTWSSSKVKKYLAEACQLHGLHLREVSASYTSRQDSRTGAPGIRCQDVPVKEFMRSPFWRKQVAQAEAKQAENKGDARERFLCDLNAMWKDKTVAD

SEQ ID NO: 311 - protein, 1504 aa, unidentified
  REGION 1..1504: note = Description of Unknown: uncultivated organism sequence
  REGION 1..1504: note = Category: MG37 effectors
  REGION 1..1504: note = Description: MG37-52 effector
MPPGDHSPPVTQRAYTFRLRGPDPSDQSWRDALWKTHEAVNKGAKVFGDWLLTLRGGLAHTLVEARVKKKGNSKENGEDDREPTAEERKSRRILLALSWLSVESKLGAPEKFIVATGEEAAQERSRKVIGALKEILEKRGLTTSEIEQWENDCSASLSAAIRDDAVWVNRSKAFDEVVHRVGPSLTREELWDMLGLFFASPNAYLAPVTLSEEEPLGTEQEDKAKDLVKKAGQWLSSRFGTGKGADFSHIAGVYGKLAVWAHEAQAGMTGQQAIYNLIGALNEFNPSSNDLEGLLRLISGPGYKSATRNLLGQFNNKTAITQDDLKRLAETALADKVKCETNSRPKGERAYANSILHDVESACGFTYRVDKGEQPVPVSDYSHYANDYRWGPANHSEFAVMLDHAARRVSLAHTWIKRAEAERRQFEENAKKIDKVPKVAREWLDSLCAERSIVLGALEPYRIRRRAVDGWKHVVAAWSKSDCKTAQDRITAARLLQEDPEIDKFGDIQLFEALAEDHAVCVWQRDGEAGKTSDPQLLIDYALAAEAEFKKRHFKVPAYRHPEAFWHPVFCDFGQSRWKICFDVHKNRQSRRQRACANRISRKICFDVHKKRQTLRLSLEVWTGSKMLDMPLCWQCKRLARDLALGQDHKKDRSCQVTRADRLGRAVSNVARNQEVQILGLFEQEYWNGRLQAPRPQLEALGRYIEKHGWDAKAQKSCRAIRWMISFSPRLQPAGPWGKFAEKLQLNPNPKYWPHAEDNKDRGSRSKLILCRLPGLRVLSVDLGHRYAAACAVWEAVDAEQVKEACQAAGHREPNENDLYLHLKKRTTKQKKGSQGVVEETTIYRRIGADTLPDCTPHPAPWARLDRQFLIRLQGEEDEARAASNEEVWAVHKLEAELGRTIPLIDRLLGAGWGQTEKQKARLKALRELGWTPANKCQAFNSTDETELRRPSLAVDELMLDAVGTLRLALKRHGDRARIARYLITDERTKPGGVKEKLDENGRIELLQDALIIWHGLFSSPRWRDDAAKQLWNEHIAKLVGEQNLVEVSEDASGSERRTKQKQNREKLREAAKALVDDVALRQALHDMWKRRWEEEDREWRRRLRWFKDWVLPRREQARKAYSRPAETGSSSHPKRRARYAAIRRVGGLSLTRLATLTEFRRKVQVGFFTRLKPDGTKAEAKEGFGQSTLDALEHLRAQRVKQLASRIVEAALGVGRIRRFPGVKNPKRPDTPVDKPCHAIVIENLTHYRPEETRTRRENRQLMTWSSSKIKKYLAEACQLYGLHLREVTAAYTSRQDSRTGAPGLRCQDVPVKEFMRSLFWRKEVAQAEKKLTAGKGSSYERLLCELNQRWKDNSPGDGKRAELLRLPHKGGEIFVSAAPDSPAARGLQADLNAAANIGLRALTDPDWPGKWWHVPCNAVTFRPVEDKVKGSAAVKLDQSLRQVAHPQSKDPGAKKSKEIVNLWCDISSLPLEHREWKLDWEPYPAYWNNVQCRVIRVLQGKV

SEQ ID NO: 312 - protein, 1477 aa, unidentified
  REGION 1..1477: note = Description of Unknown: uncultivated organism sequence
  REGION 1..1477: note = Category: MG37 effectors
  REGION 1..1477: note = Description: MG37-53 effector
MPQQAKPPVTQRAYTLRLRGADPSDTSWRKALWQTHEGVNKGAKAFGDWLLTLRGGLDHTLADAKVKSGKGKPDRDPTDEERKGRRILLALSWLSVESERGAPEGYIIASGKEAAEDRNGKVVAALEDILKSRGLADTEIAEWKKDCSASLSAAIRDDAVWVNRSKAFDEAAKSVGCSLTREEVWDMLERFFGSREAYLAPAKGSEDDSSETEQEDKAKDLVQKAGQWLSSRFGTGTGADFRRMADVYGKIAAWADKAPAGMTGAKAIEDLATALRQFNPASNDLTGVLGLISGPGYKSATRNLLNQLAAQTTVTQQDLAYLKDKATDDAQKCKQNTGSKGRRPYSDAILKDVESVCGFTYLQKDGPARHSEFAVILDHAARRVSLAHTWIQRAEAERRRFEEDAQKMANVPGPVKDWLDSFCAERSQASGALEPYRIRRRAVDGWKDVVAAWSKSSCRTSADRIAAARALQDDPEIDKFGDIQLFEALAEDDAACVWHKEGDAAKSPDPQPLMDYVLASEAEFKKRHFKVPAYRHPDALLHPVFCDFGKSRWDICFDVHKNVQTPFPRAVCLTLWTGSEMKPVPLCWQSKRLARDLALGQGGQKDGTSEVTRADRLGRAASNVTKSAEVKISGLFEQADWNGRLQAPRQQLEAIAAVRDNLSLSDQERERRMSGMMDRIRWLVTFSAKLQPQGPWCEYAERHGLRTDPRYWPHADTNKDRKGHARLILSRLPDLRVLSVDLGHRYAAACAVWEAVNAEQVTEACRAAGHEAPKASDLYLHLKKKVTKQKKGKPVDVEETTIYRRIGADTLPDGAPHPAPWARLDRQFLIKLQGEEEEVREASNEEIWAVHQLEKELGRVTPLVDRLVTSGWGGTDKQKARLEKLKQLGWSPAKEDKPESDESSDDMESDGYKSSLSVDELMSSAVRTLRLGLKRHGDRARIAHCLVTDEKTKPGGIKEKLDENGRVDLLQDALVLWHDLFSSRGWRDDAARQLWDEHVAKLSGYKAPEEIVEESSGPERKKKQKENREKLYDVAKAMAQDMTLREALHDAWKKRWEEDDERWKKRLRWFKDWVLPRGKHASDPTIRKVGGLSLPRLATLTEFRRKVQVGFFTRLQPDGTRAETKEQFGQSALDALEHLREQRVKQLASRIAEAALGIGSEARKHCDQGKRPRQRIDDPRFAPCHAVVIEDLTHYRPEETRTRRENRQLMTWSSSKVKKYLAEACQLHGLHLREVSAGYTSRQDSRTGAPGIRCQDVPVKEFMRSPFWRKQIAQAEKKQAEGKGDARERFLRELNAMWKDKTVADWEKAGVIRVPVRWGEIFVSASRDSQGAKSLQADLNAAANIGLRALTDPDWPGKWWYVPCEPASFRPVKDKVDGSAVVNPDQALRRSAQAQSGDAAKDKKKRGNKGGGKSKEVVNLWRDISSSPLECIEFGEWKEYAAYQNEVQCQVIRVLKEQIEGRDKQPHEGSKEDDISF

SEQ ID NO: 313 - protein, 1011 aa, unidentified
  REGION 1..1011: note = Description of Unknown: uncultivated organism sequence
  REGION 1..1011: note = Category: MG37 effectors
  REGION 1..1011: note = Description: MG37-54 effector
MPQQPTTQRAYTLRLRGADPNETSWREALWQTHEAVNKGAKVFGDWLLTLRGGLDHALADTKVKGKKGKPDRDPSAEERKARRILLALSWLSVESKLGAPADFIIASGEETAEARNAKVIAALEEILRSRDVAEEAIGDVTKKPEDQPGTWIGDCAPSLTAAIREDAVWVNRSKAFDEAVKSIGSSLTREEAWDMLERFFGSRDAYLAPAKGSEDESSETEQEDKTKDLVQKAGQWLSSRFGTGKGADFCRMADVYKKIAEWADNAQADTTGNDAINNLAAFLSEFNPASNDLKGVLGLISGPGYKSATRNLLTQIAAKATVTQQDLARLKDTATEDARKCYQNTGSKGQRRYADSILKDVESVCGFTYLQEGGPARHSEFAVILDHAARRVSLAHTWIKRAEAERRKFEEDAKKIGQVPKAAKDWLDQFCLERSGVSGAQEPYRIRRRAVDGWKEVVTAWSKADCKTAEDRIAAARALQDDPEIDKFGDIQLFEALAEDDAVCVWHKDGDAAKTPDPQPLIDYALAAEAEFKKRHFKVPAYRHPDALLHPIFCDFGKSRWDICFDVHKNTKTPFPRTLCLTLWTGSEMVSVPLCWQSKRLARDLALDHGRQDLGSPKVTRADRLGRAASNVTENDEVKIAGLFEQADWNGRLQAPRQQLEAIARYVAKNGWDEKAKKMRDAIQWLVTFSAKLQPNGPWCAYAEEHNLNKDPQYWPHADTNKDRKSHARIILSRLPGLRVLSVDLGHRYAAACAVWEALSDKAFKEDLEGKKIIRGGTSDNSLYCHTEHEVNGKKHITIYRRIGADTLPDGTPHPAPWARLDRQFLIKLQGEEEGVREASNEEIWQVHQMECTLGRKTPLIDRLVAAGWGSTEKQKARLDALKNLGWKPVEKAETSEDADTEEEELSFRPSLSVDELMSSAVRTMRLGLKRHGDRARVAYYLITDEKTKPGGIKEKLDENGRIDLLQDALVIWHDLFSSRGWRDDAAKRLWDENIARLCGYKAPEEIGENA

SEQ ID NO: 314 - protein, 1461 aa, unidentified
  REGION 1..1461: note = Description of Unknown: uncultivated organism sequence
  REGION 1..1461: note = Category: MG37 effectors
  REGION 1..1461: note = Description: MG37-55 effector
MPQQPTTQRAYTLRLRGADPNETSWREALWQTHEAVNKGAKVFGDWLLTLRGGLDHALADTKVKGKKGKPDRDPSAEERKARRILLALSWLSVESKLGAPADFIIASGEETAEARNAKVIAALEEILRSRDVAEEAIGDVTKKPEDQPGTWIGDCAPSLTAAIREDAVWVNRSKAFDEAVKSIGSSLTREEAWDMLERFFGSRDAYLAPAKGSEDESSETEQEDKTKDLVQKAGQWLSSRFGTGKGADFCRMADVYKKIAEWADNAQADTTGNDAINNLAAFLSEFNPASNDLKGVLGLISGPGYKSATRNLLTQIAAKATVTQQDLARLKDTATEDARKCYQNTGSKGQRRYADSILKDVESVCGFTYLQEGGPARHSEFAVILDHAARRVSLAHTWIKRAEAERRKFEEDAKKIGQVPKAAKDWLDQFCLERSGVSGAQEPYRIRRRAVDGWKEVVTAWSKADCKTAEDRIAAARALQDDPEIDKFGDIQLFEALAEDDAVCVWHKDGDAAKTPDPQPLIDYALAAEAEFKKRHFKVPAYRHPDALLHPIFCDFGKSRWDICFDVHKNTKTPFPRTLCLTLWTGSEMVSVPLCWQSKRLARDLALDHGRQDLGSPKVTRADRLGRAASNVTENDEVKIAGLFEQADWNGRLQAPRQQLEAIARYVAKNGWDEKAKKMRDAIQWLVTFSAKLQPNGPWCAYAEEHNLNKDPQYWPHADTNKDRKSHARLILSRLPGLRVLSVDLGHRYAAACAVWEALSDKAFKEDLEGKKIIRGGTSDNSLYCHTEHEVNGKKHITIYRRIGADTLPDGTPHPAPWARLDRQFLIKLQGEEEGVREASNEEIWQVHQMECTLGRKTPLIDRLVAAGWGSTEKQKARLDALKNLGWKPVEKAETSEDADTEEEELSFRPSLSVDELMSSAVRTMRLGLKRHGDRARVAYYLITDEKTKPGGIKEKLDENGRIDLLQDALVIWHDLFSSRGWRDDAAKRLWDENIARLCGYKAPEEIGENASGVERKTKQKENREKLHGVAKALAQDVTLRKALHDAWKKRWEEDDGRWKKQLRWFKDWVLPRGKHASDPTIRKVGGLSLTRLATLTEFRRKVQVGFFTRLHPDGTRAETGEKFGQSALDALEHLREQRVKQLASRIVEAALGIGRMKRPAKGKDPKRPEVRVDEPCHAIVIEDLTHYRPEEVRTRRENRQLMDWASSKVKKYLSEACQLHGLHLREVSAAYTSRQDSRTGAPGIRCEDVPVKDFLNLPFWKKEVKSAESKDDAQSKYFIALCEKASVMTEEEKKKTSFRIPRRGGEIFVSADETSPASKGLQADLNAAANIGLRALTDQDWPGKWWYVPCDPVSFLPVKDKVEGSKAVKLDQPLLAQEQSGDGAKDKKKRGKKGAGKSKEVVNLWRDVSSREISPEDVAWEYYSAYQNKVQSRVISILKEQMKDRDRQPHEGSKEDDIPF

SEQ ID NO: 315 - protein, 1284 aa, unidentified
  REGION 1..1284: note = Description of Unknown: uncultivated organism sequence
  REGION 1..1284: note = Category: MG37 effectors
  REGION 1..1284: note = Description: MG37-56 effector
MPSRTSPRAYTMKLAPVSSAGADDWQLPLVRTHEKFNAAVRYWADFLLTLCGGFRPADVPAPEGDGQDRMQTRYRRIFLALSWLRVESQDPLNEDYRVRPDQLRDMLAEILTDRGLDAQVIGSWQEECSQIFSSPIRPEACWVNRARMFDERFRGLSDAERAQIFSDVIFRFVGADVYWAPPEEDAGGRARNDYIKPARAWLSERTGTGKGRDFARIAENKERIAGWAATAPAGLGIQQLRQDLAAAMGWETSLEAFRNGITHVQSNGPPPRSVRLLRDLADGMPIDLRELEKACREEADRDRKKVGRKGRTPWAERLWAEYCTRIQAPLQIDFNAPALSEAAIRVFSNWSWIKRSVSEREQASSGRELISQVPLEARTFLDEYCQRRAEETGAIAQFRIRRRAIAGWEDIVRAWSQEACRTLDDRQAAVAAAQADTPESFGDARLFLDLAADQARCVWQPYGTPDHHILVRYVQAREAEAVYMARKVPMFRHPDPWRHPAFVQFGNSRPRVRYVRPADSPDGRGLVELQLVDAGSGKLRYVRFRWRSKRVLKELLGADQGQVSTGAPPVPRIHRLALAAAGIASPEHASVKVFEGKAEWNARLQFPRGRHGRSTPGRSWLLTLSAQLSPLQKAAPAPATDPRGQGARLRFSRQPEGLRILGVDLGQKAAAACAVWETVSRESLERECRLRRVCAPSPEDLHFEIPDECGRQRHYRRIASDFLPDGQTPHPSPWARLERLFLIRLPGEDEAARPLLKHENEEIARFGGQIGFGPLRERRVDKQMRHCLREARLYLRRLGNLAKLSWDLQHSEWGRSAERWLDLARTDTPLGRWSAQMWREATGEPPPVGGAGGRAGSSPPADASRLLEARLAGKGAIWAETVAARFEEERQLARELVRWLRRWVAPQGTRGKANRSVGGVSMLRINNLTDLYRVEKMWATLPQPDLKDSRTVPQEFCAKLLLIRDQLRETRVRLIASRILEAAVGLGMEPERRKGEPLARRLAAPPPDPRHRRCDVIAIENLSGYGTSDSRPRRENRGLMNWSKERIRKRLLEGAELLGLRVEEVLPNYTSRQDFRTGAPGIRGRMVKAGRLAQLKTWERLLQRAADRNDPVAQYVRTLASNLERIPDSAMVFVPEDGGDIFVPDTDASPAGGIHADMNAAANIGLKAVLDPDWAGAWWYVPVRPDTGRPDTAERLRGCRAPGLDRMRVDLPGSGDPIRNAWRHPSSQPLHLSQWQPYAEYWENVKRAALRRQLERLFSSPSFAASPTGPRTWPAAPLTDPSQL

SEQ ID NO: 316 - protein, 1142 aa, unidentified
  REGION 1..1142: note = Description of Unknown: uncultivated organism sequence
  REGION 1..1142: note = Category: MG37 effectors
  REGION 1..1142: note = Description: MG37-57 effector
MSQQTQLPPTQRAYTLRLRGTDFFDWSWRDALWHTHEAVNRGAYKFGDWLLTLRGGLDHSLANARGKGKSKDNQSVCELTNEERRTRRILLALSWLSVESMLGAPEQFIVATGQEAAKDRSAKVIKALEGILSKRGLEEKEIEEWKNDCAASLSADIRDDAVWVNRSEAFDEAVKRIGSSLHREEVWDMLERFFGSRNAYFAPAKNAESENESGKAQQEEKAKDLVQKAGQWLSSRFGTGKGANFSRMAKVYGKIVGWADMAPQNVNGSNAIASLAESLSEFTPAPNDLPDVLGLISGPGYKSATRELLKKIADKDNVTQADIEALRKKAASDVEKCNQNTGSKGQKAYSDAILNDVECACGFTYLQKGDSARHSEFAVMLDHAARRVSLAHTWIKRAEAERSKFEEDAKKINQIPKPAKDWLDQFCLERSGALGALEPYRIRRRAIDGWKEVVTAWSKKDCKTTEDRIAAARALQDDPEIDKFGDIQLFEALAADDAQCVWLKDDGTPNPQILIDYTLATEAQFKKRIFKVPAYRHPDPLLHPVFCDFGCSRWKIDFSMREAATKLSVVEAKLKKKQVAVQNAEQLLEKCRGQGERQNKAEERLREAQEELQKVQRELEYLRSPQLLKMTLFNSTELKEYVLGWQSKRLFKDLVVEKQASNDNSKKITRADRLGRAAGNASVDSPIEILHIFEEQEWNGRLQAPRQQLEALARYVKKHGWDSKAEKMRDNIKWLITFSARLQPQGPWCEYAREKNSFGLKDDPKFWPHTATNKTRKGLAQIILSRLPGLRVLSVDLGHRYAAACTVWESLSTEVFRKDIEGRKILCGGTDANALYCHTEHETNGKKHTTIYRRIGADTLPDGTPHPAPWARLDRQFLIKLQGELEGTREASNKEIWTVHQMEAAFGRAQPLIDRLVAAGWGNTEKQKSRLEALKNLGWVSVSQNEILGELDVEEQTNRYEPSLSVDELMLSAVRTLRLGLKRHSDRAKIAHYLITDEKTKPGSVKEKLDENTRIELLQNALVIWHNLFSSRAWNDGAAKKLWDEHIVKLSGHTTPDDISEDSPENKGTIKQKEKQKKLYDVAKALSQELAIRKFLYNAWRKRWEEDDEMWKKELRWFKDWVLPPAKILLVRKSSVVYSFSG

SEQ ID NO: 317 - protein, 1479 aa, unidentified
  REGION 1..1479: note = Description of Unknown: uncultivated organism sequence
  REGION 1..1479: note = Category: MG37 effectors
  REGION 1..1479: note = Description: MG37-58 effector
MSQQVKPPVTQRAYTLRLRGIDPSDTSWRKALWQTHEGVNKGAKAFGDWLLTLRGGLDHTLADTKVKGGKGKPDRDPTDEERKARRILLALSWLSVESKLGAPVGFIIASGTEAAEDRNRKVVAALEEILKSRNVATNEIDQWKNDCSASLSAAIRDDAVWVNRSKAFDEAVKSIGSSLTREEAWDMLERFFGSRDAYLAPAKGSEDESSETEQEDKAKDLVQKAGQWLSSRFGTGKGADFCRMANVYGKIAAWADNAQADTTGNDAINNLAAALNEYSPEPNDLKGVLGLISGPGYKSATRNLLNQLAAKATVTQQDFVSLKDKASNDAQKCKQNTGSKGPRPYSDAILKNVESVCGFTYLQDGGPARHSEFAVILDHAARRVSLAHTWIKRAEAERRKFEEDAKKIDQVPKAAKDWLDSFCLERSGASGALEPYRIRRRAVDGWKEVVAAWSKADCKTAEDRIAAARALQDDPEIDKFGDIQLFEALAEDDAVCVWHKDGDAAKPPDPQPLIDYALAAEAEFKKRHFKVPAYRHPDALLHPVFCDFGNSRWDICFDVHKNVQTPFPRALSLTLWTGSGMVSVPLCWQSKRLARDLALGQNAQNDGSSEVTRADRLGRAASNVTKSDEVKISGLFEQEDWNGRLQAPRQQLEAIAAVRDNLSLSDQERERRMSGMIDRIRWLVTFSAKLQPQGPWCEFAEKIQIGINPQYWPHADTNKDRKGHARLILSRLPGLRVLSVDLGHRYAAACAVWEAVNAEQINVACRAAGHREPKASDLYLHLKRKTTKQKKGDQVEFKETTIYRRIGADTLPDGTPHPAPWARLDRQFLIKLQGEEEGVRAASNEEIWAVHRLEVELGRTAPLIDRLVKAGWGQSGKQKTRLDALRNLGWAPANEVQGSDEMDEGEVHKPSLSVDELMSSAVRTMRLALKRHGDRARIAFAMTAAYKPMPGDRKYYFTEAKDASANEDATARNGKHIEFIQDALLLWYGLTSSRGWRDDAARQLWDDHIAKLSVYKAPEEIGEDASGVERKTKQKENREKLHDVAKALAQDVNLRKVLHNAWKKRWEKDDERWKKQLRWFKDWVFPRGKHASDPAIRKVGGLSLPRLATLIEFRRKVQVGFFTRLQPDGTRAETKEQFGQSALDTLEHLREQRVKQLASRIVEAALGIGRVRRPLGGKDPKRPDVRVDEPCHAIVIEDLTHYRPEETRTRRENRQLMTWSSSKVKDYLSEACQLHGLHLREVSASYTSRQDSRTGSPGIRCQDVPVKEFMRSPFWRKQVAQAEKKGDAHERFLCELNAMWKDKTVADWEKAGAVRVPLKGGEVFVSADRISPSAKGLQADLNAAANIGLRALTDPDWPGKWWYVPCEPASFRPAKDKVDGSAVVNPGQPLRQSAQAQSGDAAKDKKKRGNKGAGQSKEVVNLWRDISSSPLECIECGEWKEYAAYQNEVQYRVIRILEEQIKGRDRQPHEGSREDDIPF

SEQ ID NO: 318 - protein, 1518 aa, unidentified
  REGION 1..1518: note = Description of Unknown: uncultivated organism sequence
  REGION 1..1518: note = Category: MG37 effectors
  REGION 1..1518: note = Description: MG37-59 effector
MTELQTQRAYTLRLKGIDEKDQSWRDALWKTHEAVNKGAKVFGDWLLTLRGGLDHTLADAEIPGEKGKPDRAPTQEERKHRRILLALSWLSVESERGAPEEFIVATGKEPAATRNDKVIAALKDILRGRNLTEEKISEWTEVCTPSLSAAIREDAVWVNRSRAFDEAVKRIGSSLTREEVWDMLECFFGSRNAYLAPVKISEDESSDGEQEEKAKDLVQKAGQWLSSRFGTGEGADFAKMAAVYAKIAAWAGNAQAGTTGNEVINNLATALREFTPKSNDLKGVLDLISGPGYKSATRNLLKQIANTKTVTREDISKLQETAGEDSEECATKTGSKGKRAYADAILKDVESVCGFTYRIDKDGQPVSVADYSKYDEDYKWGSSRHKEFAVMLDHAARRVSLAHTWIKRAEAERRKFEEDSKKIMQVPQAAKDWLDAYCAQRSEASGALEPYRIRKRAIQGWKEIIASWNKPDCKTAEDRIAAARQLQDDPEIEKFGDIQLFEALAEDDAQCVWKKEDGTLDPEILINYTLASEAMFKKQHFKVPSYRHPDAFLYPVFCDFGNSRWELDFSIREAATKLKEIEAKIEKQRQEVHKVQQALEKCENDEKRPKMEERLKEAQKKLQESQNYGEYLHSNNKITMVLFDGTFVKKHIFAWQSKRLTKDLALYQEPSADPKNVVSRADRLGRAVASVGINDAVKVAGLFEQENWNGRLQAPRQQLEAIAQYVEKHGWDNKAEKMRASIKWFITFSAKLQSKGPWNEFARKHGLKEDPHYWPHAEKNENRTAHSRLILSRLPGLRVLSVDLGHRYAAACAVWEALGSEAFKKDIEGKRIIRGDTDENALYCHTEHEANGKKHITIYRRIGADTLPDGAHHPAPWARLDRQFLIKLQGEDEQAREASNEEIWKVHQLENTLGRRTPLIDRLIAGGWGYTEKQKARLEVLTNLGWCPTNKTDNQEEGDEEETAILSKPSLLVDDLMFSAVRTLRLALKRHGDRARIAHYLITDEKTKPGGVKEKLDKNGRVELLLDALGLWHDLFSSPGWHDEKAKQLWNAYIAGLLPEGELQQAKSVTTSAALGGQQKKEKKEKLRAVAEALYLNSDLCHSLNEVWRKRWEEDDKQWRIYIRWFKDWIMPRGANAKSPAIRHVGGLSLTRLATLTEFRRKVQVGFFTRLHPDGTKTETREDFGQKTLDTLEHLREQRVKQLASRIVEAALGIGSEDKRHWDGKKRPRQRIADPRFVPCHAVVIENLTHYRPEETRTRRENRQIMEWASSKVKKYLSEICQLHGLHLREVSAAYTSHQDSRTGAPGIRCQDVSLIEFMKSPFWRKQVAQAEKKQKEGKGDAVERYLCELNQKWKGASEEEWRKAGFVRIPLRGGEIFVSAAGHDSPAAKGIHADLNAAANIGLRALLDPDWSGKWWYVPCNSSTMCPARDKVTGSAAVNPGQPLQVSAQLESDDAAKDTKKRKKKGDGKSKEIINLWRDISSYPLEDTRGGTWSNKTVYWNRVQSNVVHILQNQMKG

SEQ ID NO: 319 - protein, 766 aa, unidentified
  REGION 1..766: note = Description of Unknown: uncultivated organism sequence
  REGION 1..766: note = Category: MG37 effectors
  REGION 1..766: note = Description: MG37-60 effector
MVTGARWPLSPKKSLSDLSAVRGQDHILSRIPGLRVLSVDLGHRYAAACAVWEAISTRQFQQNIEGKKILRGGTDAESLYCHTEHTTDGKKHTTIYRRIGADTLPDGTPHPAPWARLDRQFLIKLQGEEEDSREASNEEIWQVHQMEVELGRRTPIIDRLVASGWGTTERQKARLATLKNLGWKPVEVAGAQEDADAEEEETSFRPSLSVDELMSSAVRTMRLALKRHGDRARIAHYLITDEKTKPGGIKENLDENGRIELLQDALVIWHDLFSSRGWRDDAAKRLWDEHIARLCGYKAPEEIGENASGVERKTKQKENREKLHGVAEALAQDVTLRKALHDAWKKRWEGDDGRWKKQLRRFRDWVLPRGKHASDPTIRKVGGLSLPRLATLTEFRRKVQVGFFTRLHPDGTRAETKERFGQSALDALEHLREQRVKQLASRIAEAALGIGRMRRPVGGKDPKRPDVRVDEPCHAIVIEDLTHYRPEETRTRRENRQLMTWSSSKVKKYLAEACQLHGLHLREVAASYTSRQDSRTGAPGIRCQDVPVNEFMRSPFWRKQVKQAEAKQAENKGDARERFLCDLNTMWKDKTVADWEKAGVIRVPVRGGEIFVSASQDFQGAKSLQADLNAAANIGLRALTDPDWPGKWWYVPCEPASFRPVKDKVDGSAVVNPDQPLRQSAQAQSGDAAKDKKKRGDKGAGKSKEVDNLWRDISSSPLEWIEFGEWKEYAAYQNKVQSRVIRILEEQIKGRDKQPHEGSKEDDIPF

SEQ ID NO: 320 - protein, 758 aa, unidentified
  REGION 1..758: note = Description of Unknown: uncultivated organism sequence
  REGION 1..758: note = Category: MG37 effectors
  REGION 1..758: note = Description: MG37-61 effector
NRHSYLEMDTVASATNGDSETDTEESKAASSDEKAKDLSQKAGQWLSSRFGTGPGADFSRFSKVYEVLATACRSIAPEVSGVEAINRLAIAIKKCSPSSNDIEGILGLISGPGYKSATRNILQQINRLQSVSEQDLSRLCDACEKDASQSRQKVGGKGSRPYADAILQDVERTCGICYARTEDHPSRHWQYAVILDHAARRVSMAHSWIKRAEEQRSKFEIEKNKLLRVPRDALAWLAAFCAKRSSDSGANDAYRIRRSAVDGWKQVVAAWAALPAKSEIAGSELRSDAERARIQVARELQDTVEKFGDIQLFEALAIREAKCVWMPDGKPDAQPLLDYVFGTDAIAKKQRFKVPAYRHPDAFLHPVFCDFGNSRWSIDYAVHRAPGKLTKARQLLEKKSAEISKAELALGKMDDALRHAAISETLQNLRAAYKQQQAEVAWLKTLQAITMGLWDGNGIQDTQLLWRSKRFGANIGQPDAVHPSPVSRADRFGRAVALAEDNVPVIPSGLFDLPEWNGRLQAPRRQLEAIAAMRDSAKLSAGEKQQLVAKRIHSIRWLVTFSAKLQSHGPFITYAEQHGFDWRYGMHGFENKSRQGLAKLILCRLPGLRILSVDLGHRYAAACAVWETLSTGQIQKSCGVAGMEAPGPRTLYLHLKQIVDGKEKKTIYRRIGADTLPDGSPHPAPWARLDRQFLIKLQGEDRDARPATSEEIAAVEHMENELGVVRQLKRKGRELLVDELMSDTLRTLRLGLRRHGER

SEQ ID NO: 321 - protein, 952 aa, unidentified
  REGION 1..952: note = Description of Unknown: uncultivated organism sequence
  REGION 1..952: note = Category: MG37 effectors
  REGION 1..952: note = Description: MG37-62 effector
PAYRHPDPLLHPVFCDFGCSRWQICFDVRKNVRTTSPRRLCLTLFTGSGMELVPFSWQSKRLARDLALEQRHRNPEASEVTRADRLGRAAAGVSAGGAVSIKNIFNEENWNGRLQAPRSQLAAIAARVDKHGWDAKALRMLDRLRWLITFSPRLEPTGPWIEYALRIPDDAAAKPFLSRKNGFAVLHRSNDDRKGLAKLILSRLPGLRVLSVDLGHRYAAACAVWETLSADQVREACQAAGHDGPTECDLYLHLKKDGRTVIYRRIGADTLSDGTPHPAPWARLDRQFLIKLQGEEHKAREASNAEIWAVHQMEAALGRSVPLIDRLVASGWGQRTEGQRARLEALKQLGWRPVTKKSASDDESQWQAACHEGVTPEAEKSASDDEYKPSLSIDELMSSAVRTMRLALKRHGDRARIAHYLITDEKTKPGNVKEQLDENGRIELLQDALVLWHDLFSSKGWQDNKAKELWYVHIATLPEYKAFQSSGEGHAGPERRGKPEEDREKLGVVAQALAPNVTLREALHNAWKKRWEEDDARWKALLRWCKDWILPRGEAANSPAIRKVGGLSLIRLATLTEFRRKVQVGFFARLRPDGKKAETGEKFGRKTLDALEELREQRVKQLASRIAEAALGIGKEHVFPTAKEPQKKCWCGSVHRKKDPKRPRERVHSPCHAVVIENLTHYRPEETRTRRENRQLMSWSSGKVKKYLAEACQLNGLHLREVNAAYTSRQDSRTGAPGIRCQDVPVKEFMRSPFWREQVAQAKKKQAEGKGDARERFLCDLDEQWKNRSEDEWKKAGPVRVPLQGGEIFVSADGTSPAAKGLHADLNAAANIGLCALTDPDWPGRWWYVPCDPASFKPIKDKVEGSAAVKPDQALRQPAQAQRGDAARDRKKRGKVGGRSREVVNLWRDVSSRPISPNDSWQEFTPYWNDVQARVVNILRQSAGLTRGQGEP

SEQ ID NO: 322 - protein, 1018 aa, unidentified
  REGION 1..1018: note = Description of Unknown: uncultivated organism sequence
  REGION 1..1018: note = Category: MG37 effectors
  REGION 1..1018: note = Description: MG37-63 effector
PESARIQKARELQDTIEKFGDIQLFEALSLPDAKCVWLTNGKPDAQPLMDYVAGTDAVSKKQRFKVPAYRHPDAFLHPVFCDFGNSRWSIDYAVHRAPEKLARAQQLLEKKKEELTRAEQALSKASDPSKRSSIEKKLKTLNVAFKQQEAEVLWLESHHAMTMGLWNGSRIEDTPLLWQSKRFGSDIGQAGAEHPLVASRADRFGRAVVMAKDNAPVVPSGLFDLADWNGRLQAPRRQLDAIAAIHDRTDLSVEEKRQLVAKRTRTIRWLVTFSAKLQSRGPFIAYAAQHGFDWRYGAHGIENKSREGLAKLVLCRLPGLRILSVDLGHRYAAACAVWETLSAAQMQNACLEAGMEVPSQRTLYSHLKHFVNGKEKKTIYRRIGADTLPDGSPHPASWARLDRQFLIKLQGEDSDARPATCDEVVAVEQLETELGYVRPIKRKGREHLVDELMSDALRTLRLGLQRHGTRARIAFNLTATKRTRPGGIQELLDQESRIGLLTETLLEWNELYAGERWADELAMDMWNKHIQPLLGGTILQETNNQDVTPSAAKRRMQREETRKKLRPVAKQIAENDSLCRQLNVLWNTRWQIEDAAWRMRLRWMRRWLLPRGINRDPQFRKSIRDVGGLSLIRIASFKSLYQVQKAYWMRPHPDDLRRNIPERGDSSLTSFGQRVLDAMERMRENRVKQLASRIAEAALGIGDETSVNAKNGRRKRPTERSNDPRFAPCHAVVIEDLTHYRPDETQTRRENRQLMSWSSSKVKKYLGEACQLNGLYLREVPPAYTSRQDSRTGAPGLRCNDVTVAEFYTSRFWRKQVEAAEKNQKDGKKGDARERYLLSIDERIRSEANDRDVFRIPVKGGEIFVSACGQDGGSNANRKAPPGLQADLNAAANIGLRAIFDPDWEGRWWYIPCDATTICPVAKKFNGCKAVDSSKPLRIVAEKVAVSSSSIDEKRSGRKGIALTDGSRIVNLWRDPSGAPIRRDVPSNSEWQDYAEYWNKVQSRVIANLRKSYGLREI

SEQ ID NO: 323 - protein, 798 aa, unidentified
  REGION 1..798: note = Description of Unknown: uncultivated organism sequence
  REGION 1..798: note = Category: MG37 effectors
  REGION 1..798: note = Description: MG37-64 effector
QAARKLQDTIEKFGDIQLFESLSLPDAKCVWLTNGKPDAQPLMDYVAGTDAVSKKQRFKVPAYRHPDAFLHPVFCDFGNSRWSIDYAVHRAPEKLARAQQLLEKKKEELTRAEQALSKASDPSKRSSIEKKLKTLNVAFKQQEAEVLWLESHHAMTMGLWNGSRIEDTPLLWQSKRFGSDIGQAGAEHPLVASRADRFGRAVAMAKDNAPVVPSGLFDLADWNGRLQAPRRQLDAIAAIHDRTDLSVEEKRQLVAKRIRTIRWLVTFSAKLQSRGPFIAYAAQHGFDWRYGAHGIENKSREGLAKLVLCRLPGLRILSVDLGHRYAAACAVWETLSAAQMQNACLEAGMEAPSQRTLYLHLKHFVNGKEKKTIYRRIGADTLPDGSPHPASWARLDRQFLIKLQGEDRDARPATCDEVVAVEQLETELGYVRPIKRKGREHLVDELMSDALRTLRLGLQRHGARARIAFNLTATKRTRPGGIQELLDQESRIGLLTETLLEWNELYAGERWADELARDMWNKHIQPLLGGTILQETNNQDVTPSAAKRRMQREETREKLRPVAKQIAENDSLCRQLNVLWSTRWQIEDAAWRMRLRWMRRWLLPRGINRDPQFRKSIRDVGGLSLIRIASFKSLYQVQKAYWMRPHPDDLRRNIPERGDSSLTSFGQRVLDAMERMRENRVKQLASRIAEAALGIGDETSVNAKNGRQKRPTERSNDPRFAPCHAVVIEDLTHYRPDETQTRRENRQLMSWSSSKVKKYLGEACQLNGLYLREVPPAYTSRQDSRTGAPGLRCNDVTV

SEQ ID NO: 324 - protein, 917 aa, unidentified
  REGION 1..917: note = Description of Unknown: uncultivated organism sequence
  REGION 1..917: note = Category: MG37 effectors
  REGION 1..917: note = Description: MG37-65 effector
QLFEALAADDAIVVWQSDGKADPLKDYVAAKAAEDRLHRYKVPAYRHPDPLLHPVFCEFGCSRWTIKFGIHQAWQALAQARAELTKAKGILASARSEDEKMKANVRVPKAQRRQEFEQARAAQRLTMDLWTGNDIKTTEMRWQSKRMPGDLAFATALSDSPVFLPRADRLGRAAGGAALSDAPAVSGLFEQNEWNGRLQAPRPELEAIARCQDPHRKTRLRSRLNWLITFSAELQPQGPMIAFAAAHDLQIRNSPLSTAKFLHVNEPRLSTNEGRKGYARFTLPPLSGLRVLSVDLGHRYAAACAVWETISETRLAELCKAAGHRPPQPKDMALHLPGQRNGKKVKTIFRRTGPAMWARLDRQFTIKLQGEDKPSRKASTHEFEAVVRFEKELGRTRSDENPLPHDVMRLMAEAVRSARLGLRRHGDRARIAFNLTTKTKLLPGGRTEKLTPETSVELLQDTLVLWHNLRNSPTWQDDFAESCWNESIAPLLENVVLPEPPVEGAAAQTVKAFRRTLRDKLKPAAQNLAGNPQLRQKLHTLWATRWRKDDEAWRGRLRWLRDWLLPRGKAKSDASIRHVGGITLTRLATIRGLWQTQKAFALRPDPDDLRRNVPKRGASSERFGQRVLDALDHLRENRIKQLASRIVEAALGIGKEQPKVNRRDPKRPRSQVHSPCHAVVIEDLKNYRFADSRPRRENRQLMQWSARNVRRYLAEACQLYGLHLCEVFAGYTSRQDSRTGAPGCRATDLPVPDFLKRYDRLVKNAEGEERKFLEALKARWDGCTDRSKLVRILDRAGKLFVSADESSPAVKGIQADLNAAANIGLRALLDPDWPGKWWWVPCGKDGKPAEKECKGTRAFDLNLQLLPATECRGKDIVNAWRDVSADPIVPGKGMSYAEYWNRVKARVVVNLRRQAGL

SEQ ID NO: 325 - protein, 1078 aa, unidentified
  REGION 1..1078: note = Description of Unknown: uncultivated organism sequence
  REGION 1..1078: note = Category: MG37 effectors
  REGION 1..1078: note = Description: MG37-66 effector
RAEAERSRFEEDAKKVDQVPEAAKDWLNNFCLERSGLSGAQEPYRIRRRAVDGWKEVVTAWSKADCKTAEDRIAAARALQDDPEIDKFGDIRLFEALAEDDAVCVWHKDGDAAKAPDPQPLIDYALAAEAEFKKRHFKVPAYRHPDALLHPIFCDFGKSRWDICFDVHKKVQTPFPRALCLTLWTGSGMNTVPLCWQSKRLARDLALGQDAQNDGSSEVTRADRLGRAASSVAKSDEVKISGLFEQADWNGRLQAPRQQLEAIAVVRDNLSLSDQERERRMSGLMDRIQWLVTFSAKLQPQGPWCKYAQDQKLGLNIDPQYWPHAGENKNRKGQARLILSRLPGLRVLSVDLGHRYAAACAVWEAVSTETFRKEINGKNILRGGSGKDDLYCHTKHDAESKKHTTIYRRIGADTLPDGEPHPAPWARLDRQFLIKLQGEEEGAREASNEEIWAVHQMEIALGRSVPLIDRLVAAGWGCTERQKSRLEELKKLGWKPLPAAEPTGDESGEDEGADVYKPSLAVDELMSSAVRTMRLALKRHGDRARIAHYLIADKKTKPGGIKEKLDENGRIELLQDALVLWRDLFSSRGWRDDAAKQLWDDDITRLSGYKAPEKIGEDVSGVERKKKQKENREKLRDVAKALAQDVTIRGKLHDAWKKRWEEDDGRWKKQLRWFNDWIFSRGKAADNSTIRKVGGLSLTRLATLTEFRRKVQVGFFTRLHPDGARAETKEQFGQSALDAIENLREQRVKQLASRIAEAALGVGRMKRPRGGKDPKRPDIRVDEPCHAVVIEDLTHYRPEETRTRRENRQLMTWSSSKVKKYLAEACQLHGLHLREVSASYTSRQDSRTGAPGTRCQDVPVKEFMRAPFWRKQVAQAEKKQAESKGDSRERFLCGLNAMWKDKAVADWEKAGAVRVPLKGGEVFVSADRISPSAKGLQADLNAAANIGLRALTDPDWPGKWWYVPCEPASFRPVKDKVDGSAVVNPDQPLRQSAQAQSGDAAKDKKKRGNKGAGKSKEVVNLWRDISSSPLECIEFGEWKEYAAYQNEVQCQVIRILEEQIKDRDRQPHEGSKEDDIPF

SEQ ID NO: 326 - protein, 793 aa, unidentified
  REGION 1..793: note = Description of Unknown: uncultivated organism sequence
  REGION 1..793: note = Category: MG37 effectors
  REGION 1..793: note = Description: MG37-67 effector
RKEKVVAAFREILKTRLKPNVAQAEIESWVADCAESLAAQIRKDAVWVNRSAIFDRATAGWDEASARSDAHTLLSHVLSDEYLTLPTAKKSQKKNTDANDDEDQEEQEQRQSAVKASSKGAGDRTRHPFSHIFREGKPFGGAKSLVLVERWWSYLKPLVEAAGISLPPRGKAKLKGGDELQREMFSKAASRVAQIVTKQRQQEADRLERKKADAALRLMEEDESFNAALTALRTYCDDYRVMSGATGEFLLRPRQVGTGWDRVVRRWSAISEADPERAREARVEAVKEIQDSDEDKKFGDANLFFRLAEDRFTTVWCPDGNPHNADPTILDRFVKGMKARSDSERLKVAAFRHPDPYRNPIFCQFGVSRPKIHFGRLKTFTDDHAGNDPRAVGMLLWHPVSNSAKLTLLHGVSQRLDREIGAARDQVQQNTEELRAVSRRGRLGAAAGGLPNADSPARVAGVFDLKTITHRATDEEQEDADNERPETGKLKEPKWNGTLSADRRELEAIRKLIDKGDMQKANRCRQQLRWTLTVSMKMEGRGPWITFASKWEEAHGHKYQPFGAFATNDKLKGRNRLFRWQWDRDARDFVVNLTKPFENPTDAKGRDGHARLILSRLPGLRLLSVDLGHRFAAACAVWEASPLSVLKKEIKNREIIAGGTGTHDLYCHTRHIDEHRKERTTIYRRVGTDKLDDGSAHPASWARLDRQFFIKLQGEQWPARMASEAEYEYVQRLESELGRVRGNNNQLPWRVDDLMSEAVRSARLALGRHGDAARIAYAFKPDSVLLTPGGGSA

SEQ ID NO: 327 - protein, 1101 aa, unidentified
  REGION 1..1101: note = Description of Unknown: uncultivated organism sequence
  REGION 1..1101: note = Category: MG37 effectors
  REGION 1..1101: note = Description: MG37-68 effector
RTSSSFASDEYLIRRRAIDGWERVVKAWAQLGDEATRQQRIDAAREIQSNLDDNEKFGDIQLFAGFGDDDADEPRPCLADEAAVVVWLTEAGKPDPDILENYSAATVAAHNRRRFKVPAYRHPDPLRHPVFVDYGNSRWGISYSALRESQARAKLKEKLNSAATDSARQKLQEQLQALPELRSVTLDLWTGQQVESVPFRWHGKRLWKDLDLDHFGEPAANTATRADRFGRAVAGQPQAAVSIAEVFGQKDWNGRLQAPRRELDHLADLVYGKRADADFDKLARLTSGSAPHRARKALENLHWFLTTSAKLKPQGPWLDYVARGLPDGVEYRSGRNGPYLNYVVNKDRKGRARLELARLPGLRVLSLDLGHRYAAACTVWETLSTAQMEAACKAAGRPLPQADEPFIHTKQPTEALQKSGRRKGQPVTKTTIYRRIGPNLLPDGTEHPAPWARLDRQFLLKLPGEDHPARFATRTEFADFNRLRLVAGLREDTAQVIENRPDCVNRRVDQLQVDAVRITQLGLRRLGNLARVAYILTAATKPLAGGQSSTPLSREERVDYVLDALVRWQELAQSTEYTNKWAKELWSDQWAKDLWSEWVQGHFGGPQLVDVSGDTPRSERQRRSEDSRNRLRSVAEQLAAPNGAANCELHRLWSTKWQSRSDKWRVQLRWLRRIILPRIGPRPSGTDAEAHVRRRQHARAIRQMGGLSLRRLKTIRDLYQVLKAFHMRPEPDNLRKNVPEPGDDSLLNFGRRILDQLERLREQRIKQLASRIVEAALGVGSENRREHWNGRRRPSQPIADARFAPCHAVVIENLENYRPEDTRLRRENRQLMTWAARNVRKYIVEGCQLNGLHFVEVSPTYTSRQDSRTGAPGVRCEDLPRTAFANAVEVFRGNPPSSPESSTHSHREVSYIVSLLRKAEDKRNRGEPVSAREQVALSLAERIDDVPPHCGVIRLPRNGGEVFVSANPTSPSSQGLQADLNAAANIGLRALGDPDWLGSWWYLLVDAATGIPVTERIQGSTVWTERVTTSVLAHVADGQSGRRRGTKKERTAVYAFSPWHLSWGQIDRDGVWTTTKNYWPEVERRVADLLISRQTEPETPW

SEQ ID NO: 328 - protein, 840 aa, unidentified
  REGION 1..840: note = Description of Unknown: uncultivated organism sequence
  REGION 1..840: note = Category: MG37 effectors
  REGION 1..840: note = Description: MG37-69 effector
SVDLALDDLAVSDAVPVTLGSRFGRAALPSVLPVSVLNVFDEGDWNGRLQVPRSQLERIASLLAKNKVAAAKEFRQKLRWSLTFSPRLQPTGPFHDFAAQHGITPNRKGEYFPNGEQNRITKREGKAKLVLSRLPGLRLLSVDLGHRFAAACAVWESLSGPDFAKEIFGLTIESGSAEGLYLHTRHMDESGKERSTIYRRIGSDALPDGSDHPAPWARLSRQFLIKLQGEERSARKAAPTEIYSVRELEAGFGRVSEKDDLPTQVDELMSHTIRVSRLALRRHGDRARIAFAMISSYKPMPGDRKYNFFPNDTSDGFDDTPEQRHRKHIEFIQDALLLWHDLISSKGWQDQAAEQLWKQHIATLLGYQHPEPINRDGSGPERKKKRNENFDRLRGAAEALINNAPLRLTLNAEWKGRWESDDQDWRSHLRRLQDWARPPASKGSQAIRHVGGLSLTRLATLTEVRRKVQVGFFTRLLPNGDKARIGERFGQKTLGVIEEMREQRVKQLASRITEAALGIGRVQPGTKHDPRRPRVRVDLPCHAIVIESLRNYRPDDLQTRRENRALMEWSSGKVRKYLEEACYLYGLHLREVPPNYTSRQCSRTGLPGIRCADVPIEQFRAAPFWRKIVDSARKRISQNKGTEEDRFFCDLDETYGNDVNPQAGRVATLRLPRKGGDLFVSAPVWAQLNRKDQYGNDRVSARPNDWSSKRALQADLNAAANIGLRALLDPDFPGTWWYVPCTARDGRATQDKVKGSSCFVAENWRILSVSERSATKREVVNAWHDPSTCSLSNRLDWRETTHYWNTVRARAVEALRQFNGLPRSNSAPVHNSLESALRER

SEQ ID NO: 329 - protein, 1130 aa, unidentified
  REGION 1..1130: note = Description of Unknown: uncultivated organism sequence
  REGION 1..1130: note = Category: MG37 effectors
  REGION 1..1130: note = Description: MG37-70 effector
VMLDHAARRVSIAHSWIKRAEAERRRFEADAKRLDTVPDKAAAWLDAFVQERSGSVGGEYRIRRRAIEGWDDVLKRWGRADCKTADDRIAAAREVQADPEIEKFGDIQLFEALAADDAQCVWRLNGKVDPSPLRDYVLGHDASFRKRRFKVPAYRHPDPLRHPVFCEFGNSRWSIEYSAHKAHSKLGKVRDTVKKKKESLDKTCAQLKKARSAARPNPERIARLEARIATIRDDLQNAQKEADRLASHRGVRMRLWDGNDTVLHDLKWSSKRLVADLAIDVQHTSHPTGVTRADRLGSSASGATGDVAILNVFDEKHWNSRLQAPRAELDRIARLEDKGETRRAESLKRRLRWLITFSPRMLPYGPFIDYAARFADDAPARPVVSYNGEYIIKHADSDKRKGHAMLILSRLPGLRVLSVDLGHRFAAACAVWETLSITDFKKEVEGCDIAAGGSGEHDLYLHTLHTDVRGKQRKTIYRRIGPDVLSDGKQHPAPWARLDRQFLIKLQGEEMPARAALPAEMEFVRRLEADLGRSRDANNPLPRRVDELMSEAVRSLRLGLARHARRAKIAWALDPATRSVLGMGGAETAFRPGDENHVKLLVNALFDWHSLASDHKWSDDAARGLWNKHIVPLDDAWEINPPHLNADNRDNITRQQRRKDDETLRKRLKPIAQSLAASDRAQIHKAWCERWQRDDGMPADRSRGAPATGWHARLRQVHDWIVGRRCPGSDAPSHSWKKHVGGLSLTRLSTMRSLYRLHKSFAMRPRPDKPRGAPEKGETNAGVAKSLLDAMERMREQRVKQLASRIVEAALGVGRMKPAAGRDRKRPRSRVDEPCHAVVIESLRHYRPDELRTRRENRALMNWSASKVRKRLEEACQLYGLYLREVPASYTSRQCSRTGLPGVRCADVPVTEFLSAPWWSKAISAAKKKIDGRSTNAEARLLVDLHEKWSAANPHDRQGCTVRVPRNGGDLFVAAPPRRCASSRGSNDAATSALQADLNAAANIGLRALLDPDFWGRWWYVLCDAATGKPARDKYAGSACIDLDKQLLPPQAKADSAVRKRGRKGGGDRINAWRDVAAENGLDPAKGWQVHTAYWNDVKARVVSALRRVNGLPIPEDASSADLASQAGRG

SEQ ID NO: 330 - protein, 1282 aa, unidentified
  REGION 1..1282: note = Description of Unknown: uncultivated organism sequence
  REGION 1..1282: note = Category: MG37 effectors
  REGION 1..1282: note = Description: MG37-72 effector
VWVNRSKAFDAFDEAVKSIDRSFVWDMLERFFGSREAYLAPEKGVEDEAAEVEQEDKAKDLVQKAGQWLSNRFGTGKGADFSRMATVYQKIAEWAGKDQPERAGKEAIADLAAALNAASNDLQGVLGLISGPGYKSATRNLLKQYNEKPLLTTQDFKNLQKKATDDECKCREKTDSKGRRPYADAILKDVESACRFTYQQDGGRARHSEFAVMLDHAARRVSLAHTWIKRAEAERRRFEEDAKRMANVPGPAKEWLDTFCQERSGVLGALEPYRIRRRAVDGWKEVVTAWSKCSCRNSEDRIAAARALQDDPHIEKFGDIQLFEALADDDAARVWHKDGDCAKPPDPQPLIDYVLANDAESKKRRFKVPAYRHPDALLHPVFCDFGKSRWDIKFAVHEARKNTACKNKKKNVMRNDDSHALSMTLWTGSTVEPRLLRWQSKRLMHDLALTQDKQDGTAREVTRADRLGRAATGMRADDAVSIAGIFEQNDWNGRLQAPRAQLDAIAARVAKHGWDAKARQMRDRLHWLITFSAKLQPSGPWFEYAAQFPDDAPAKPFVSHKGDYAITHQSTGKRNYHAKLILSRLPGLRVLSVDLGHRYAAACAVWHTLSKKDFENDLRDKRIVRGGIGENDLFCHAEYERNGKTYTVVYRRIGADSIESVDKETNEVRTASHPAPWARLERQFLIKLQGEDTEARKAGPAEVAAVQELDKAVGRKPPDRRSLRVDDLMSEAVRTMRLALQRHGRRARIAFSLTAKKKLLPGGREESLTHEGRVALLADTLADWYALFTGKGWDDEWAKQQWETHFTPLLHGTALPQSPGDAEATPKARKQYQADLTERLKPVAESLAKNGSLCWKLHCLWATRWRENDVALRKHLRWLRDWILPRGKAKNDKAIRHVGGLSLTRIATIKSLYQAQKAYHMRPDPEDLRKNIPSKGDDTLRHFGRRILDVMEHLREQRVKQLASRIAEAALGIGIEHSAARKTPRRPRQRLYWKDEQGNEHGDRRFAPCHAVVIENLTHYRPEETRTRRENRQLMSWSSSKVKKYLAEACQLNCLHLREVQAGYTSRQDSRTGAPGVRCQDVPVKEFMQSPFWRKQVAQATKKLAEGKGNARERFLCDLNAKWKDKSEADWEKAGVVRLSLKGGEIFVSADANSPAAKGVQADLNAAANIGLKALLDPDWPGRWWYVPCDAKTFKPAKDKVGGSAAIDPYEPLKNALTAQDTDGPKKKRGKARKQNREYANLWRDVSSQPISADDGWRESTPYWNDVQKRVVDILRQSAGLA

SEQ ID NO: 331 - protein, 489 aa, unidentified
  REGION 1..489: note = Description of Unknown: uncultivated organism sequence
  REGION 1..489: note = Category: MG37 effectors
  REGION 1..489: note = Description: MG37-73 effector
MKAQGRVNSPAALRRLEQVLNQLRELHDACLYQWRLAENNHEPKWFDANRQQKELTLMRAHSPEHDNVLRRLQDNVIRHTAARWNKYLKDENTGRPRYKTGRFRTIALDSPQGRVIRFTATGKPVLHINSLPAIRLLTSQQIPSDRQPRAVRITLKGRMIHVRLSYQFELPERLEPTLATSPVGVDLGIALSMATSTGQTFRSPKQAYLQTQERKARRKLSKVIAAAMATGTAGFRAALDADGRQRLTKKGRPMRQLVWSSGKPTKSYLKARRRLSAITERLALLRREFRHRVTTSLIEKAAAEGRDLLAMENLQVKNMTASARGTVEKPGRNVRAKSGLNRAILQEAWGETLTMLEYKAERAGIASVRVYAQATSITCSCCGHRDPKSRTSQSRFKCTACDYQANADFNASLNIADRGMLYFQKRKGLSIEDLRQARRDESHSGGTEGPETGPAGHPASQTSQESPINASASVLTRRDPAQAESFAIF

SEQ ID NO: 332 - protein, 438 aa, unidentified
  REGION 1..438: note = Description of Unknown: uncultivated organism sequence
  REGION 1..438: note = Category: MG37 effectors
  REGION 1..438: note = Description: MG37-74 effector
MSDAVDPHLTEPYGPRTSSCATELICRDCGYRTPLLDRAFKCPACGEGLDIDYDYDRAKQLIEGRPVEGRPWNLWRFEELLPITGRRAQSRVGAFAGKTPLIHAERLGAELGLSNLYLKDDSTNRPSLSYKDRVVGMAIARLLELGKDEVGCVSTGNVGTAVASLAAQAGATPYIFYPGNMEKGKAKACRAMGAQVIQLDANYDQANRACRELAITTGMEFANITLRPFYAEGAKTMAFEVVEELGWKAPDHFVIPAAGGTLSSRVHKGLLELEKVGLAETAGSKINIAQASGCSPIATAIGAGGGEIVPQTPETAAHSLAIGAPGDGALVVDAVVSRNGSGATASDEEIFEAIDLLGATEGILTEPAGGTTIASTAKLAQEGRIAPDETVVAVISGNGLKTLHEHPEKSWPEMVPCEVGAMEEMLNDFRQAAAAALH

SEQ ID NO: 333 - protein, 497 aa, unidentified
  REGION 1..497: note = Description of Unknown: uncultivated organism sequence
  REGION 1..497: note = Category: MG37 effectors
  REGION 1..497: note = Description: MG37-75 effector
MQNCQVRTIKAQGRVNSRAALSRLEQVLDQLRELHDACLYQHRLAEKNHEPKRFDVNRQQKELTLLQADSPEQNNLLRRLQGNVIRHTAARWNKYLKESATGRPRYKTSRFRTIALDSPQGKVMRFTASGKPVLHISSLPAIRLLTSQEILDDRQPRAVRITLKGGRIQVRLSYQFEVRERQDPTLATSPIGVDLGIALSVATSTGQTFQSPKQLYLQAQERKYRRKLNRIVASAMATGTAGFRAVLDADGSQMLTRKGRPMRELVWTSGKPAKAYLKARRRLSEITERLALLRREFRHRVTTSLIEKAAAEGRDLLAMEDLQVRNMTASARGTVEKPGRNVRAKSGLNRAILHEAWGETLTMLEYKAERAGIPSVRVNAQATSITCSCCGHKDPKSRNSQSSFKCTACHYQANADSNASLNIADRGMLYFQKRKGLSIESLRQARRDAGLSGGTEGPDTGPAGQPASQNNLESPTNASKSALTGPDRGKTESLAIF

SEQ ID NO: 334 - protein, 1489 aa, unidentified
  REGION 1..1489: note = Description of Unknown: uncultivated organism sequence
  REGION 1..1489: note = Category: MG37 effectors
  REGION 1..1489: note = Description: MG37-76 effector
MPDEALVNGSTAGTDRVVVTQRAYTLRLQGVDPQDHSWRDALWKTHEAVNKGAWAFGDRLLTLRGGLDHALADAKVEGGKGKPDRDPTDEERKARRILLALSWLSVESEKGAPEKYLVPHDLDKQSGARSNWKTVDALKEILKGRGLGKSEIESWVQDCSSSLSAPIRDDAVWVNRSKAFDDAVKSVGCSLTRDEAWDMLERFFGSRDAYLAPAKGSEDESSETEQEDKAKDLVQKAGQWLSSRFGTGKGADFSRMATIYEEIANRAGKAQPGMTGDKAIADLATALSKFSPPSNDLQGVLGLISGPGYKSATRNLLLDRFRDKTPVTQEDFQNLQDKAREDAQKCKNKTGSKGHRPYADAVLRDVESVCGFTYLQDGGSARHSEFAVMLDHAARRVSLAHTWIKRAEAERSRFQEDAKKVDQVPEAAKKWLNNFCLERSRAAGALEPYRIRRRAVDGWKEVVAAWSKPDCKTTEDRIAAARALQDDPEIDKFGDIQLFEALAEDDAVCIWHKDGDPANPPDPQPLLDYVAATDAEFKKRHFKVPMYRHPDELLHPVFCDFGNSRWNICFDVHKNTKTPFPRTLCLTLWTGSEGMKPVPLRWQSKRLARDLAFGQDTRKDGASDVTRADRLGRAASNVGKNDAVNIAGLFEEKHWNGRLQAPRRQLEAIARYVEKHGWNEKAKNMRDAIQWSVTFSAKLQPKGPWCAYAKEHGLRKDPQYWPHTEVNKDRKGHARLILSRLPGLRVLSVDLGHRYAAACAVWEAISTRQFQQNIEGKKILRGGTDAESLYCHTEHTTDGKKHTTIYRRIGADTLPDGKLHPAPWARLDRQFLIKLQGEAEGAREASNEEIWAVHEMETVLGRSVPLIDRLVAAGWGSTEKQKARLDAIKKLGWVPIKRADASEDADTEEEEELAFRPSLSVDDLMSSAVRTMRLALKRHGDRARIAFAMTAAYKPMPGDHRYYFTEAKDLSANEDATARNSKHIEFIQDALLLWYGLISSRGWRDEAARQLWDDHVAKLHGYKAPEEIGEDVSGAEREKKQKENREKLYDVGKALAQNESLRKTLHHAWKTRWEEDDGRWKKQLRWFKDWILPRGKKYASDPSIRKVGGLSLTRLATLTEFRRKVQVGFFTRLKPDGTRAETKEQFGQSTLDALEHLREQRVKQLASRIVEAALGIGSENKQHWEGGKRPRARSKDPRFAPCHAVVIEDLTHYRPEETRTRRENRQLMSWSSSKVKKYLAEACQLHGLHLREVSAGYTSRQDSRTGAPGIRCHDVPVKEFMRSPFWRKQVAQAEKKQDEGKGDARERFLCDLNAKWKGQPEADWEKAGAVRVPLKGGEIFVSADQNSPAAKGLHADLNAAANIGLRVLTDPDWPGKWWYVPCDPDSFLPVKDKVEGSAVVKPDQPLPKSAQAQSGDGAKDKKKPGKRGASKSKESKKVVNLWCDISSSPLECREWKEYAAYQNEVQSRVIHILEKQIKRLRQATARGVQ

SEQ ID NO: 335 - protein, 1379 aa, unidentified
  REGION 1..1379: note = Description of Unknown: uncultivated organism sequence
  REGION 1..1379: note = Category: MG37 effectors
  REGION 1..1379: note = Description: MG37-77 effector
MKKWGKRIISGVIAASLLTAAAISGSEQGTGTVASVVQAGTETSFMGKLLEGGYIDVFTSWTQEEQNKFYDGLSPQQQSVFLEVTNCQITRELIKSERSKEELEQFFDRLQPYFLILKKGNQEKPDDEIVIECINQIEGTDYHSSEQYIKQLVSEKKDHYLEFYDALKLVKDGKLEIESAVDDFYKELGFLKKDRVPANSAEVSRQPVQVQKKAAAKAVSDRYSNFKAVSSLKALKDAVASVKKGEKIAVRVDKGFNVTSVIRTNGRHVKIYADGESGHNLNRTAGYKDVMLEVNGGSLTLGAYDGDGRAKNNLYINGKNIAASAPLIEVTSGHLYLNKYSRIIDGYFLADFAGGAGIALNSGTSCYMFGGRIDNCRAKSSKDVSSSSPKSSHGGGVLVGNGSSFYMFAGSIEHCQAIHGGGIMNYGTLRLYGGAISDCAASNQKKDALGGAVKVQGAIETNGKVSSTKGDLGVWKYTRSAAWIVNGKDGYQQGTTTGVVLKNNQADAGGAICLNNGSNGAIQDCNINGNHSTGNGAGICLSNGSYKKGAALELKTGAVIHGNESKGYGGGIYCADSVKGSLSGGTMYDNSAKYGAGIYHEAEFRMSGGTVRSNHSGNSGGGIYAKGKLSMTGGEISANTAATYGGGAILKTVGGSVSRGSIKGNSASANGGGLQIDGTVSLSNASVSSNSASGKGGGISVSSSGTCNLSSGNVSGNTAKAGGGGIYIDGTCKANGSSFTGNQSSGDGGAVYIASGTFTTFQANQAVNIQGNSASGNGSGIYNRNITVLNNNAHILNNQCKNGTQRGIFHEGSLFSIEGNTEIQQEIYLAKDRFVTASNRYFSNSNSLKAKISLDTANIRNGYAVVKGNVSNSADGNYKTGEALLNNQSAGGRFVYAGSGYVMRPGNLKKSSSGCAPFSIVLSQAYQIRYDKNSKEEVMNMPTAAVKYWEEDIKLSALTPTGGSGAFVAWNTKADGTGDGYQPGNVYTANADATLFALWPHYRVEYLPGIRSAAGTTDSQEQNKSEDILLRKNGFRSSEGKFVGWKQDISSARKRMELEPVGYKELKEEREKGKLNHILDFAESYKKVNSSENLDNINSLLDVEDIFFMEGQWDSKPDIILNDKKTFLENEKIKKNDLLKVVKGCYDEEDGELTKKVQIIKLDYTKSMKGYRPETQNFSGGMNDTDVMDTYFMKLEKDETVEVKVTFQAEDSVGNVAEKEGTVCVTYNNPPKLHSQNLAFYQKDIDNNPQTILKEIFENYQVEDIEDDKKGLKVPVSVIDPIPLQIEKLNSVGEHKIVYQAIDSLGKKTKLDSIVYIAENNPFKDSYKYNVRFINKKYLYTLKESSKWKKNEELNAQLTSQLEKTKEDAELKYEFEIKK

SEQ ID NO: 336 - protein, 437 aa, unidentified
  REGION 1..437: note = Description of Unknown: uncultivated organism sequence
  REGION 1..437: note = Category: MG37 effectors
  REGION 1..437: note = Description: MG37-78 effector
MSDAVDPHLTEPYGLRTRSCATELVCRDCGYRTPLLDKAFKCPACGEGLDIDYDYELAKKRIAERPAAERPWNIWRFEELLPILNLRAQQRVAQFAGKTPLIHAERLGAELGLSNLYLKDDSTNRPSLSYKDRVVGMAIARLLELGKDEVGCVSTGNVGTAVASLAAQAGARPYIFYPGNMEKGKAKACRAMGAQVIQLDANYDQANRACRELALETGMEFANITLRPFYAEGAKTMAFEVVEELGWQAPDHFVIPAAGGTLSSRVHKGLVELEKVGLAETTGSKINIAQASGCSPIAAAIVGGGEIEHQTPETAAHSLAIGAPGDGNLVVDAVRSRSGSAATASDEEIWNAIDLLGTTEGILTEPAGGTTIASTARLAQEGKIGPDETVVAIISGNGLKTLHEHPEKDWPEGVPCEVGAMERLLNDFRQAAATALH

SEQ ID NO: 337 - protein, 431 aa, unidentified
  REGION 1..431: note = Description of Unknown: uncultivated organism sequence
  REGION 1..431: note = Category: MG37 effectors
  REGION 1..431: note = Description: MG37-79 effector
MTEGRGDRRTRSCATELVCRGCGYRAPLLETAFRCPGCDLGLDIEYDYERAKSLISEVGLGERPQNIWRFEELLPIVSGVARARVAQFAGQTPLIRAERLGAELGLHNLYVKDDSTNRPSLSYKDRVVGMAVARALEIGAGEIGCVSTGNVGTATASLAAAAGLKPYVFYPANLERAKARGCRALGAQVCQVDGNYDEANRACRELTEATGIPFANISLRPFYAEGAKTLAYELVESLGWRSPDHVVMPAAGGTLSSRVHKGLVELETLGLAATAATKLHVGQPTGCSPIATTIVEGAEEIVPQQPETLAHSLAIGAPGDGDLVVEAVRSRGGTAAAVPDGEILEAMELLAATEGVLTEPAGGTTVAATMKLAQRGVIDPDAVTVIVISGNGLKTLSEQPVKPWPEGVPCNATTMEEVVVEFREGGVTSRT

SEQ ID NO: 338 - protein, 1379 aa, unidentified
  REGION 1..1379: note = Description of Unknown: uncultivated organism sequence
  REGION 1..1379: note = Category: MG37 effectors
  REGION 1..1379: note = Description: MG37-80 effector
MKKWGKRIISGVIAASLLTAAAISGSEQGTGTVASVVQAGTETSFMGKLLEGGYIDVFTSWTQEEQNKFYDGLSPQQQSVFLEVTNCQITRELIKSERSKEELEQFFDRLQPYFLILKKGNQEKPDDEIVIECINQIEGTDYHSSEQYIKQLVSEKKDHYLEFYDALKLVKDGKLEIESAVDDFYKELGFLKKDRVPANSAEVSRQPVQVQKKAAAKAVSDRYSNFKAVSSLKALKDAVASVKKGEKIAVRVDKGFNVTSVIRTNGRHVKIYADGESGHNLNRTAGYKDVMLEVNGGSLTLGAYDGDGRAKNNLYINGKNIAASAPLIEVTSGHLYLNKYSRIIDGYFLADFAGGAGIALNSGTSCYMFGGRIDNCRAKSSKDVSSSSPKSSHGGGVLVGNGSSFYMFAGSIEHCQAIHGGGIMNYGTLRLYGGAISDCAASNQKKDALGGAVKVQGAIETNGKVSSTKGDLGVWKYTRSAAWIVNGKDGYQQGTTTGVVLKNNQADAGGAICLNNGSNGAIQDCNINGNHSTGNGAGICLSNGSYKKGAALELKTGAVIHGNESKGYGGGIYCADSVKGSLSGGTMYDNSAKYGAGIYHEAEFRMSGGTVRSNHSGNSGGGIYAKGKLSMTGGEISANTAATYGGGAILKTVGGSVSGGSIKGNSASANGGGLQIDGTVSLSNASVSSNSASGKGGGISVSSSGTCNLSSGNVSGNTAKAGGGGIYIDGTCKANGSSFTGNQSSGDGGAVYIASGTFTTFQANQAVNIQGNSASGNGSGIYNRNITVLNNNAHILNNQCKNGTQRGIFHEGSLFSIEGNTEIQQEIYLAKDRFVTASNRYFSNSNSLKAKISLDTANIRNGYAVVKGNVSNSADGNYKTGEALLNNQSAGGRFVYAGSGYVMRPGNLKKSSSGCAPFSIVLSQAYQIRYDKNSKEEVMNMPTAAVKYWEEDIKLSALTPTGGSGAFVAWNTKADGTGDGYQPGNVYTANADATLFALWPHYRVEYLPGIRSAAGTTDSQEQNKSEDILLRKNGFRSSEGKFVGWKQDISSARKRMELEPVGYKELKEEREKGKLNHILDFAESYKKVNSSENLDNINSLLDVEDIFFMEGQWDSKPDIILNDKKTFLENEKIKKNDLLKVVKGCYDEEDGELTKKVQIIKLDYTKSMKGYRPETQNFSGGMNDTDVMDTYFMKLEKDETVEVKVTFQAEDSVGNVAEKEGTVCVTYNNPPKLHSQNLAFYQKDIDNNPQTILKEIFENYQVEDIEDDKKGLKVPVSVIDPIPLQIEKLNSVGEHKIVYQAIDSLGKKTKLDSIVYIAENNPFKDSYKYNVRFINKKYLYTLKESSKWKKNEELNAQLTSQLEKTKEDAELKYEFEIKK

SEQ ID NO: 339 - protein, 446 aa, unidentified
  REGION 1..446: note = Description of Unknown: uncultivated organism sequence
  REGION 1..446: note = Category: MG37 effectors
  REGION 1..446: note = Description: MG37-81 effector
MSTTTTQSLARGSRKRTRSCATGLRCHRCDLSYALEESVFACPQCGKGLDITYDYELAARRFEEVPRETRARNIWRFEELLPIVDASAQARVGSHGGYTPLIRADRLGAELGIANLYLKDDSTSRPSLSYKDRVVAMSVARLLELGRTEMGCVSTGNVGTAVASYAAKAGADAYVFYPNRLEDTKARACAAMGAKVCQVEGNYDEANRRCREVAESTGMEFANITLRPFYAEGAKTEAFEIVEQLEWKAPEHIITAAAGGTLSSRLHKGLGELQLLGLAETDSTRIHIAQPSGCNPISAAILAEEAEIRPITPETAAHSLAIGAPGDGYLVIDAVLKRGGTGGFASDPEIFAGVDLLAATEGLLTEPAGGTTVAVLHKMAAEGRFGADEVVVAIITGNGLKTLDDHPDKPWPAKIECELDAMLEALEELKSTAALRDRALEALAHR

SEQ ID NO: 340 - protein, 435 aa, unidentified
  REGION 1..435: note = Description of Unknown: uncultivated organism sequence
  REGION 1..435: note = Category: MG37 effectors
  REGION 1..435: note = Description: MG37-82 effector
MSDAHLGGPGGPRTSSCATELVCRDCGYRTPLLDTAFKCPACGEGLDIAYDYERAKSLIAERGLGERPQNIWRFEELLPITSRAAQQRVGQFSGHTPLIHAERLGAELGLKNLYLKDDSTNRPTLSYKDRVVSMAVARLLELGKDEIGCVSTGNVGTAVAALAAKAGATAYIFYPGNMEKGKAKACRALGAQVCQLDGNYDQANRACRELSLASGIEFANITLRPFYAEGAKTMAFEVVEELGWQAPDHFVIPAAGGTLSSRVHKGLNELETVGLAETAGTRINIAQAGGCGPIATAILGGGEIEPQTPDTAAHSIAIGAPGDGALVLDAVRTRGGSAAMATDAEIFGAIDLLGATEGLLTEPAGGTTIAATARLASEGKIGAEETVIAVISGNGLKTLQDHPEKEWPEMVACDVETMGAQLAEFRQAAAAGVAR

SEQ ID NO: 341 - protein, 1379 aa, unidentified
  REGION 1..1379: note = Description of Unknown: uncultivated organism sequence
  REGION 1..1379: note = Category: MG37 effectors
  REGION 1..1379: note = Description: MG37-83 effector
MKKWGKRIISGVIAASLLTAAAISGSEQGTGTVASVVQAGTETSFMGKLLEGGYIDVFTSGTQEEQNKFYDGLSPQQQSVFLEVTNCQITRELIKSERSKEELEQFFDRLQPYFLILKKGNQEKPDDEIVIECINQIEGTDYHSSEQYIKQLVSGKKDHYLEFYNALKLVKDGKLEIESAVDDFYKELGFLKKDRVPANSAEVSRQSVQVQKKAAAKAVSDGYSNFKAVSSLKALKDAVASVKKGEKIAVRVDKGFNVTSVIRTNGRHVKIYADGESGHNLNRTAGYKDVMLEVNGGSLTLGAYDGDGRAKNNLYINGKNIAASAPLIEVTSGHLYLNKYSRIIDGYFLADFAGGAGIALNSGTSCYMFGGRIDNCRAKSSKDVSSGSPKSSHGGGVLVGNGSSFYMFAGSIEHCQAIHGGGIMNYGTLRLYGGAISDCAASNQKKDALGGAVKVQGAIETDGKVSSTKGDLGVWKYRRSAAWIVNGKDGYQQVTTTGVVLKNNQADAGGAICLNNGSNGAIQDCSINGNHSTGNGAGICLSNGSYKKGAALELKMGAVIHGNESKGYGGGFYCADSVKGSLSGGTMYDNSAKYGAGIYHEAEFRMSGGTVRNNHSGNSGGGIYAKGKLSMTGGEISANTAATYGGGAILKTAGGSVSGGSIKGNSASANGGGLQIDGTVSLSNASVSSNSASGKGGGISVSSSGTCNLSSGNVSGNTAKAGGGGIYIDGTCKANGSSFTGNQSSGDGGAVYIASGTFTTFQANQAVNIQGNSASGNGSGIYNRNITVLNNNAHILNNHCKNGTQRGIFHQGSLFSIEGNTEIQQEIYLAKDRFVTASNRYFSNSNSLKAKISLDTANIRNGYAVVKGNVSNSADGNYKTGEALLNNQSAGGRFVYAGSGYVMRPGNLKKSSSGCAPFSIVLSQAYQIRYDKNSKEEVMNMPTAAVKYWEEDIRLSALTPASGSGAFVAWNTKADGTGDGYQPGNVYTANADATLFALWPHYRVEYLPGIRSAAGTTDSQEQNKSEDILLRKNGFRSSEGKFVGWKQDISSARKRMELEPVGYKELKEEREKGKLNHILDFAESNKKVNSSENLDNINSLLDVEDIFFMEGQWDSKPDIILNDKKTFLENEKIKKNDLLKVVKGCYDEEDGELTKKVQIIKLDYAKSMKGYRPETQNFSGGMNDTDVMDTYFMKLEKDETVEVKVTFQAEDSVGNVAEKEGTVCVTYNNPPKLHSQNLAFYQKDLDNNPQTILKEIFENYQVEDIEDDKKGLKVPVSVIDPIPLQIEKLNSVGEHKIVYQAIDSLGKKTKLDSIVYIAENNPFKDSYKYNVRFINKKYLYTLKESSKWKKDEELNAQLTSQLEKTKEDAVLKYEFEIKK

SEQ ID NO: 342 - protein, 437 aa, unidentified
  REGION 1..437: note = Description of Unknown: uncultivated organism sequence
  REGION 1..437: note = Category: MG37 effectors
  REGION 1..437: note = Description: MG37-84 effector
MSDAVDPHLTGPDGPRTRSCATELICRDCGYRTPLLDTAFKCPACGEGLDIDYDYERAKRRIEERGLEGRPGNVWRFEELLPITNLRAQQRVAQFAGKTPLIHAERLGAELGLSNLYLKDDSTNRPSLSYKDRVVGMAIARLLELGKDEVGCVSTGNVGTAVASLAAQAGARPYIFYPGNMEKGKAKACRAMGAQVIQLDANYDQANRACRELALTIGMEFANITLRPFYAEGAKTMAFEVVEELGWQAPDHFVIPAAGGTLSSRVHKGLVELEKVGLAETAGSKIDIAQASGCSPIATAIVGGGEIEPQMPETAAHSLAIGAPGDGALVVDAVRSRSGSAATASDDEIWNAIDLLGTTEGILTEPAGGTTVAATARLAQEGKIGPDETVVAVISGNGLKTLHEHPEKDWPEGVPCEVGEMERLLNDFRQAAATALH

SEQ ID NO: 343 - protein, 437 aa, unidentified
  REGION 1..437: note = Description of Unknown: uncultivated organism sequence
  REGION 1..437: note = Category: MG37 effectors
  REGION 1..437: note = Description: MG37-85 effector
MSDAADPHLSEPYGLRTNSCATELACRDCGYRTPLLDRAFKCPACGEGLDVDYDYELARKRIEDRPPAERPSNIWRFEELLPILNRRAQQQVGAFAGKTPLIHAERLGAELGLSKLYLKDDSTNRPSLSYKDRVVGMAIARLLELGKSEVGCVSTGNVGTAVAALAAQAGATPYIFYPGNMEKGKAKACRALGAQVIQLDANYDQANRACRELAITTGMEFANITLRPFYAEGAKTMAFEVVEELGWQAPDHFVIPAAGGTLSSRVHKGLVELEKVGLAETAGSKIDIAQASGCSPIAAAIVGGGEISPQTPETAAHSLAIGAPGDGALVLDAVRSRQGSAATASDDEIFGAIDLLGATEGILTEPAGGTTIASTARLAQEGKIAPDETVVAIISGNGLKTLHEHPEKSWPENVPCEVGAMEEMLNDFRQAAAAALR

SEQ ID NO: 344 - protein, 1379 aa, unidentified
  REGION 1..1379: note = Description of Unknown: uncultivated organism sequence
  REGION 1..1379: note = Category: MG37 effectors
  REGION 1..1379: note = Description: MG37-86 effector
MKKWGKRIISGVIVASLLTAAAISGSEQGTGTVASVVQAGTETSFMGKLLEGGYIDVFTSWTQEEQNKFYDGLSPQQQSVFLEVTNCQITRELIKSERSKEELEQFFDRLQPYFLILKKGNQEKPDDEIVIECINQIEGTDYHSSEQYIKQLVSEKKDHYLEFYNALKLVKDGKLEIESAVDDFYKELGFLKKDRVPANSAEVSRQPVQVQKKAAAKAVSDGYSNFKAVSSLKALKDAVASVKKGEKIAVRVDKGFNVTSVIRTNGRHVKIYADGESGHNLNRTAGYKDVMLEVNGGSLTLGAYDGDGRAKNNLYINGKNIAASAPLIEVTSGHLYLNKYSRIIDGYFLADFAGGAGIALNSGTSCYMFGGRIDNCRAKSSKDVSSSSPKSSHGGGVLVGNGSSFYMFAGSIEHCQAIHGGGIMNYGTLRLYGGAISDCAASNQKKDALGGAVKVQGAIETNGKVSSTKGDLGVWKYTRSAAWIVNGKDGYQQGTTTGVVLKNNQADAGGAICLNNGSNGAIQDCNINGNHSTGNGAGICLSNGSYKKGAALELKTGAVIHGNESKGYGGGIYCADSVKGSLSGGTMYDNSAKYGAGIYHEAEFRMSGGTVRSNHSGNSGGGIYAKGKLSMTGGEISANTAATYGGGAILKTVGGSVSGGSIKGNSASANGGGLQIDGTVSLSNASVSSNSASGKGGGISVSSSGTCNLSSGNVSGNTAKAGGGGIYIDGTCKANGSSFTGNQSSGDGGAVYIASGTFTTFQANQAVNIQGNSASGNGSGIYNRNITVLNNNVHILNNQCKNGTQRGIFHEGSLFSIEGNTEIQQEIYLAKDRFVTASNRYFSNSNSLKAKISLDTANIRNGYAVVKGNVSNSADGNYKTGEALLNNQSAGGRFVYAGSGYVMRPGNLKKSSSGCAPFSIVLSQAYQIRYDKNSKEEVMNMPTAAVKYWEEDIKLSALTPTGGSGAFVAWNTKADGTGDGYQPGNVYTANADATLFALWPHYRVEYLPGIRSAAGTTDSQEQNKSEDILLRKNGFRSSEGKFVGWKQDISSARKRMELEPVGYKELKEEREKGKLNHILDFAESYKKVNSSENLDNINSLLDVEDIFFMEGQWDSKPDIILNDKKTFLENEKIKKNDLLKVVKGCYDEEDGELTKKVQIIKLDYTKSMKGYRPETQNFSGGMNDTDVMDTYFMKLEKDETVEVKVTFQAEDSVGNVAEKEGTVCVTYNNPPKLHSQNLAFYQKDIDNNPQTILKEIFENYQVEDIEDDKKGLKVPVSVIDPIPLQIEKLNSVGEHKIVYQAIDSLGKKTKLDSIVYIAENNPFKDSYKYNVRFINKKYLYTLKESSKWKKNEELNAQLTSQLEKTKEDAVLKYEFEIKK

SEQ ID NO: 345 - protein, 1379 aa, unidentified
  REGION 1..1379: note = Description of Unknown: uncultivated organism sequence
  REGION 1..1379: note = Category: MG37 effectors
  REGION 1..1379: note = Description: MG37-87 effector
MKKWGKRIISGVIAASLLTAAAISGSEQGTGTVASVVQAGTETSFMGKLLEGGYIDVFTSWTQEEQNKFYDGLSPQQQSVFLEVTNCQITRELIKSERSKEELEQFFDRLQPYFLILKKGNQEKPDDEIVIECINQIEGTDYHSSEQYIKQLVSEKKDHYLEFYNALKLVKDGKLEIESTVDDFYKELGFLKKDRVPANSAEVSRQPVQVQKKAAAKAVSDGYSNFKAVSSLKALKDAVASVKKGEKIAVRVDKGFNVTSVIRTNGRHVKIYADGESGHNLNRTAGYKDVMLEVNGGSLTLGAYDGDGRAKNNLYINGKNIAASAPLIEVTSGHLYLNKYSRIIDGYFLADFAGGAGIALNSGTSCYMFGGRIDNCRAKSSKDVSSSSPKSSHGGGVLVGNGSSFYMFAGSIEHCQAIHGGGIMNYGTLRLYGGAISDCAASNQKKDALGGAVKVQGAIETNGKVSSTKGDLGVWKYTRSAAWIVNGKDGYQQGTTTGVVLKNNQADAGGAICLNNGSNGAIQDCNINGNHSTGNGAGICLSNGSYKKGAALELKTGAVIHGNESKGYGGGIYCADSVKGSLSGGTMYDNSAKYGAGIYHEAEFRMSGGTVRSNHSGNSGGGIYAKGKLSMTGGEISANTAATYGGGAILKTVGGSVSGGSIKGNSASANGGGLQIDGTVSLSNASVSSNSASGKGGGISVSSSGTCNLSSGNVSGNTAKAGGGGIYIDGTCKANGSSFTGNQSSGDGGAVYIASGTFTTFQANQAVNIQGNSASGNGSGIYNRNITVLNNNAHILNNQCKNGTQRGIFHEGSLFSIEGNTEIQQEIYLAKDRFVTASNRYFSNSNSLKAKISLDTANIRNGYAVVKGNVSNSADGNYKTGEALLNNQSAGGRFVYAGSGYVMRPGNLKKSSSGCAPFSIVLSQAYQIRYDKNSKEEVMNMPTAAVKYWEEDIKLSALTPTGGSGAFVAWNTKADGTGDGYQPGNVYTANADATLFALWPHYRVEYLPGIRSAAGTTDSQEQNKSEDILLRKNGFRSSEGKFVGWKQDISSARKRMELEPVGYKELKEEREKGKLNHILDFAESYKKVNSSENLDNINSLLDVEDIFFMEGQWDSKPDIILNDKKTFLENEKIKKNDLLKVVKGCYDEEDGELTKKVQIIKLDYTKSMKGYRPETQNFSGGMNDTDVMDTYFMKLEKDETVEVKVTFQAEDSVGNVVEKEGTVCVTYNNPPKLHSQNLAFYQKDIDNNPQTILKEIFENYQVEDIEDDKKGLKVPVSVIDPIPLQIEKLNSVGEHKIVYQAIDSLGKKTKLDSIVYIAENNPFKDSYKYNVRFINKKYLYTLKESSKWKKNEELNAQLTSQLEKTKEDAVLKYEFEIKK

SEQ ID NO: 346 - protein, 430 aa, unidentified
  REGION 1..430: note = Description of Unknown: uncultivated organism sequence
  REGION 1..430: note = Category: MG37 effectors
  REGION 1..430: note = Description: MG37-88 effector
MSSFAETTRSCATELVCRDCGLRLPLEDTTSKCLGCGQGLDIEYDYELAKARLAELPTAQRAINIWRFEELLPIHDATAQRRVGINSGRTPLIHADRLGAELGLRKLYIKDDSTQRPSLSYKDRVVSMAVARLLELGKDEIGCVSTGNVGTAVASLAAKAGVTAYVFYPSNLEPGKARACRALGAAVIQLDGNYDQANRACRELALASGVQFANITLRPFYAEGAKTVAYEVVEKLDWISPDHFVIPAAGGTLSSRVHKGLVELERVGLAETSATKIHAAQPDGCGPIAEAILDGSGEIKHQTPHTAAHSLAIGAPGDGSLVVDAVMSRGGSAAAVTDEEIFEAIDLLGATEGILTEPAGGTTIASTAKLANEGKLGADETVVAVISGNGYKTLDEHPEKPWPSMVSCDVESMGEMLAEFRQHGVGATFS

SEQ ID NO: 347 - protein, 1379 aa, unidentified
  REGION 1..1379: note = Description of Unknown: uncultivated organism sequence
  REGION 1..1379: note = Category: MG37 effectors
  REGION 1..1379: note = Description: MG37-89 effector
MKKWGKRIISGVIAASLLTAAAISGSEQGTGTVASVVQAGTETSFMGKLLEGGYIDVFTSWTQEEQNKFYDGLSPQQQSVFLEVTNCQITRELIKSERSKEELEQFFDRLQPYFLILKKGNQEKPDDEIVIECINQIEGTDYHSSEQYIKQLVSEKKDHYLEFYDALKLVKDGKLEIESAVDDFYKELGFLKKDRVPANSAEVSRQPVQVQKKAAAKAVSDRYSNFKAVSSLKALKDAVASVKKGEKIAVRVDKGFNVTSVIRTNGRHVKIYADGESGHNLNRTAGYKDVMLEVNGGSLTLGAYDGDGRAKNNLYINGKNIAASAPLIEVTSGHLYLNKYSRIIDGYFLADFAGGAGIALNSGTSCYMFGGRIDNCRAKSSKDVSSSSPKSSHGGGVLVGNGSSFYMFAGSIEHCQAIHGGGIMNYGTLRLYGGAISDCAASNQKKDALGGAVKVQGAIETNGKVSSTKGDLGVWKYTRSAAWIVNGKDGYQQGTTTGVVLKNNQADAGGAICLNNGSNGAIQDCNINGNHSTGNGAGICLSNGSYKKGAALELKTGAVIHGNESKGYGGGIYCADSVKGSLSGGTMYDNSAKYGAGIYHEAEFRMSGGTVRSNHSGNSGGGIYAKGKLSMTGGEISANTAATYGGGAILKTVGGSVSGGSIKGNSASANGGGLQIDGTVSLSNASVSSNSASGKGGGISVSSSGTCNLSSGNVSGNTAKAGGGGIYIDGTCKANGSSFTGNQSSGDGGAVYIASGTFTTFQANQAVNIQGNSASGNGSGIYNRNITVLNNNAHILNNQCKNGTQRGIFHEGSLFSIEGNTEIQQEIYLAKDRFVTASNRYFSNSNSLKAKISLDTANIRNGYAVVKGNVSNSADGNYKTGEALLNNQSAGGRFVYAGSGYVMRPGNLKKSSSGCAPFSIVLSQAYQIRYDKNSKEEVMNMPTAAVKYWEEDIKLSALTPTGGSGAFVAWNTKADGTGDGYQPGNVYTANADATLFALWPHYRVEYLPGIRSAAGTTDSQEQNKSEDILLRKNGFRSSEGKFVGWKQDISSARKRMELEPVGYKELKEEREKGKLNHILDFAESYKKVNLSENLDNINSLLDVEDIFFMEGQWDSKPDIILNDKKTFLENEKIKKNDLLKVVKGCYDEEDGELTKKVQIIKLDYTKSMKGYRPETQNFSGGMNDTDVMDTYFMKLEKDETVEVKVTFQAEDSVGNVAEKEGTVCVTYNNPPKLHSQNLAFYQKDIDNNPQTILKEIFENYQVEDIEDDKKGLKVPVSVIDPIPLQIEKLNSVGEHKIVYQAIDSLGKKTKLDSIVYIAENNPFKDSYKYNVRFINKKYLYTLKESSKWKKNEELNAQLTSQLEKTKEDAELKYEFEIKK

SEQ ID NO: 348 - protein, 1378 aa, unidentified
  REGION 1..1378: note = Description of Unknown: uncultivated organism sequence
  REGION 1..1378: note = Category: MG37 effectors
  REGION 1..1378: note = Description: MG37-90 effector
MKKWGKRIISGVIVASLLTAAAISGSEQGTATVSSVVQAGTEMSFMGKLLEGGYIDVFTSWSQEEQNKFYDRLSPKEKSVFLEVTNCQIIRELIKSERTKEELERLFDRLEPYFLMLKKGSQEKPDEEIVIECINQIEGKDYESLEQYLKQLVSEKHGYYLDFYTALKRVKDGKSEIQSAVNDLYKNLGFLKEDKVPAKPDKVSPLPVQVQKKAAKAVSDGYSNFKAVSSLKALKDAVASVEKGEKIAVRVDKGFNVTSAIRTNGRHVKIYADGESARNLNRAVGYKDAMLEVNGGSLTLGAYDGDGRAKNNLYINGKNVAASAPMIEVISGQLYLNKYSRIIDGYFLADFAGGAGIAMNSGTSCYMFGGKIDSCRAKSSKDVSSSSPKSSHGGGVLVGNGASFYMFAGSIEHCQAIHGGGIMNYGTLRLYGGTVSDCAASNKKKDALGGAVKVQGAIETDGKVNSTKGDLGVWKYTRSGTWAVNGKDGYQQKSTTGVVLKNNQADAGGAVCLNNGSNGAIQDCNIYGNHSNGNGAGICLSNGSYKKGAALEIKAGAVIHGNESKGYGGGIYCADSVKGSLRGGSMYDNSAVYGAGVYHEAEFRMTGGTVRNNHSGNSGGGIYAKGKLSMTGGEISSNTAATYGGGAILKNAGGSLSGGSIKNNTASVNGGGLQIDGAVSFSNVSVSSNSASGKGGGISVSSAGTCSFSSGNVSGNTSKAGGGGIYIDGTCKANGSNFTGNQSYGDGGAVYIASGTFTTFQANQAVNIQGNSASGNGSGIYNRNTAILNNNAHILNNQCKNGTQRSIFHEGSLFSIEGHTEIQQEIYLAKDRFITVSNRYFSNSNSLTARISLDAANIRNGYAAVKGNISNSADSNYKTGDALLNNQSVNGRFMYAGSGYVMRPGNLKKSSSGCVPYSIVLSQAYQIRYDKNSKEEVMNMPTAAVKYWEEDIRLSALTPSGGSGVFVAWNTNADGTGDGYQPGNVYTANADATLFALWPHYRVEYLPGIQGAAGTTDSQEQNKSENILLRKNGFRSSEGKFIGWKQDISSARKRRELEPVGYKELKEERERGKSDHILAFAKSYKKVNASVNLDNKNSLLNAEDIFFMEGQWDSKPDIILHDKKTFLENEKIRKNDLLKAVKGCYDDEDGDLTEKVQIIKLDYGTSMEGYRPEPQNFSGGMNDTDVMDTYFMKLEKDETVEVKVIFQVEDSVGNVAEKEGTVYVTYNNPPKLHSQNLAFYQKDLDNNPQTVLKEILENYQVEDLEDDKSGLKVPVSVVDPIPMQIEKLNSVGEHKIVYQAIDSLGKKTKLDSTVYIAENNPFKDSYKYNVRFINKKYLYTLKESSKWKKDGKLNAQLTSQLEKTREDAVLKYEFKIKK

SEQ ID NO: 349 - protein, 430 aa, unidentified
  REGION 1..430: note = Description of Unknown: uncultivated organism sequence
  REGION 1..430: note = Category: MG37 effectors
  REGION 1..430: note = Description: MG37-94 effector
MLNAEDRTRSCATELVCRDCGRRLPLLDTTSKCLGCGQGLDVDYDYELAKARLAEHPTAERAINIWRFEELLPIVDARAQARVGRYSGRTPLIHADRLGAELGLKKLYLKDDSTQRPSLSYKDRVVSMAIARLLELGKEEIGCVSTGNVGTAVSSLAAKAGVTAYVFYPSNMERGKARACRALGAAVCQLDGNYDEANRACRELALASGIQFANITLRPFYAEGAKTVAYEVVEQLEWEAPDHFVIPAAGGTLSSRVHKGLNELEMVGLAETSGTKINVAQPSGCGPIAAAILDGSGEIEPQTPHTAAHSLAIGAPGDGPLVVDAVMSRGGSAATATDPEIFDAIDLLGATEGILTEPAGGTTVASTIKLANEGKLGPDDTVVAIISGNGYKTLDEHPDKPWAEGVACEVDSMTEMLNEFRQHGVGATLS

SEQ ID NO: 350 - protein, 440 aa, unidentified
  REGION 1..440: note = Description of Unknown: uncultivated organism sequence
  REGION 1..440: note = Category: MG37 effectors
  REGION 1..440: note = Description: MG37-95 effector
MSTAVGRAEENQTTRSCVTELVCQKCDVKLPITDMEAFCPTCGKCLDVAYDYELAASRLREMPMSERPASIWRLSELLPIRDSRAQAQVGQFSGLTPLIPANRLGAELGLKKLYVKDDSTSRPSLSYKDRVVSTAIARLIELGKSEIGCVSTGNVGTAVASLAAKAGVTPYVFYPNRLEQTKARACRALGARVCQVSGNYDEANRECRKVAAASGLEFANITLRPFYAEGAKTMAFEIVEQLGWNAPDHIVSATAGGTLSSRLHKGLIELETVGLAQTSSTKMHIAQPDGCSPIASAIIAHQPEIQPCKPTTAAHSLAIGSPGDGYLVIEAVRSRHGSAASASDEEIFLGIDLLAATEGILTEPAGGTTIAVLKKLAEAGEIDPDAVVVAIITGNGLKTLDDHPEKTWPSMVECESESMLSVLSDFQHEQAASAGQPLPA

SEQ ID NO: 351 - protein, 438 aa, unidentified
  REGION 1..438: note = Description of Unknown: uncultivated organism sequence
  REGION 1..438: note = Category: MG37 effectors
  REGION 1..438: note = Description: MG37-96 effector
MSDAADPHLSEPYGLRTRSCATELTCRDCGYRTPLLDRAFKCPACGEGLDVDYDYELAKQRIAERPAGERPWNIWRFEELLPILNRRAQLRVAQFAGKTPLIHAERLGAELGLSRLYLKDDSTNRPSLSYKDRVVGMAIARLLELGKEEVGCVSTGNVGTAVASLAAQAGARPYIFYPGNMEKGKAKACRAMGAQVIQLDANYDQANRACRELALETGMEFANITLRPFYAEGAKTMAFEVVEELGWQAPDHFVIPAAGGTLSSRVHKGLVELERVGLAETAGSKINIAQASGCSPIASAISEGGEIVTQTPETAAHSLAIGAPGDGHLVVDAVRSREGAAATASDEEIFGAIDLLGATEGILTEPAGGTTIASTARLAQEGRIGPDETVVAIISGNGLKTLHEHPEKDWPEGVPCEVGAMEEILNDFRQAAAAAALR

SEQ ID NO: 352 - protein, 430 aa, unidentified
  REGION 1..430: note = Description of Unknown: uncultivated organism sequence
  REGION 1..430: note = Category: MG37 effectors
  REGION 1..430: note = Description: MG37-97 effector
MLNDQARTRSCATEMVCRDCGRTYPLSDTAFRCHGCGNGLDIDYDYELAKKRLGEIPPAEREINIWRFEELLPITDASAQARVGRYSGRTPLIHADRLGAELGLKKLYLKDDSTQRPSLSYKDRVVSMAVARLLELGKDEIGCVSTGNVGTSVSSLAAKAGVAAYVFYPSNMERGKARACRALGAAVIQLDGNYDQANRACRELALASGMQFTNITLRPFYAEGAKTEAYEIVEQLEWCSPDHIVIPAAGGTLSSRVHKGLNELEMVGLAETSQTKINVAQAEGCNPIATAILEEADEIEPQTPNTVAHSIAIGAPGDGALVVDAVKSRGGSAAAVTDQEIFEGIDLLGATEGVLTEPAGGTTIACTAKLANEGKLGPDDTVVAIVSGNGYKTLDEHPEKSWPEMVAPDVEAMSEVLNELRQHGVGATLS

SEQ ID NO: 353 - protein, 430 aa, unidentified
  REGION 1..430: note = Description of Unknown: uncultivated organism sequence
  REGION 1..430: note = Category: MG37 effectors
  REGION 1..430: note = Description: MG37-98 effector
MSPFAEETRSCATELVCRDCGQRLPLMDTTFKCLGCGQGLDIDYDYELAKARLGELPMSEREINIWRFEELLPILDARAQRRVGFYSGRTPLIHADRLGAELGLRKLYLKDDSTQRPSLSYKDRVVSMAVARLLELGKEEIGCVSTGNVGTAVASLAAKAGVTAYVFYPSNLEPGKARACRALGAAVIQLDGNYDQANRACRELALASGVQFANITLRPFYAEGAKTVAYEVVEKLDWISPDHFVIPAAGGTLSSRVHKGLQELEKVGLSETAATKIHAAQPDGCGPIAGAILDGSGEIQPQTPHTAAHSLAIGAPGDGPLVVDAVMSRGGSAATVTDEEIFEAIDLLGATEGILTEPAGGTTVASTAKLAAEGKFGPDETVVAVISGNGYKTLDEHPEKPWPSMVSCDVESMGEMLAEFRQHGVGATLS

SEQ ID NO: 354 - protein, 439 aa, unidentified
  REGION 1..439: note = Description of Unknown: uncultivated organism sequence
  REGION 1..439: note = Category: MG37 effectors
  REGION 1..439: note = Description: MG37-99 effector
MRRPSTPPSSPSGSRKRTRSCATGLVCHRCERNFPLEQAIFACPDCGKGLDVAYDYELAARHFAEVPRAERPLNIWRFEELLPIVGTSAQALVGSYAGYTPLIAADRLGAELGLSNLYLKDDSTSRPSLSYKDRVVSMSVARLLELGKDEIGCVSTGNVGTAVASLAAKAGVDAYVFYPSHLEAMKARACRALGAEVCQVEGNYDEVNRRCRDLAAATGMEFANITLRPFYAEGAKTAAFEIVEQLDWQSPDHIVTPAAGGTLSSRLHKGLGELQLLGLAETSATRIHIAQPSGCNPIASAILAEEAEIHAVTPETAAHSLAIGAPGDGYLVIDAVRKRGGTGGFASDPEIFAGIDLLASTEGLLTEPAGGTTIAVLEKLAAAGRFAPDDTVVAVITGNGLKTLDEHPAKPWPDKVDCELDAMLAALEELGRKPSPVAA

SEQ ID NO: 355 - protein, 444 aa, unidentified
  REGION 1..444: note = Description of Unknown: uncultivated organism sequence
  REGION 1..444: note = Category: MG37 effectors
  REGION 1..444: note = Description: MG37-100 effector
MSTQTAQSPPGAGQRTRSCATGVACHRCEKHYPLEDTVFACPGCGKGLDVVYDYELAARHFKEVPSSERPQNIWHFEELLPIVDASAQARVGLHSGYTPLIRADRLGAELGLSNLYLKDDSTSRPSLSYKDRVVSMSVARLLERGKTEIGCVSTGNVGTAVASMAAAAGVDAYVFYPNRLEDMKARACMALGAKVCQVEGNYDEANRRCREVAETTGMDFANITLRPFYAEGAKTAAFEIVEQLDWRSPDHIITAAAGGTLSSRLHKGLLELQHLGLSETDPTRIHIAQPSGCNPIATAIIAEEAEVRPVTPETAAHSLAIGAPGDGYLVIDAVLKRGGTGGFASDPEIFAGIDLLAATEGLLTEPAGGTTVAVLEKLAAAGRFAPDDTVVAIITGNGLKTLDDHPPKPWPAKVDCELDAMLAALSELKSGGSLVDSAREQLHA

SEQ ID NO: 356 - protein, 444 aa, unidentified
  REGION 1..444: note = Description of Unknown: uncultivated organism sequence
  REGION 1..444: note = Category: MG37 effectors
  REGION 1..444: note = Description: MG37-101 effector
MSTQTAQSPPGAGQRTRSCATGVACHRCEKHYPLEDTVFACPGCGKGLDVVYDYELAARHFKEVPSSERPQNIWHFEELLPIVDASAQARVGLHSGYTPLIRADRLGAELGLSNLYLKDDSTSRPSLSYKDRVVSMSVARLLERGKTEIGCVSTGNVGTAVASMAAAAGVDAYVFYPNRLEDMKARACMALGAKVCQVEGNFDEANRRCREVAETTGMDFANITLRPFYAEGAKTAAFEIVEQLDWRSPDHIITAAAGGTLSSRLHKGLLELQHLGLSETDPTRIHIAQPSGCNPIATAIIAEEAEVRPVTPETAAHSLAIGAPGDGYLVIDAVLKRGGTGGFASDPEIFAGIDLLAATEGLLTEPAGGTTVAVLEKLAAAGRFAPDDTVVAIITGNGLKTLDDHPPKPWPAKVDCELDAMLAALSELKSGGSLVDSAREQLHA

SEQ ID NO: 357 - protein, 430 aa, unidentified
  REGION 1..430: note = Description of Unknown: uncultivated organism sequence
  REGION 1..430: note = Category: MG37 effectors
  REGION 1..430: note = Description: MG37-103 effector
MLSPEDRTRSCATEMVCRDCGRTYPLLDTAFRCHGCGNGLDIDYDYELATKRLAEIPPAEREINIWRFEELLPIVDARAQARVGRYSGRTPLIHADRLGAELGLKKLYIKDDSTSRPSLSYKDRVVSMAIARLLELGNDEIGCVSTGNVGTAVSSLAAKAGVAAYVFYPSNMERGKARACRALGAAVIQLDGNYDQANRACRELALASGMQFTNITLRPFYAEGAKTEAYEVVEQLEWHSPDHFVIPAAGGTLSSRVHKGLNELEMVGLAETSGTKINVAQAEGCDPIATAILDGSGEIEPQSPQTAAHSIAIGAPGDGALVVDAVKSRGGSAASVTDAEIFEGIDLLGATEGILTEPAGGTTIASTAKLAAEGKIGPEDTVVAIVSGNGYKTLDEHPDKPWAEGVACEVEAMGEVLNELRQHGVGATLG

SEQ ID NO: 358 - protein, 437 aa, unidentified
  REGION 1..437: note = Description of Unknown: uncultivated organism sequence
  REGION 1..437: note = Category: MG37 effectors
  REGION 1..437: note = Description: MG37-104 effector
MSDAVDPHLTGPEGPRTRSCATELVCRDCGYRTPLLDTAFKCPACGEGLDVDYDYERAKEAIAERGLEGRPANVWRFEELLPITSLGAQRRVAQFAGKTPLIHAERLGAELGLSNLYLKDDSTNRPSLSYKDRVVGMAIARLLELGKDEVGCVSTGNVGTAVASLAAQAGARPYIFYPGNMEKGKAKACRAMGAQVIQLDANYDQANRACRELAITTGMEFANITLRPFYAEGAKTMAFEVVEELGWQAPDHFVIPAAGGTLSSRVHKGLVELETVGLAETAGSKINIAQASGCSPIATAIVGGGEIEPQMPETAAHSLAIGAPGDGTLVLDAVRSRGGSAATASDDEIWNAIDLLGATEGILTEPAGGTTIASTARLAQEGKIGPDETVVAVISGNGLKTLHEHPEKDWPEGVPCEVGAMEQLLNDFRQAAAAALH

SEQ ID NO: 359 - protein, 437 aa, unidentified
  REGION 1..437: note = Description of Unknown: uncultivated organism sequence
  REGION 1..437: note = Category: MG37 effectors
  REGION 1..437: note = Description: MG37-105 effector
MSEAVEPHLEGTYGSRTRSCATELACRDCGYRTPLLDTAFKCPACGEGLDIDYDYELAKARIAEHDLSARPHNIWRFEELLPILSRKAQAKVGQFSGQTPLIHADRLGAELGLKKLYLKDDSTNRPTLSYKDRVVGMAIARMLELGKDEIGCVSTGNVGTAVAALAAKAGAAAYIFYPGNMEKGKAKACRALGAHVCQLDGNYDQANRACRELALTSGMQFANITLRPFYAEGAKTMAFEVVEELGWVAPDHFVIPAAGGTLSSRVHKGLNELELVGLAETSGTKINIAQPSGCGPIAGAILDGGEIQHQAPNTAAHSLAIGAPGDGSLVVDAVRTRGGTAATASDDEIFAAIDLLAATEGVLTEPAGGTTIASTAKLAAEGKLGPDDTVVAVISGNGLKTLQDHPEKTWPEMVACEVETMESVLNDFRREVAAVHH

SEQ ID NO: 360 - protein, 445 aa, unidentified
  REGION 1..445: note = Description of Unknown: uncultivated organism sequence
  REGION 1..445: note = Category: MG37 effectors
  REGION 1..445: note = Description: MG37-106 effector
MSIQTAESPPQGSRQRTRSCAIELACRRCDNHYPLEQAVFACPDCGKGLDVVYDYELAARHFREVASSERPQNIWHFEELLPIVDASAQARVGRHAGYTPLIQADRLGAELGIANLYLKDDSSNRPSLSYKDRVVSMSVARLLELGKSEIGCVSTGNVGTAVASLAAKAGVDAYVFYPNRLEDTKARACMALGAKVCQVEGNYDEANRRCRELAEATGMEFANITLRPFYAEGAKTAAFEIVEQLDWRAPDHIVTAAAGGTLSSRLHKGLVELQLLGLSETDSTRIHIAQPSGCNPIASAILAEEAEIHAVTPETAAHSLAIGNPGDGYLVIDAVLKRGGTGGFASDPEIFAGIDLLAATEGLLTEPAGGTTIAVLEKLAAAGRFAADETVVATITGNGLKTLDDHPRKPWPAKIDCELDAMRAALEDLKSSGSLVQSAREQLHF

SEQ ID NO: 361 - protein, 438 aa, unidentified
  REGION 1..438: note = Description of Unknown: uncultivated organism sequence
  REGION 1..438: note = Category: MG37 effectors
  REGION 1..438: note = Description: MG37-107 effector
MSDAVDPHRTEPYGLRTRSCATELTCRECGYRTPLLDKAFKCPACGEGLDVDYDYELAKKRIAERSTDERPWNIWRFEELLPILNRRAQERVAQFAGKTPLIHAERLGAELGLSRLYLKDDSTNRPSLSYKDRVVGMAIARLLELGKDEVGCVSTGNVGTAVASLAAQAGARPYIFYPGNMEKGKAKACRAMGAQVIQLDANYDQANRACRELALETGMEFANITLRPFYAEGAKTMGFEVVEELGWQAPDHFVIPAAGGTLSSRVHKGLVELEKVGLAETAGSKINIAQASGCSPIATAITGGGEIVTQTPETAAHSLAIGAPGDGNLVVDAVRSREGSAATASDEEIWSAIDLLGATEGILTEPAGGTTIASTARLAQEGKIGPDETVVAVISGNGLKTLHEHPEKDWPEGVPCEVGAMEQILNDFRQAAAAAALR

SEQ ID NO: 362 - protein, 437 aa, unidentified
  REGION 1..437: note = Description of Unknown: uncultivated organism sequence
  REGION 1..437: note = Category: MG37 effectors
  REGION 1..437: note = Description: MG37-108 effector
MSDAVDPHLEAPAGPQTRSCATELICRDCGYRTPLLDTAFKCPACGEGLDVDYDYERAQATIAAHPLDERPHDLWRFEELLPITSQRAQSRVGQISGQTPLIHAERLGAELGLNRLYIKDDSTNRPTLSYKDRVVGMAIARLLELGKDEVGCVSTGNVGTAVSALAAAAGAKAYVFYPGNMEKGKAKACRALGAQVCQLDGNYDQANRACRELSLASGIEFANISLRPFYAEGAKTMAFEVVEQLGWEAPDHLVIPAAGGTLSSRVHKGLNELQTVGLATTEGAKLNIAQASGCSPIAAAIRGGGELEPQTPETAAHSIAIGAPGDGNLVIDAVRTRGGWAATASDPEIFEAIDLLGRTEGLLTEPAGGTTIACTARLAQEGKIGRDEVVVAAITGNGLKTIADHPEKPWPEGVACNVEAMSEMLAEFRATAETALH

SEQ ID NO: 363 - protein, 1379 aa, unidentified
  REGION 1..1379: note = Description of Unknown: uncultivated organism sequence
  REGION 1..1379: note = Category: MG37 effectors
  REGION 1..1379: note = Description: MG37-109 effector
MKKWGKRIVSGVIAVSLLAAASISRQKPGGNTVESIVQAGTEASFMGSLLQGEYIDVFTSWPVKEQNVFYDSLKPQERSVFFEVTNYQIIRQLTKTGRKKKDLDDLLQKLGAYFQLLRIGSVEKAKEQTVIECINEIEKTEYQSADEYVKQLIPEKQTCYMEFYLALNQAWKDKKDIQDAVDELYKKLGFKEEKKQDSPTTAVIKSSRTVQQKAAAKAVSDGFSNFKAVSSLKEMKDAIDSVKKGEKLAVRVDKGFNVTSAIKTNGRHVKLYADSVSGHNLNRTSAYKGAMIEVNGGSLTLGAYDGDGRAKNTLYINGKNVTATASLIEVTSGQLYLNKYSRIMDGYYLADFAGGGGVTLESGTSCYMFGGKIDGCQAANSKDVSSSSPKSSHGGGIVVNDKASFYMFSGSVERCKAVHGGGIMVYGTARLYGGTITDCAAVNKKNDALGGAVKVQGAFSTDGKTTSVTGDFAAWKYTRSNTWSVNGKDGYEQASTSGAVLKNNQANAGGSVCINNGSKGTIQDCNIYGNQSTGNGAGICLSNGSYKKGASLEIKNGAGIHGNTSSGYGGGVYCADSVKGSISGGSVYNNTASYGAGIYHEAEFLMSGGTVRNNQSANSGGGFYAKGKLVTTGGEVAGNTAKTYGGGAIIKSAGASISGVRIKSNSAAVNGGGVQLDGQAVVSNAAVSENTASAKGGGISVSTAGGLQMNKGTVSGNTAKSNGGGINADGTCKVNGSNLTGNQVNGDGGAVYVGSGTFTTFQANQAVNIEGNSAAKNGAGIYNKNVTVLNNNAHILINQCKNGSEHNVFHAGSQLLVEGNAEIKQEVYLTKDRFITASSKYFSSANSLTMKISMDSSNVRNGYAVVKGDIPDTRDSSYKAGDTLLHNQAAEGRFAYTGTCYGLRPGNLKKSSSGCVPYSIVLSQAYKICYDKNSTQEVRNMPTAAVKHWEEDMRLSELVPSSGSGVFVAWNTRSDGTGNGYQPGNLYTANEDVILFALWPHYKVEYVPGIQGTNGVTDSQEQNKSEDILLRKNGFRSSEGKFICWKQDAYKARKRNEMEAAGYTDLKTERDGQGQDYVFGFSKNLRRGNLNSNSENAGSLLDVDDIFIMKGQWDFKPDIILKDKMIFRENEKVNRKKLLELVESCHDIEDGDLMKRIQISKIQYGMTKKGKKPKDVIFSNGMENSDLMNTYFMLLDKNETVNVKITFQVEDSAGNLTTKEGFVYVNYNHPPKLHSYNLAYYQQELETKDQIVLKEIIENCKVEDIEDDEQGIKIPVSVVEPIPLQIEKLKAAGKHKIVYKAVDSLGKETKLETELYIAEGSPYLDSYIYRVRFINKDYLHTLDQNSKWRKNLDLNKKLVTQLEKTENDVLMKYKFQSNK

SEQ ID NO: 364 - protein, 1378 aa, unidentified
  REGION 1..1378: note = Description of Unknown: uncultivated organism sequence
  REGION 1..1378: note = Category: MG37 effectors
  REGION 1..1378: note = Description: MG37-110 effector
MKKWGKRIISGVIVASLLTAAAISGSEQGTATVSSVVQAGTEMSFMGKLLEGGYIDVFTSWTQEEQIKFYDRLSPKEKSVFLEVTNCQIIRELIKSERTKEELERFFDRLEPYFLMLKKGSQEKPDEEIVIECINQIEGKDYESLEQYLKQLVSEKHGYYLDFYTALKRVKDGKSEIESAVNDLYKNLGFLKEDKVPAKPDKVSPLPVQVQKKAAKAISDGYSNFKAVSSLKALKDAVASVEKGEKIAVRVDKGFNVTSAIRTNGRHVKIYADGESAHNLNRAVGYKDAMLEVNGGSLTLGAYDGDGRAKNNLYINGKNVAASAPMIEVTSGQLYLNKYSRIIDGYFLADFAGGAGIAMNSGTSCYMFGGKIDSCRAKSSKDVSSSSPKSSHGGGVLVGNGASFYMFAGSIEHCQAIHGGGIMNYGTLRLYGGTVSDCAASNKKKDALGGAVKVQGAIETDGKVNSTKGDLGVWKYTRSGTWAVNGKDGYQQKSTTGVVLKNNQADAGGAVCLNNGSNGAIQDCNIYGNHSNGNGAGICLSNGSYKKGAALEIKTGAVIHGNESKGYGGGIYCADSVKGSLRGGSMYDNSAVYGAGVYHEAEFRMTGGTVRNNHSGNSGGGIYAKGKLSMTGGEISSNTAAAYGGGAILKNAGGSLSGGSIKNNTASVNGGGLQIDGAVSFSNVSVSSNSASGKGGGISVSSAGTCNFSSGNVSGNTSKAGGGGIYIDGTCKANGSNFTGNQSYGDGGAVYIASGTFTTFQANQAVNIQGNSASGNGSGIYNRNTAILNNNAHILNNQCKNGTQRGIFHEGSLFSIEGHTEIQQEIYLAKDRFITASNRYFSNSNSLTARISLDAANIRNGYAAVKGNISNSADSNYKTGDALLNNQSVNGRFMYAGSGYVMRPGNLKKSSSGCVPYSIVLSQAYQIRYDKNSKEEVMNMPTAAVKYWEEDIRLSALTPSGGSGVFVAWNTNADGTGDGYQPGNIYTANADATLFALWPHYRVEYLPGIQGAAGTTDSQEQNKSENILLRKNGFRSSEGKFIGWKQDISSARKRRELEPVGYKELKEERERGKSDHILAFAKSYKKVNASVNLDNKNSLLNAEDIFFMEGQWDSKPDIILHDKKTFLENEKIRKNDLLKAVKGCYDDEDGDLTEKVQIIKLDYGTSMEGYRPEPQNFSGGMNDTDVMDTYFMKLEKDETVEVKVIFQVEDSVGNVAEKEGTVYVTYNNPPKLHSQNLAFYQKDLDNNPQTVLKEILENYQVEDLEDDKSGLKVPVSVVDPIPMQIEKLNSVGEHKIVYQAIDSLGKKTKLDSTVYIAENNPFKDSYKYNVRFINKKYLYTLKESSKWKKDGKLNAQLTSQLEKTREDAVLKYEFKIKK

SEQ ID NO: 365 - protein, 432 aa, unidentified
  REGION 1..432: note = Description of Unknown: uncultivated organism sequence
  REGION 1..432: note = Category: MG37 effectors
  REGION 1..432: note = Description: MG37-111 effector
MSLSADQRTRSCATELVCHDCGLRLPLLDTTFKCLGCGQGLDIDYDYELARARLADQPVAQRELNIWRFEELLPIVDASARARVGRYSGRTPLIHADRLGAELGLRKLYLKDDSTQRPSLSYKDRVVSMAVARLLELGKEEIGCVSTGNVGTAVASLAAKAGVAAYVFYPSNLERGKARACRALGAAVIQLDGNYDEANRACRELAMASDIQFANITLRPFYAEGAKTMAFEVVEQLDWVSPDHFVIPAAGGTLSSRVHKGLEEMEKVGMAETAATKIHIAQAGGCDPIATAILDGGGEIEAQRPNTAAHSLAIGAPGDGPLVIDAVTSRGGSAASATDPEIFEALDLLGATEGILTEPAGGTTIAAAMKLANEGKLGPDDTVVAVISGNGYKTLDEHPDKPWPEGVAPEVEAMEQTLAQFRNTGTSAALSG

SEQ ID NO: 366 - protein, 1378 aa, unidentified
  REGION 1..1378: note = Description of Unknown: uncultivated organism sequence
  REGION 1..1378: note = Category: MG37 effectors
  REGION 1..1378: note = Description: MG37-112 effector
MKKWGKRIISGVIVASLLTAAAISGSEQGTATVSSVVQAGTETSFMGKLLEGGYIDVFTSWTQEEQNKFYDRLSPKEKSVFLEVTNCQIIRELIKSERTKEELERFFDRLEPYFLMLKKGSQEKPDEEIVIECINQIEGKDYESLEQYLKQLVSEKHGYYLDFYTALKRVKDGKSEIESAVNDLYKNLGFLKEDKVPAKPDKVSPLPVQVQKKAAKAVSDGYSNFKAVSSLKALKDAVASVEKGEKIAVRVDKGFNVTSAIRTNGRHVKIYADGESAHNLNRAVGYKDAMLEVNGGSLTLGAYDGDGRAKNNLYINGKNVAASAPMIEVTSGQLYLNKYSRIIDGYFLADFAGGAGIAMNSGTSCYMFGGKIDSCRAKSSKDVSSSSPKSSHGGGVLVGNGASFYMFAGSIEHCQAIHGGGIMNYGTLRLYGGTVSDCAASNKKKDALGGAVKVQGAIETDGKVNSTKGDLGVWKYTRSGTWAVNGKDGYQQKSTTGVVLKNNQADAGGAVCLNNGSNGAIQDCNIYGNHSNGNGAGICLSNGSYKKGAALEIKTGAVIHGNESKGYGGGIYCADSVKGSLRGGSMYDNSAVYGAGVYHEAEFRMTGGTVRNNHSGNSGGGIYAKGKLSMTGGEISSNTAATYGGGAILKNAGGSLSGGSIKNNTASVNGGGLQIDGAVSFSNVSVSSNSASGKGGGISVSSAGTCSFSSGNVSGNTSKAGGGGIYIDGTCKANGSNFTGNQSYGDGGAVYIASGTFTTFQANQAVNIQGNSASGNGSGIYNRNTAILNNNAHILNNQCKNGTQRGIFHEGSLFSIEGHTEIQQEIYLAKDRFITVSNRYFSNSNSLTARISLDAANIRNGYAAVKGNISNSADSNYKTGDALLNNQSVNGRFMYAGSGYVMRPGNLKKSSSGCVPYSIVLSQAYQIRYDKNSKEEVMNMPTAAVKYWEEDIRLSALTPSGGSGVFVAWNTNADGTGDGYQPGNVYTANADATLFALWPHYRVEYLPGIQGAAGTTDSQEQNKSENILLRKNSFRSSEGKFIGWKQDISSARKRRELEPVGYKELKEERERGKSDHILAFAKSYKKVNASVNLDNKNSLLNAEDIFFMEGQWDSKPDIILHDKKTFLENEKIRKNDLLKAVKGCYDDEDGDLTEKVQIIKLDYGTSMEGYRPEPQNFSGGMNDTDVIDTYFMKLEKDETVEVKVIFQVEDSVGNVAEKEGTVYVTYNNPPKLHSQNLAFYQKDLDNNPQTVLKEILENYQVEDLEDDKSGLKVPVSVVDPIPMQIEKLNSVGEHKIVYQAIDSLGKKTKLDSTVYIAENNPFKDSYKYNVRFINKKYLYTLKESSKWKKDGKLNAQLTSQLEKTREDAVLKYEFKIKK

SEQ ID NO: 367 - protein, 438 aa, unidentified
  REGION 1..438: note = Description of Unknown: uncultivated organism sequence
  REGION 1..438: note = Category: MG37 effectors
  REGION 1..438: note = Description: MG37-113 effector
MSEAVDPRLGGPGGPRTSSCATELVCRECGYRAPLSDTAFRCPTCDAGLDVDYDYERAKASIAARGLAERPWNIWRFEELLPIAGRRAAGTVAQFAGQTPLIPARRLGAELGLRNLYVKDDSTNRPSLSYKDRVVGMAVARALELGAGEIGCVSTGNVGTATASLAAAAGLKPYVFYPANLERAKARGCRALGAQVCQVDGNYDEANRACRELTEATGIPFANISLRPFYAEGAKTLAYELVEGLGWRSPDHVVMPAAGGTLSSRVHKGLLEFEILDLAETAATKLHVGQPTGCSPIVTTIVDGAKEIVPQQPETLAHSLAIGAPGDGDLVVEAVRSRGGSAAAVPDGEIIEAMELLAATEGVLTEPAGGTTVAATMKLAQRGEIAPDDVVVIVISGNGLKTLSEQPVKPWPEGVPCNAATMEEVVVEFREGGVTSRA

SEQ ID NO: 368 - protein, 430 aa, unidentified
  REGION 1..430: note = Description of Unknown: uncultivated organism sequence
  REGION 1..430: note = Category: MG37 effectors
  REGION 1..430: note = Description: MG37-114 effector
MLSSEDRTRSCATELVCRDCGRRLPLLDTTSKCLGCGNGLDIDYDYELAKARLAEHPTSERAINIWRFEELLPILDARAQARVGRYSGRTPLIHADRLGAELGLKKLYLKDDSTQRPSLSYKDRVVSMAVARLLELGKDEIGCVSTGNVGTAVASLAAKAGVTAYVFYPSNMERGKARACRALGAAVCQLDGNYDEANRACRELALASGIQFANITLRPFYAEGAKTVAYEVVEQLDWVAPDHFVIPAAGGTLSSRVHKGLNELEMVGLAQTSGTKINVAQAEGCNPIAAAILDGSGEVKPQAPNTAAHSIAIGAPGDGALVVNAVMSRGGSAAAVADSEIFDAIDLLGATEGILTEPAGGTTVASTIKLANEGKLGPEDTVVAVISGNGYKTLDEHPDKPWAEGVACELDAMTEMLNEFRLHGVGATLS

SEQ ID NO: 369 - protein, 430 aa, unidentified
  REGION 1..430: note = Description of Unknown: uncultivated organism sequence
  REGION 1..430: note = Category: MG37 effectors
  REGION 1..430: note = Description: MG37-115 effector
MSLSADQRTRSCATELVCHDCGLRLPLLDMTFKCLGCGQGLDIDYDYELAAARVAEQPIAERELNIWRFEELLPIVDAKARDRVGRYSGRTPLIHADRLGAELGLRKLYLKDDSTQRPSLSYKDRVVSMAVARLLELGKGEMGCVSTGNVGTAVASLAAKAGVAAYVFYPSNLERGKARACRALGAAVIQLDGNYDEANRACRELALASGIQFANITLRPFYAEGAKTMAFEVVEQLDWVSPDHFVIPAAGGTLSSRVHKGLGEMETVGMAETAATKIHIAQPEGCGPIATAVLDGSGKIEAQRPQTAAHSLAIGAPGDGPLVVDAVTSRGGSAATATDPEIFEALDLLGATEGILTEPAGGTTIAATIKLANEGKLGPDDTVVAVISGNGYKTLDEHPDKPWPERVACEVEAMEETLAGFRGAEAALSR

SEQ ID NO: 370 - protein, 448 aa, unidentified
  REGION 1..448: note = Description of Unknown: uncultivated organism sequence
  REGION 1..448: note = Category: MG37 effectors
  REGION 1..448: note = Description: MG37-116 effector
MSPQTAQSLGSGPPAPRQRTRSCATGLACHRCGSHYPLEQAIFACPDCGKGLDVVYDYEHAASHFRDVPSSERPHNIWHFEELLPIVDAAAQARVGQHSGYTPLIRADRLGAELGLSNLYLKDDSSNRPSLSYKDRVVSMSVARLLERGGTEIGCVSTGNVGTAVASMAAKAGVDAYVFYPNRLEDTKARACMALGAKVCQVEGNYDEANRRCRELAESTGMDFANITLRPFYAEGAKTAAFEIVEQLEWQAPDHIITAAAGGTLSSRLHKGLVELQLLELAETDSTRIHIAQPSGCNPIATAIVAEEAEIRAVTPETAAHSLAIGNPGDGYLVIDAVLKRGGTGGFASDPEIFAGIDLLAATEGLLTEPAGGTTIAVLEKLAAAGRFAPDDTVVAIITGNGLKTLDDHPAKSWPDKIECELDAMLAALSELKSSGTLVDSARRQLHP

SEQ ID NO: 371 - protein, 438 aa, unidentified
  REGION 1..438: note = Description of Unknown: uncultivated organism sequence
  REGION 1..438: note = Category: MG37 effectors
  REGION 1..438: note = Description: MG37-117 effector
MSTATGRVEDDKTTRSCVTELVCHRCDVRRPITDTEAFCPECGKCFDVAYDYELAKARLGELAMGERPQNIWRLSELLPIRSARAQAEVGQVSGMTPLIAATRLGSRLGLRKLYLKDDSTQRPSLSYKDRVVSSAIARALELGKTEIGCVSTGNVGTAVAALAAKAGVTPYVFYPNRLEQTKAKACRALGARVCQVAGNYDEANRECKKVAAASGLEFANITLRPFYAEGAKTTVFEIVEQLGWRAPDHIVSATAGGTLSSRLHKGLVELETVGLAQTGSTKMHIAQPAGCSPIASAIEAGDKEIHPCTPETAAHSLAIGSPGDGYLVIDAVLSRKGSAGTANDEEIFAGIDLLAETEGILTEPAGGTTIAVLKKLVESGELDPDATVVAIITGNGLKTLEDHPEKPWPQTECEAESMLAVLSDLQGQAASARQPLPV

SEQ ID NO: 372 - protein, 439 aa, unidentified
  REGION 1..439: note = Description of Unknown: uncultivated organism sequence
  REGION 1..439: note = Category: MG37 effectors
  REGION 1..439: note = Description: MG37-118 effector
MSDAVDPHLTEPYGLRTRSCATELTCRDCGYRTPLLDKAFKCPACGEGLDVDYDYDLAKQRIAERPAAERPWNIWRFEELLPILNRRAQERVAQFAGKTPLIHAERLGAELGLSNLYIKDDSTNRPSLSYKDRVVGMAIARLLELGKTEVGCVSTGNVGTAVAALAAQAGATPYIFYPGNMEKGKAKACRALGAQVIQLDANYDGANRACRELALATGMEFANITLRPFYAEGAKTMAFEVVEEMGWQPPDHFVIPAAGGTLSSRVHKGLVELEKVGLAETAGSKINIAQASGCSPISTAITAGGAEISPQTPETAAHSIAIGAPGDGALVVDAVVGRGGSGATATDEEIFGAIDLLGETEGILTEPAGGTTIACTARLAQEGKIAPDETVVAVISGNGLKTLHEHPEKTWPEMVPCEAGAMEEILNDFRQAAATAALR

SEQ ID NO: 373 - protein, 445 aa, unidentified
  REGION 1..445: note = Description of Unknown: uncultivated organism sequence
  REGION 1..445: note = Category: MG37 effectors
  REGION 1..445: note = Description: MG37-119 effector
MSTQTAQNPPSRSRQRTRSCATGLVCHRCENHYPLEQAIFACPDCGKGLDVAYDYERAASHFKEVPGSERPENIWRFEELLPIVDAAAQARVGRYAGFTPLIHADRLGAELGLSNLYLKDDSTSRPSLSYKDRVVSMSVARLLELGKHEIGCVSTGNVGTAVASMAAKAGVDAYVFYPNRLEDMKARACMALAAKVCQVEGNYDEANRRCRELALATGMEFANITLRPFYAEGAKTAAFEIVEQLDWRAPDHIVTAAAGGTLSSRLHKGLGELQLLGLSETDPTRIHIAQPSGCNPIASAILAEEAEIKPVTPETAAHSLAIGAPGDGYLVIDAVRKRGGTGGFASDPEIFAGIDLLAATEGLLTEPAGGTTIAVLEKLAAAGRFAPDETVVAIVTGNGLKTLDDHPQKPWPAKVDCELDAMLAALTELKGGGSLIDSAREQLRA

SEQ ID NO: 374 - protein, 445 aa, unidentified
  REGION 1..445: note = Description of Unknown: uncultivated organism sequence
  REGION 1..445: note = Category: MG37 effectors
  REGION 1..445: note = Description: MG37-120 effector
MSTQTAHSPAQGSRQRTRSCATGLACHRCDHSYPLEDAIFACPDCGKGLDVVYDYELAARHFREVPAAERPQNVWHFEELLPIVDARAQARVGQHTGYTPLIRAERLGAELGIGNLYLKDDSTSRPSLSYKDRVVSMSVARLLERGGSEIGCVSTGNVGTAVASLAAKAGVDAYVFYPNRLEDMKARACRALGAKVCQVEGNYDEANRRCRELAEATGMDFANITLRPFYAEGAKTAAFEIVEQLEWDAPDHIVTAAAGGTLSSRLHKGLVELQLLGLAETDATRIHIAQPSGCNPIASAILAEEAEVVPVTPETAAHSLAIGAPGDGYLVVDAVRTRGGTAGYASDPEIFAGFDLLAATEGLLTEPAGGTTVAVLEKLAAAGRFEADETVVAIITGNGLKTLDDHPAKPWPAKVDCELDAMRAALEDLKSGASLIDSAREQLHV

SEQ ID NO: 375 - protein, 1372 aa, unidentified
  REGION 1..1372: note = Description of Unknown: uncultivated organism sequence
  REGION 1..1372: note = Category: MG37 effectors
  REGION 1..1372: note = Description: MG37-121 effector
MKKWGKRIISGVIAASLLTAAAISGSEQGTGTVASVVQAGTETSFMGKLLEGGYIDVFTSGTQEEQNKFYDGLSPQQQSVFLEVTNCQITRELIKSERSKEELEQFFDRLQPYFLILKKGNQEKPDDEIVIECINQIEGTDYHSSEQYIKQLVSGKKDHYLEFYNALKLVKDGKLEIESAVDDFYKELGFLKKDRVPANSAEVSRQSVQVQKKAAAKAVSDGYSNFKAVSSLKALKDAVASVKKGEKIAVRVDKGFNVTSVIRTNGRHVKIYADGESGHNLNRTAGYKDVMLEVNGGSLTLGAYDGDGRAKNNLYINGKNIAASSGHLYLNKYSRIIDGYFLADFAGGAGIALNSGTSCYMFGGRIDNCRAKSSKDVSSGSPKSSHGGGVLVGNGSSFYMFAGSIEHCQAIHGGGIMNYGTLRLYGGAISDCAASNQKKDALGGAVKVQGAIETDGKVSSTKGDLGVWKYRRSAAWIVNGKDGYQQVTTTGVVLKNNQADAGGAICLNNGSNGAIQDCSINGNHSTGNGAGICLSNGSYKKGAALELKMGAVIHGNESKGYGGGFYCADSVKGSLSGGTMYDNSAKYGAGIYHEAEFRMSGGTVRNNHSGNSGGGIYAKGKLSMTGGEISANTAATYGGGAILKTAGGSVSGGSIKGNSASANGGGLQIDGTVSLSNASVSSNSASGKGGGISVSSSGTCNLSSGNVSGNTAKAGGGGIYIDGTCKANGSSFTGNQSSGDGGAVYIASGTFTTFQANQAVNIQGNSASGNGSGIYNRNITVLNNNAHILNNHCKNGTQRGIFHQGSLFSIEGNTEIQQEIYLAKDRFVTASNRYFSNSNSLKAKISLDTANIRNGYAVVKGNVSNSADGNYKTGEALLNNQSAGGRFVYAGSGYVMRPGNLKKSSSGCAPFSIVLSQAYQIRYDKNSKEEVMNMPTAAVKYWEEDIRLSALTPASGSGAFVAWNTKADGTGDGYQPGNVYTANADATLFALWPHYRVEYLPGIRSAAGTTDSQEQNKSEDILLRKNGFRSSEGKFVGWKQDISSARKRMELEPVGYKELKEEREKGKLNHILDFAESNKKVNSSENLDNINSLLDVEDIFFMEGQWDSKPDIILNDKKTFLENEKIKKNDLLKVVKGCYDEEDGELTKKVQIIKLDYAKSMKGYRPETQNFSGGMNDTDVMDTYFMKLEKDETVEVKVTFQAEDSVGNVAEKEGTVCVTYNNPPKLHSQNLAFYQKDLDNNPQTILKEIFENYQVEDIEDDKKGLKVPVSVIDPIPLQIEKLNSVGEHKIVYQAIDSLGKKTKLDSIVYIAENNPFKDSYKYNVRFINKKYLYTLKESSKWKKDEELNAQLTSQLEKTKEDAVLKYEFEIKK

SEQ ID NO: 376 - protein, 407 aa, unidentified
  REGION 1..407: note = Description of Unknown: uncultivated organism sequence
  REGION 1..407: note = Category: MG37 effectors
  REGION 1..407: note = Description: MG37-122 effector
MFACPGCGKGLDVVYDYELAARHFKEVPSSERPQNIWHFEELLPIVDASAQARVGLHSGYTPLIRADRLGAELGLSNLYLKDDSTSRPSLSYKDRVVSMSVARLLERGKTEIGCVSTGNVGTAVASMAAAAGVDAYVFYPNRLEDMKARACMALGAKVCQVEGNYDEANRRCREVAETTGMDFANITLRPFYAEGAKTAAFEIVEQLDWRSPDHIITAAAGGTLSSRLHKGLLELQHLGLSETDPTRIHIAQPSGCNPIATAIIAEEAEVRPVTPETAAHSLAIGAPGDGYLVIDAVLKRGGTGGFASDPEIFAGIDLLAATEGLLTEPAGGTTVAVLEKLAAAGRFAPDDTVVAIITGNGLKTLDDHPPKPWPAKVDCELDAMLAALSELKSGGSLVDSAREQLHA

SEQ ID NO: 377 - protein, 1378 aa, unidentified
  REGION 1..1378: note = Description of Unknown: uncultivated organism sequence
  REGION 1..1378: note = Category: MG37 effectors
  REGION 1..1378: note = Description: MG37-123 effector
MKKWGKRIISGVIVASLLTAAAISGSEQGTATVSSVVQAGTETSFMGKLLEGGYIDVFTSWTQEEQNKFYDRLSPKEKSVFLEVTNCQIIRELIKSERTKEELERFFDRLEPYFLMLKKGSQEKPDEEIVIECINQIEGKDYESLEQYLKQLVSEKHGYYLDFYTALKRVKDGKSEIESAVNDLYKNLGFLKEDKVPAKPDKVSPLPVQVQKKAAKAVSDGYSNFKAVSSLKALKDAVASVEKGEKIAVRVDKGFNVTSAIRTNGRHVKIYADGESAHNLNRAVGYKDAMLEVNGGSLTLGAYDGDGRAKNNLYINGKNVAASAPMIEVTSGQLYLNKYSRIIDGYFLADFAGGAGIAMNSGTSCYMFGGKIDSCRAKSSKDVSSSSPKSSHGGGVLVGNGASFYMFAGSIEHCQAIHGGGIMNYGTLRLYGGTVSDCAASNKKKDALGGAVKVQGAIETDGKVNSTKGDLGVWKYTRSGTWAVNGKDGYQQKSTTGVVLKNNQADAGGAVCLNNGSNGAIQDCNIYGNHSNGNGAGICLSNGSYKKGAALEIKTGAVIHGNESKGYGGGIYCADSVKGSLRGGSMYDNSAVYGAGVYHEAEFRMTGGTVRNNHSGNSGGGIYAKGKLSMTGGEISSNTAATYGGGAILKNAGGSLSGGSIKNNTASVNGGGLQIDGAVSFSNVSVSSNSASGKGGGISVSSAGTCSFSSGNVSGNTSKAGGGGIYIDGTCKANGSNFTGNQSYGDGGAVYIASGTFTTFQANQAVNIQGNSASGNGSGIYNRNTAILNNNAHILNNQCKNGTQRGIFHEGSLFSIEGHTEIQQEIYLAKDRFITVSNRYFSNSNSLTARISLDAANIRNGYAAVKGNISNSADSNYKTGDALLNNQSVNGRFMYAGSGYVMRPGNLKKSSSGCVPYSIVLSQAYQIRYDKNSKEEVMNMPTAAVKYWEEDIRLSALTPSGGSGVFVAWNTNADGTGDGYQPGDVYTANADATLFALWPHYRVEYLPGIQGAAGTTDSQEQNKSENILLRKNGFRSSEGKFIGWKQDISSARKRRELEPVGYKELKEERERGKSDHILAFAKSYKKVNASVNLDNKNSLLNAEDIFFMEGQWDSKPDIILHEKKTFLENEKIRKNDLLKAVKGCYDDEDGDLTEKVQIIKLDYGTSMKGYRPEPQNFSGGMNDTDVMDTYFMKLEKDETVEVKVIFQVEDSVGNVAEKEGTVYVTYNNPPKLHSQNLAFYQKDLDNNPQTVLKEILENYQVEDLEDDKSGLKVPVSVVDPIPMQIEKLNSVGEHKIVYQAIDSLGKKTKLDSTVYIAENNPFKDSYKYNVRFINKKYLYTLKESSKWKKDGKLNAQLTSQLEKTREDAVLKYEFKIKK

SEQ ID NO: 378 - protein, 439 aa, unidentified
  REGION 1..439: note = Description of Unknown: uncultivated organism sequence
  REGION 1..439: note = Category: MG37 effectors
  REGION 1..439: note = Description: MG37-125 effector
MSDAVDPHLTEPYGLRTRSCATELTCRECGYRTPLLDKAFKCPACGEGLDVDYDYDLAKQRIAERPAAERPWNIWRFEELLPILNRRAQERVGQFAGKTPLIHAERLGAELGLSKLYIKDDSTNRPSLSYKDRVVGMAIARLLELGKNEVGCVSTGNVGTAVAALAAQAGATPYIFYPGNMEKGKAKACRAMGAQVIQLDANYDGANRACRELALATGMEFANITLRPFYAEGAKTMAFEVVEEMGWQAPDHFVIPAAGGTLSSRVHKGLVEMETVGLAETAGSKINIAQASGCSPISTAITAGGAAIEAQTPETAAHSIAIGAPGDGALVVDAVVSRGGSGATASDEEIFGAIDLLGETEGILTEPAGGTTIACTARLAQEGKIAPDETVVAVISGNGLKTLQEHPEKSWPEMVPCEAGAMEEILNDFRQAAATAALR

SEQ ID NO: 379 - protein, 437 aa, unidentified
  REGION 1..437: note = Description of Unknown: uncultivated organism sequence
  REGION 1..437: note = Category: MG37 effectors
  REGION 1..437: note = Description: MG37-126 effector
MSDAANPHLTEPYGLRTNSCATELTCRDCGYRTPLLDRAFKCPACGEGLDVDYDYDLAKRRIEERPMAERPWNIWRFEELLPILNRRAQQRVGAFAGKTPLIHAERLGAELGLSNLYLKDDSTNRPSLSYKDRVVGMAIARLLELGKDEVGCVSTGNVGTAVASLAAQAGAKPYIFYPGNMEKGKAKACRAMGAQVIQLDANYDGANRACRELALATGMEFANITLRPFYAEGAKTMAFEVVEELDWRAPDHFVIPAAGGTLSSRVHKGLVEMEKVGLAETAGSKINIAQASGCSPIATAIVGGGEIEHQTPETAAHSLAIGAPGDGNLVVDAVRSRGGSAATASDEEIWNAIDLLGSTEGILTEPAGGTTIASTARLAQEGKIAPDETVVAVISGNGLKTLHEHPEKDWPEGVPCEVGAMEDLLNDFRQAAAAALR

SEQ ID NO: 380 - protein, 439 aa, unidentified
  REGION 1..439: note = Description of Unknown: uncultivated organism sequence
  REGION 1..439: note = Category: MG37 effectors
  REGION 1..439: note = Description: MG37-127 effector
MSDAVDPHLTEPYGSRTSSCATELACRDCGYRTPLLDKAFKCPACGEGLDVDYDYELARKRIAARPLAARPWNIWRFEELLPILNRRAQEQVGAFAGKTPLIHAERLGAELGLSNLYLKDDSTNRPSLSYKDRVVGMAIARLLELGKDEVGCVSTGNVGTAVAALGAQAGARPYIFYPGNMEKGKAKACRALGAQVIQLDANYDQANRACRELALATGMEFANITLRPFYAEGAKTMAFEVVEELGWKAPDHFVIPAAGGTLSSRVHKGLRELEMVGLAETAAAKINIAQASGCSPISTAISAGGAEIEVQTPETAAHSLAIGAPGDGALVVDAVVSRGGAGATASDEEIFEAIDLLGATEGILTEPAGGTTIASTARLAQEGKIGPDETVVAVISGNGLKTLHEHPEKTWPEMVPCEVGAMEEMLNDFRRAAAAAALR

SEQ ID NO: 381 - protein, 437 aa, unidentified
  REGION 1..437: note = Description of Unknown: uncultivated organism sequence
  REGION 1..437: note = Category: MG37 effectors
  REGION 1..437: note = Description: MG37-128 effector
MSDAADPHLGEAIGPRTSSCDTELVCRDCGYRTPLLDTAFKCPACGEGLDIDYDYERAKSLIAKRGLAERPDNIWRFEELLPILSQRAQGMVGQFSGQTPLIKADRLGAELGLKNLYLKDDSTNRPTLSYKDRVVSMAIARMLALGKDEIGCVSTGNVGTAVAALAAKAGARAYIFYPGNMEKGKAKACRALGAQVCQLDGNYDQANRACRELSLASGIEFANITLRPFYAEGAKTMAFEVVEQLGWTAPDHFVIPAAGGTLSSRVHKGLSELETVGLAETGATRINIAQASGCGPIATAILEGGEIVPQTPDTAAHSIAIGAPGDGALVVDAVRSRGGSAATVSDEEIFGAIDLLGATEGILTEPAGGTTVAVTAKLAAEGKLGADETVVAVISGNGLKTLQDHPEKQWPEMVACDVETMGAMLADFRQAAATTLH

SEQ ID NO: 382 - protein, 448 aa, unidentified
  REGION 1..448: note = Description of Unknown: uncultivated organism sequence
  REGION 1..448: note = Category: MG37 effectors
  REGION 1..448: note = Description: MG37-129 effector
MSIQTAEVPDQGQPAPRQRTRSCATGLACHRCGHSYPLESTVFSCPDCGKGLDVVYDYELAARHFKEIPTSERPQNIWHFEELLPIVDASAQARVGLHAGYTPLIRADRLGAELGIANLYLKDDSSNRPSFSYKDRVVSMSVARLLERGGTEIGCVSTGNVGTAVASMAAKAGVDAYVFYPNRLENMKARVCMALGAKVCQVEGNYDEANKRCRELAESTGMDFANITLRPFYAEGAKTAAFEIVEQLDWRAPDHIVTAAAGGTLSSRLHKGLVELQQLGLSETDATRIHIAQPSGCNPIASAILAEEAEIHPVTPETAAHSLAIGAPGDGYLVVDAVRKRGGTGAFASDPEIFAGIDLLAATEGLLTEPAGGTTVAVLEKLAAVGRFGPDETVVAIITGNGLKTLDDHPPKPWPDKVDCELDAMQEALSELKSSGTLVESARAQLHV

SEQ ID NO: 383 - protein, 441 aa, unidentified
  REGION 1..441: note = Description of Unknown: uncultivated organism sequence
  REGION 1..441: note = Category: MG37 effectors
  REGION 1..441: note = Description: MG37-131 effector
MTTSTPQRSSQRTRSCATGLVCHRCDNSYPLEQSIFACPDCGKGLDVVYDYELAATHFRDFPTSERPQNIWHFEELLPIVDAGAQSRVGRYSGYTPLIRADRLGAELGLGNLYLKDDSTSRPSLSYKDRVVSMAVARLLERGGTEIGCVSTGNVGTAVAAMAAKAGVDAYVFYPNALEEMKARACRALAAKVCQVEGNYDQANRRCREVAETTGMDFANITLRPFYAEGAKTAAFEIVEQLDWNAPEHIVIPAAGGTLSSRVHKGLVEMAHLGLSETGQTKIHIAQPSGCNPIASAIIAEEAEVVPVTPETVAHSLAIGAPGDGYLVIDAVLSRGGTGGFASDPEIFAGIDLLASTEGLLTEPAGGTTIAVLEKMAAAGTFAQDETVVAIITGNGLKTLDEHPDKPWPAKVKCELDAMLEALTELKAEETLLNSAQRLLGS

SEQ ID NO: 384 - protein, 352 aa, unidentified
  REGION 1..352: note = Description of Unknown: uncultivated organism sequence
  REGION 1..352: note = Category: MG37 effectors
  REGION 1..352: note = Description: MG37-132 effector
MRAQQRVAQFAGKTPLIHAERLGAELGLSNLYLKDDSTNRPSLSYKDRVVGMAIARLLELGKDEVGCVSTGNVGTAVASLAAQAGARPYIFYPGNMEKGKAKACRAMGAQVIQLDANYDQANRACRELALTIGMEFANITLRPFYAEGAKTMAFEVVEELGWQAPDHFVIPAAGGTLSSRVHKGLVELEKVGLAETAGTKIDIAQASGCSPIATAIVGGGEIEPQMPETAAHSLAIGAPGDGALVVDAVRSRSGSAATASDDEIWYAIDLLGTTEGILTEPAGGTTVAATARLAQEGKIGPDETVVAVISGNGLKTLHEHPEKDWPEGVPCEVGEMERLLNDFRQAAATALH

SEQ ID NO: 385 - protein, 431 aa, unidentified
  REGION 1..431: note = Description of Unknown: uncultivated organism sequence
  REGION 1..431: note = Category: MG37 effectors
  REGION 1..431: note = Description: MG37-134 effector
MSLAADQRTRSCATELVCRDCGLRLSLADTTFKCLQCGQGLDIDYDYELAAARLADLSLSERPLNIWRFEELLPIVDRAAQARVGKNSGRTPLIHADRLGAELGLKRLYLKDDSTARPSLSYKDRVVSMAIARLLELGKEEIGCVSTGNVGTAVASLAAKAGVAPYVFYPANMERGKARACRALGAAVIQLDGNYDEANRACRELALASGIQFANITLRPFYAEGAKTLAFEVLEQLDWKPPEHFVIPAAGGTLSSRVHKGLGEMEAVGIVGTSQVKISVAQPDGCGPIAKAVLDGTGEISAQKPNTAAHSLAIGAPGDGALVVDAVMSRGGSAATASDAEIFEAIDLLGATEGILTEPAGGTTIAATAKLAQAGKLGPEDTVVAVISGNGYKTLDEHPEKEWPSMVAPEVEAMERTLAEFRGARTGAALS

SEQ ID NO: 386 - protein, 445 aa, unidentified
  REGION 1..445: note = Description of Unknown: uncultivated organism sequence
  REGION 1..445: note = Category: MG37 effectors
  REGION 1..445: note = Description: MG37-135 effector
MSTPTSQSRAADPARRTRSCAQALVCRRCDLEYPLQERVFACPQCGKGLDVSYDYELAACRFEEIPPAARPQNIWQFEELLPIVDASAQARVGLTAGYTPLIAADRLGAELGIANLYLKDDSTSRPSLSYKDRVVAMSVARLLELGERAMGCVSTGNVGTAVASYAAKAGVDAYVFYPNRLEDTKARACRALGAKVCQVEGNYDEANRCCREVAQATGMEFANITLRPFYAEGAKTSAFEIVEQLNWRAPDHIVTAAAGGTLSSRLHKGLCELAQLELADTEPTRIHIAQPSGCNPIASAILAEEAEIQAVTPETAAHSLAIGAPGDGYLVIDAVRKRGGTGGFASDPEIFAGIDLLASTEGILTEPAGGTTIAVLEKLAAGGRFGPDDTVVAIITGNGLKTLDDHPEKPWPAKIDCELDAMLAALEELRRGGSPSASARERLPA

SEQ ID NO: 387 - protein, 430 aa, unidentified
  REGION 1..430: note = Description of Unknown: uncultivated organism sequence
  REGION 1..430: note = Category: MG37 effectors
  REGION 1..430: note = Description: MG37-136 effector
MLNSEDRTRSCATELVCRDCGRRLPLLDTTSKCLGCGNGLDIDYDYELARARLSEVPPAEREINIWRFEELLPIVDARAQARVGRYSGRTPLIHADRLGAELGLKKLYLKDDSTSRPGLSCEERVVSMAIARLLELGKEEIGCVSTGNVGTAVASLAAKAGITAYVFYPSNMERGKARACRALGAAVCQLDGNYDEANRACRELALASGIQFANITLRPFYAEGAKTLAYEVVEQLEWVAPDHIVIPAAGGTLSSRVHKGLNELETVGLAETSQVKISVAQPEGCGPIATAIIDGSGEIEPQSPQTAAHSLAIGAPGDGALVVDAVMSRGGSAATASDPAIFEAIDLLGATEGVLTEPAGGTTIASTIKLANEGKLGPDDTVVAVISGNGYKTLDEHPDKPWAEGVACEVDSMTEMLDEFRRHGVGAMLG

SEQ ID NO: 388 - protein, 430 aa, unidentified
  REGION 1..430: note = Description of Unknown: uncultivated organism sequence
  REGION 1..430: note = Category: MG37 effectors
  REGION 1..430: note = Description: MG37-137 effector
MLNPEDRTRSCATEMVCRDCGRTYPLLDTAFRCHGCGNGLDIDYDYELAKKRLSEIPPAEREINIWRFEELLPITDARAQARVGRYSGRTPLIHADRLGAELGLKKLYLKDDSTQRPSLSYKDRVVSMAVARLLELGKDEIGCVSTGNVGTSVSSLAAKAGVAAYVFYPSNMERGKARACRALGAAVIQLDGNYDQANRACRELALASGMQFTNITLRPFYAEGAKTEAYEVVEQLEWVSPDHFVIPAAGGTLSSRVHKGLNELEMVGLAETSQTKINVAQAEGCNPIATAILDGSGEIAPQTPNTVAHSIAIGAPGDGPLVVDAVRSRGGSAAAVTDAEIFEGIDLLGATEGILTEPAGGTTIACTAKLANEGKLGPDETVVAIVSGNGYKTLDEHPEKSWPEMIAPEVEAMSEVLDELRSHGVGAPLS

SEQ ID NO: 389 - protein, 437 aa, unidentified
  REGION 1..437: note = Description of Unknown: uncultivated organism sequence
  REGION 1..437: note = Category: MG37 effectors
  REGION 1..437: note = Description: MG37-138 effector
MSDAVDPHLGGASGPRTSSCATELICRDCGYTTPLLDSAFKCPACGEGLDIDYDYDRAKALIAERGLDERPQNIWRFEELLPIASRAAQQKVGQFAGRTPLIRADRLGAEIGLNNLYLKDDSTNRPTLSYKDRVVSMAIARLLELGKNEVGCVSTGNVGTAVAALAAKAGATAYIFYPGNMEKGKAKACRALGAQVCQLDGNYDQANRACRELSLASGIEFANITLRPFYAEGAKTMAFEIVEELGWIAPDHLVIPAAGGTLSSRVHKGLNELEIVGLAETAGTKINIAQAGGCSPIATAIRDGGELEPQTPETAAHSLAIGAPGDGNLVLDAVRTRGGSAAAPSDPEIFAAIDLLGATEGVLTEPAGGTTIAATAKLAAEGKIAPDDVVVATISGNGLKTLSEHPDKPWPEMVACDVDTMGAMLSDFRQAAAAALH

SEQ ID NO: 390 - protein, 445 aa, unidentified
  REGION 1..445: note = Description of Unknown: uncultivated organism sequence
  REGION 1..445: note = Category: MG37 effectors
  REGION 1..445: note = Description: MG37-139 effector
MSSSSTTASSQGTRQRTRSCATELVCHRCDHRYPLTDTVFACPDCGKGLDIAYDYELAGTHFRDFPISERPQNIWHFEELLPILDANAQARVGQYSGYTPLIRADRLGAELGLNNLYLKDDSTSRPSLSYKDRVVSMSVARLLERGKTEIGCVSTGNVGTAVASMAATAGVDAFIFYPNRLEEMKARACMALGAKVVQVEGNYDEANRRCREVAAETGMDFANITLRPFYAEGAKTAAFEIVEQLQWASPDHIVSPAAGGTLSSRMHKGLGELQLLGLSETEGTQIHIAQPSGCNPIASAILAEEAEVVPVMPETAAHSLAIGAPGDGYLVIDAVHKRGGTAAFASDPEIFAGIDLLAATEGLLTEPAGGTTIAVLEKLAAAGRFAPEDTVVALITGNGLKTLDEHPSKAWPAKIDCELDPMLGALAELKRTPTLMQTAREQLRA

SEQ ID NO: 391 - protein, 445 aa, unidentified
  REGION 1..445: note = Description of Unknown: uncultivated organism sequence
  REGION 1..445: note = Category: MG37 effectors
  REGION 1..445: note = Description: MG37-141 effector
MSTSSSNGPGERPRQQTRSCATGLACHRCGLSYALDEDAYACPQCGKGLDIVYDYERAARLFTEVPREQRPQNIWRFEELLPIVDAGAQARVGAHAGCTPLIRADRLGAELGIANLYLKDDSTSRPSLSYKDRVVAMSIARLLELGKDEIGCVSTGNVGTAVASYAAKAGVTAYVVYPNRLEDTKARACAALGARVCQVEGNYDEANRRCKEVAAAAEMEFANITLRPFYAEGAKTAAFEIVEQLSWNAPAHIVTAAAGGTLSSRLHKGLAELEQLGLAHTSSTRIHIAQPSGCNPIASAILAEEAEVHPITPETAAHSLAIGAPGDGYLVIDAVLKRGGTAGFASDPEIFAGIDLLAATEGLLTEPAGGTTVAVLEKLAKEGRFATDDVVVAIITGNGLKTLDDHPEKPWPAKIDCELDAMLAALAELKREGALAERALEQLHA

SEQ ID NO: 392 - protein, 436 aa, unidentified
  REGION 1..436: note = Description of Unknown: uncultivated organism sequence
  REGION 1..436: note = Category: MG37 effectors
  REGION 1..436: note = Description: MG37-143 effector
MSDAVDPHLTEPYGLRTRSCATELTCRDCGYRTPLLDKAFKCPACGEGLDVDYDYELAKKRIAERSTAERPWNIWRFEELLPILNLRAQQRVAQFAGKTPLVHAERLGAELGLSNLYLKDDSTNRPSLSYKDRVVGIAIARLLELGKDEVGCVSTGNVGTAVAALAAQAGARPYIFYPGNMEKGKAKACRGLGAQVIQLDANYDQANRACRELAITTGMEFANITLRPFYAEGAKTMAFEVVEELGWRAPDHFVIPAAGGTLSSRVHKGLVELEKVGLAETAAAKIDIAQASGCSPIATAIQGGGEIEPQTPETAAHSLAIGAPGDGNLVVDAVRSRGGAAAAVSDEEIWGAIDLLGTTEGILTEPAGGTTIASTARLAQEGRIGPDDLVVAVISGNGLKTLQEHPDKPWPEMVPCEVGAMEEMLNDFRQAAAALH

SEQ ID NO: 393 - protein, 1379 aa, unidentified
  REGION 1..1379: note = Description of Unknown: uncultivated organism sequence
  REGION 1..1379: note = Category: MG37 effectors
  REGION 1..1379: note = Description: MG37-144 effector
MKKWGKRIISGVIAASLLTAAAISGSEQGTGTVASVVQAGTEMSFMGKLLEGGYIDVFTSWTQEEQNKFYDGLSPQQQSVFLEVTNCQITRELIKSERSKEELEQFFDRLQPYFLILKKGNQEKPDDEIVIECINQIEGTDYHSSEQYIKQLVSEKKDHYLEFYDALKLVKDGKLEIESAVDDFYKELGFLKKDRVPANSAEVSRQPVQVQKKAAAKAVSDRYSNFKAVSSLKALKDAVASVKKGEKIAVRVDKGFNVTSVIRTNGRHVKIYADGESGHNLNRTAGYKDVMLEVNGGSLTLGAYDGDGRAKNNLYINGKNIAASAPLIEVTSGHLYLNKYSRIIDGYFLADFAGGAGIALNSGTSCYMFGGRIDNCRAKSSKDVSSSSPKSSHGGGVLVGNGSSFYMFAGSIEHCQAIHGGGIMNYGTLRLYGGAISDCAASNQKKDALGGAVKVQGAIETNGKVSSTKGDLGVWKYTRSAAWIVNGKDGYQQGTTTGVVLKNNQADAGGAICLNNGSNGAIQDCNINGNHSTGNGAGICLSNGSYKKGAALELKTGAVIHGNESKGYGGGIYCADSVKGSLSGGTMYDNSAKYGAGIYHEAEFRMSGGTVRSNHSGNSGGGIYAKGKLSMTGGEISANTAATYGGGAILKTVGGSVSGGSIKGNSASANGGGLQIDGTVSLSNASVSSNSASGKGGGISVSSSGTCNLSSGNVSGNTAKAGGGGIYIDGTCKANGSSFTGNQSSGDGGAVYIASGTFTTFQANQAVNIQGNSASGNGSGIYNRNITVLNNNAHILNNQCKNGTQRGIFHEGSLFSIEGNTEIQQEIYLAKDRFVTASNRYFSNSNSLKAKISLDTANIRNGYAVVKGNVSNSADGNYKTGEALLNNQSAGGRFVYAGSGYVMRPGNLKKSSSGCAPFSIVLSQAYQIRYDKNSKEEVMNMPTAAVKYWEEDIKLSALTPTGGSGAFVAWNTKADGTGDGYQPGNVYTANADATLFALWPHYRVEYLPGIRSAAGTTDSQEQNKSEDILLRKNGFRSSEGKFVGWKQDISSARKRMELEPVGYKELKEEREKGKLNHILDFAESYKKVNSSENLDNINSLLDVEDIFFMEGQWDSKPDIILNDKKTFLENEKIKKNDLLKVVKGCYDEEDGELTKKVQIIKLDYTKSMKGYRPETQNFSGGMNDTDVMDTYFMKLEKDETVEVKVTFQAEDSVGNVAEKEGTVCVTYNNPPKLHSQNLAFYQKDIDNNPQTILKEIFENYQVEDIEDDKKGLKVPVSVIDPIPLQIEKLNSVGEHKIVYQAIDSLGKKTKLDSIVYIAENNPFKDSYKYNVRFINKKYLYTLKESSKWKKNEELNAQLTSQLEKTKEDAELKYEFEIKK

SEQ ID NO: 394 - protein, 437 aa, unidentified
  REGION 1..437: note = Description of Unknown: uncultivated organism sequence
  REGION 1..437: note = Category: MG37 effectors
  REGION 1..437: note = Description: MG37-145 effector
MSEAVDPHLGGSAGPRTSSCATELVCRDCGYRTPLLDTAFKCPACGEGLDIDYDYERAKALIAERGLAERPQNVWRFEELLPIVARGAQERVGQFSGQTPLIRADRLGAELGLKNLYLKDDSTNRPTLSYKDRVVSMAIARLLELGKDEVGCVSTGNVGTAVAALAAKAGATAYIFYPGNMEKGKAKACRALGAQVCQLDGNYDQANRACRELSLASGIEFANITLRPFYAEGAKTMAFEVVEQLGWVAPDHFVIPAAGGTLSSRVHKGLNELETVGLAATAATRINIAQAGGCGPIATAILDGGEIEPQTPDTAAHSLAIGAPGDGALVVDAVRSRNGSAATASDQEIFDAIDLLGATEGLLTEPAGGTTIASTARLAAEGKIGAEDTVVAVISGNGLKTLQDHPEKQWPEMVACDVETMGSMLADFRQAAAAALH

SEQ ID NO: 395 - protein, 444 aa, unidentified
  REGION 1..444: note = Description of Unknown: uncultivated organism sequence
  REGION 1..444: note = Category: MG37 effectors
  REGION 1..444: note = Description: MG37-146 effector
MSTPIAESPTQARQRTRSCATALVCHRCENSYPLAQAIFACPDCNKGLDVVYDYEHAAQHFREVPSSERPQNIWHFEELLPIVDASAQARVGQHSGYTPLIRADRLGAELGLSNLYLKDDSSNRPSLSYKDRVVSMSVARLLELGRTEIGCVSTGNVGTAVASLAAKAGVDAYVFYPNRLEDTKARACMALGAKVCQVEGNYDEANKRCREVAETTGMDFANITLRPFYAEGAKTAAFEIVEQLDWQAPDHIVTAAAGGTLSSRLHKGLVELQLLELSETDSTRIHIAQPSGCNPIATAIVAEEAEIHAVTPETAAHSLAIGNPGNGYLVIDAVLKRGGTGGFASDPEIFAGIDLLAATEGLLTEPAGGTTIAVLEKLAATGRFAPDDTVVAIITGNGLKTRDDHPPKPWPAKVDCELDAMVAALDELKQSGTLVDSARELLHP

SEQ ID NO: 396 - protein, 437 aa, unidentified
  REGION 1..437: note = Description of Unknown: uncultivated organism sequence
  REGION 1..437: note = Category: MG37 effectors
  REGION 1..437: note = Description: MG37-148 effector
MSDAVEPHRTEPYGLRTDSCATELVCRDCGYRTPLLDTAFKCPACGEGLDVDYDYELAKRRIAERGLEGRPWNVWRFEELLPILNRRARQRVAQFAGKTPLIHAERLGAELGLSNLYLKDDSTNRPSLSYKDRVVGMAIARLLELGKDEVGCVSTGNVGTAVAALAAQAGARPYIFYPGNMEKGKAKACRGLGAQVIQLDANYDQANRACRELALTTGMEFANITLRPFYAEGAKTMGFEVVEELGWKAPDHFVIPAAGGTLSSRVHKGLLELEKVGLAETAGARINIAQASGCSPIASAITSGGEIEPQTPETAAHSLAIGAPGDGNLVVDAVRSRGGSAAAVSDEEIWEAIDLLGATEGILTEPAGGTTIASTARLAQAGKIGPDEVVVAVISGNGLKTLHEHPDKPWPEMVPCEVGAMEEMLNDFRRAATAALH

SEQ ID NO: 397 - protein, 437 aa, unidentified
  REGION 1..437: note = Description of Unknown: uncultivated organism sequence
  REGION 1..437: note = Category: MG37 effectors
  REGION 1..437: note = Description: MG37-149 effector
MSDAVDPHPGGPKGPRTDSCATELVCRDCGYRTPLLDTAFKCPACGEGLDIDYDYERAQTLIAERGLADRPQNIWRLEELLPIVSRRAQAKVGLFAGQTPLIRADRLGAELGLKNLYLKDDSTNRPTLSYKDRVVGMAIARLLELGKDEVGCVSTGNVGTAVAALAAKAGATAYIFYPGNMEKGKAKACRALGAQVCQLDGNYDQANRACRELSLASGIQFANITLRPFYAEGAKTMAFEVVEQLGWEAPDHFVIPAAGGTLSSRVHKGLNELETVGLAETAATKINIAQAGGCGPIAGAILGGGEIVPQTPDTAAHSLAIGDPGDGSLVVDAVRARGGSAAMPSDEEIFGAIDLLGATEGILTEPAGGTTIAATARLAAEGKLGAEETVVAVISGNGLKTLHEHPDKPWPEMVACDVETMGAMLAEFRQAAAAALH

SEQ ID NO: 398 - protein, 434 aa, unidentified
  REGION 1..434: note = Description of Unknown: uncultivated organism sequence
  REGION 1..434: note = Category: MG37 effectors
  REGION 1..434: note = Description: MG37-150 effector
MSDAHLGGPGGPRTSSCATELVCRDCGYRTPLLDTAFKCPACGEGLDIDYDYERAKSLIAERDLGDRPDNVWRFEELLPIVFKRAQDRVGQFSGQTPLIRADRLGAELGLKNLYLKDDSTNRPTLSYKDRVVSMAVARMLALGKDEIGCVSTGNVGTAVAALAAKAGATAYIFYPGNMEKGKAKACRALGAQVCQLDGNYDQANRACRELSLASGIEFANITLRPFYAEGAKTMAFEVVEQLGWEAPDHFVIPAAGGTLSSRVHKGLNELEIVGLAETGATKINIAQASGCGPIARAILDGGEIEPQTPDTAAHSIAFGAPGDGALVVDAVRTRGGSAATVSDAEIFGAIDLLGATEGILTEPAGGTTVAVTAKLAAEGKLGAEETVVAVISGNGLKTLQDHPEKQWPEMVACDLETMGATLADFRQTAAAAPR

SEQ ID NO: 399 - protein, 437 aa, unidentified
  REGION 1..437: note = Description of Unknown: uncultivated organism sequence
  REGION 1..437: note = Category: MG37 effectors
  REGION 1..437: note = Description: MG37-151 effector
MSDAVEPHLSEPYGLRTRSCATELTCRDCGYRTPLLDKAFKCPACGEGLDVDYDYDLAKERIAERGLAERPWNIWRFEELLPILNRRAQQRTAQFAGKTPLIHAERLGAELGLSNLYLKDDSTNRPSLSYKDRVVGMAIARLLELGKDEVGCVSTGNVGTAVAALAAQAGAEPYIFYPGNMEKGKAKACRAMGAQVIQLDANYDGANRACRELALATGMEFANITLRPFYAEGAKTMGFEVVEELDWNSPDHFVIPAAGGTLSSRVHKGLLELEKVGLAETAGTKINIAQAAGCSPIATAITGGGEIVTQTPETAAHSLAIGAPGDGNLVLDAVRSRGGSAAAVSDEEIWGAIDLLGQTEGILTEPAGGTTIASTARLAQEGKLGPDEVVVAVISGNGLKTLQEHPDKSWPEMVPCEVPAMEEILARLRQDAPTSVR

SEQ ID NO: 400 - protein, 430 aa, unidentified
  REGION 1..430: note = Description of Unknown: uncultivated organism sequence
  REGION 1..430: note = Category: MG37 effectors
  REGION 1..430: note = Description: MG37-152 effector
MTLRVAYARELVAGGHRPAVVARILRISRQAVYRVPRPRKPPDAARRPPVDDVERAIVEVAEANPTDGYRLVTAWVQRKLGRAVNRKRVLRVMRERKLIQRRTHEPKRRRPGFFMVTRPGELWHLDMTSIWLAEHGCVSTGNVGTAVASMAAAAGVDAYVFYPNRLEDMKARACMALGAKVCQVEGNYDEANRRCREVAETTGMDFANITLRPFYAEGAKTAAFEIVEQLDWRSPDHIITAAAGGTLSSRLHKGLLELQHLGLSETDPTRIHIAQPSGCNPIATAIIAEEAEVRPVTPETAAHSLAIGAPGDGYLVIDAVLKRGGTGGFASDPEIFAGIDLLAATEGLLTEPAGGTTVAVLEKLAAAGRFAPDDTVVAIITGNGLKTLDDHPPKPWPAKVDCELDAMLAALSELKSGGSLVDSAREQLHA

SEQ ID NO: 401 - protein, 1379 aa, unidentified
  REGION 1..1379: note = Description of Unknown: uncultivated organism sequence
  REGION 1..1379: note = Category: MG37 effectors
  REGION 1..1379: note = Description: MG37-153 effector
MKKWGKRIISGVIAASLLTAAAISGSEQGTGTVASVVQAGTETSFMGKLLEGGYIDVFTSWTQEEQNKFYDGLSPQQQSVFLEVTNCQITRELIKSERSKEELEQFFDRLQPYFLILKKGNQEKPDDEIVIECINQIEGTDYHSSEQYIKQLVSEKKDHYLEFYDALKLVKDGKLEIESAVDDFYKELGFLKKDRVPANSAEVSRQPVQVQKKAAAKAVSDRYSNFKAVSSLKALKDAVASVKKGEKIAVRVDKGFNVTSVIRTNGRHVKIYADGESGHNLNRTAGYKDVMLEVNGGSLTLGAYDGDGRAKNNLYINGKNIAASAPLIEVTSGHLYLNKYSRIIDGYFLADFAGGAGIALNSGTSCYMFGGRIDNCRAKSSKDVSSSSPKSSHGGGVLVGNGSSFYMFAGSIEHCQAIHGGGIMNYGTLRLYGGAISDCAASNQKKDALGGAVKVQGAIETNGKVSSTKGDLGVWKYTRSAAWIVNGKDGYQQGTTTGVVLKNNQADAGGAICLNNGSNGAIQDCNINGNHSTGNGAGICLSNGSYKKGAALELKTGAVIHGNESKGYGGGIYCADSVKGSLSGGTMYDNSAKYGAGIYHEAEFRMSGGTVRSNHSGNSGGGIYAKGKLSMTGGEISANTAATYGGGAILKTVGGSVSGGSIKGNSASANGGGLQIDGTVSLSNASVSSNSASGKGGGISVSSSGTCNLSSGNVSGNTAKAGGGGIYIDGTCKANGSSFTGNQSSGDGGAVYIASGTFTTFQANQAVNIQGNSASGNGSGIYNRNITVLNNNAHILNNQCKNGTQRGIFHEGSLFSIEGNTEIQQEIYLAKDRFVTASNRYFSNSNSLKAKISLDTANIRNGYAVVKGNVSNSADGNYKTGEALLNNQSAGGRFVYAGSGYVMRPGNLKKSSSGCAPFSIVLSQAYQIRYDKNSKEEVMNMPTAAVKYWEEDIKLSALTPTGGSGAFVAWNTKADGTGDGYQPGNVYTANADATLFALWPHYRVEYLPGIRSAAGTTDSQEQNKSEDILLRKNGFRSSEGKFVGWKQDISSARKRMELEPVGYKELKEEREKGKLNHILDFAESYKKVNSSENLDNINSLLDVEDIFFMEGQWDSKPDIILNDKKTFLENEKIKKNDLLKVVKGCYDEEDGELTKKVQIIKLDYTKSMKGYRPETQNFSGGMNDTDVMDTYFMKLEKDETVEVKVTFQAEDSVGNVAEKEGTVCVTYNNPPKLHSQNLAFYQKDIDNNPQTILKEIFENYQVEDIEDDKKGLKVPVSVIDPIPLQIEKLNSVGEHKIVYQAIDSLGKKTKLDSTVYIAENNPFKDSYKYNVRFINKKYLYTLKESSKWKKNEELNAQLTSQLEKTKEDAELKYEFEIKK

SEQ ID NO: 402 - protein, 437 aa, unidentified
  REGION 1..437: note = Description of Unknown: uncultivated organism sequence
  REGION 1..437: note = Category: MG37 effectors
  REGION 1..437: note = Description: MG37-154 effector
MSPSSTPSSSQGTRRRTRSCATDLVCHRCEHRYPLTDTVFACPDCGKGLDILYDYELAARHFAEVPSSERPQNIWHFEELLPIVSASAQARVGRYAGFTPLIHADRLGAELGLSNLYLKDDSTSRPSLSYKDRVVAMSVARLLELGKGEIGCVSTGNVGTAVASLAAKAGVDAYVFYPNRLEDMKARACAALGAKVCQVEGNYDEANRRCREVAEATGMEFANITLRPFYAEGAKTAAFEIVEQLGWASPDHIVSPAAGGTLSSRLHKGLGELQLLGLSETEHTRIHIAQPSGCNPIATAIIAEEAEIHAITPETAAHSLAIGNPGDGYLVIDAVLKRGGTGGFASDPEIFAGIDLLASTEGILTEPAGGTTIAVLEKLAREGKFAPDETVVALVTGNGLKTLDEHPPKPWPEVDCELDAMLAALEGLGREPSPVAA

SEQ ID NO: 403 - protein, 438 aa, unidentified
  REGION 1..438: note = Description of Unknown: uncultivated organism sequence
  REGION 1..438: note = Category: MG37 effectors
  REGION 1..438: note = Description: MG37-155 effector
MSSSSTASTSQGSWTRTRSCATGLACHRCDRQYSLTDTVFACPDCGKGLDIVYDYELAARHFKEVPSAERPQNIWHFEELLPIVDASAQARVGRYAGYTPLIHADRLGAELGLSNLYLKDDSTSRPSLSYKDRVVSMSIARLLELGREEIGCVSTGNVGTAVASLAAKAGVDAYVFYPNRLEDTKARACAALGAKGCQGGGNYDEANRRCREVAAATGLEFANITLRPFYAEGAKTAAFEIVEQLDWQSPDHIVTAAAGGTLSSRLHKGLGELQLLGLAETDPTRIHIAQPSGCNPIATAILAEEAEVHPVTPETAAHSLAIGAPGDGYLVIDAVRKRGGTGGFASDPEIFAGIDLLAATEGLLTEPAGGTTIAVLEKLAGEGKFAPDDTVVAMITGNGLKTLDDHPEKPWPAKIACELDAMLAALEGLGRKPSPIAA

SEQ ID NO: 404 - protein, 437 aa, unidentified
  REGION 1..437: note = Description of Unknown: uncultivated organism sequence
  REGION 1..437: note = Category: MG37 effectors
  REGION 1..437: note = Description: MG37-156 effector
MSDAVDPHLTGPEGPRTRSCATELVCRDCGYRTPLLDTAFKCPACGEGLDVDYDYERAKEAINARGLEGRPGNVWRFEELLPITNLRAQQQVAQFAGKTPLIHAERLGAELGLSNLYLKDDSTNRPSLSYKDRVVGMAIARLLELGKDEVGCVSTGNVGTAVASLAAQAGARPYIFYPGNMEKGKAKACRAMGAQVIQLDANYDQANRACRELAITNGMEFANITLRPFYAEGAKTMAFEVVEELGWQAPDHFVIPAAGGTLSSRVHKGLVELETVGLAETAGSKINIAQASGCSPIATAIVGGGEIEPQMPETAAHSLAIGAPGDGTLVVDAVRSRGGSAATASDDEIWNAIDLLGATEGILTEPAGGTTIASTARLAQEGKIGPDETVVAVISGNGLKTLHEHPEKDWPEGVPCEVGAMEQILNDFRQAAATALH

SEQ ID NO: 405 - protein, 444 aa, unidentified
  REGION 1..444: note = Description of Unknown: uncultivated organism sequence
  REGION 1..444: note = Category: MG37 effectors
  REGION 1..444: note = Description: MG37-157 effector
MSLQTAPRAAQDSRQRTRSCATALVCHRCDNSYSLEESIFACPDCNKGLDVVYDYEHAAQHFRDVPSSERPQNIWHFEELLPIVDARAQARVGQHTGYTPLIRADRLGAEIGIANLYIKDDSSNRPSLSYKDRVVSMSVARLLERGGTEIGCVSTGNVGTAVASLAAKAGVDAYVFYPNRLEDTKARACMALGAKVCQVEGNYDEANKRCRELAEATGMDFANITLRPFYAEGAKTASFEIVEQLDWQAPDHIITAAAGGTLSSRLHKGLVELQLLELAETDSTRIHIAQPSGCNPIATAIVAEEAEIRAVTPETAAHSLAIGNPGDGYLVIDAVLKRGGTGGFASDPEIFAGIDLLAATEGLLTEPAGGTTIAVLEKLAASGRFGPDETVVAIITGNGLKTLDDHPPKPGPAKVDCELDAMEAALAELKQSGTLVDSARQLLH

SEQ ID NO: 406 - protein, 450 aa, unidentified
  REGION 1..450: note = Description of Unknown: uncultivated organism sequence
  REGION 1..450: note = Category: MG37 effectors
  REGION 1..450: note = Description: MG37-158 effector
MNAHRSRSAELGSAAAAPQQRTRSCATALTCARCAVEFPLEQRVFACPDCGKGLDIAYDYELARQRLQELPRAQRPANIWRFEELLPIRDARAQARVGRTAGCTPLIPADRLGAELGIANLYLKDDSTSRPSLSYKDRVVAMSIARLLELGEDEIGCVSTGNVGTAVASYASKAGVAAYVFYPNRLEDMKARACRALAAKVCQVEGNYDEANRRCRELAQTTGMEFANITLRPFYAEGAKTDAFEIVEQLDWRPPDHIITAAAGGTLSSRLHKGLRELQILELADTDATRIHIAQPSGCNPIASAILAEEAEIHPVTPETAAHSLAIGAPGDGYLVIDAVRKRGGTGGFASDPEIFAGIDLLAATEGILTEPAGGTTVAVLEKLAAAGRFGPDDTVVAIVTGNGLKTLDDHPAKPSPAKIECELDAMLAALEELRRGGEPTQSARERLPA

SEQ ID NO: 407 - protein, 447 aa, unidentified
  REGION 1..447: note = Description of Unknown: uncultivated organism sequence
  REGION 1..447: note = Category: MG37 effectors
  REGION 1..447: note = Description: MG37-159 effector
MNAHGSRSGELGSAVAAPQQRTRSCATALVCNRCAVEFPLEQRVFACPDCGKGLDIAYDYELARQRLQELPRAQRPANIWRFEELLPIVDATAQARVGRTAGYTPLIRADRLGSELGLSNLYLKDDSTSRPSLSYKDRVVAMSVARLLELGGEEIGCVSTGNVGTAVASYAAKAGVDAYVFYPNRLEDMKARACRALGANVCQVQGNYDEANRCCREVAAATGMDFANITLRPFYAEGAKTDAYEIVEQLDWQAPDHIVTAAAGGTLSSRLHKGLHELALLELAPTEGTRIHIAQPSGCNPIASAILAEEAEIQPVMPETAAHSLAIGAPGDGYLVIDAVRKRGGTGGLASDPEIFAGIDLLAATEGLLTEPAGGTTIAVLEKLAAAGRFAADDVIVAIVTGNGLKTLDDHPEKPWPAKIDCELDAMLAALAELRGAGRITAERMPA

SEQ ID NO: 408 - protein, 442 aa, unidentified
  REGION 1..442: note = Description of Unknown: uncultivated organism sequence
  REGION 1..442: note = Category: MG37 effectors
  REGION 1..442: note = Description: MG37-160 effector
MSPQTAQSPIRQRTRSCATGLACHRCGNHYPLESSVFACPDCGKGLDILYDYELAARHFLDVPAAERPHNIWHFEELLPIVDASAQAAVGTHSGYTPLIRADRLGAELGLGNLYLKDDSTSRPSLSYKDRVVSMSIARLLERGGSEIGCVSTGNVGTAVASLAAKAGVDAYVFYPNRLEDMKARACMALGAKVCQVEGNYDEANRRCRELAEATGMDFTNITLRPFYAEGAKTAAFEIVEQLGWQAPEHIITAAAGGTLSSRIHKGLIELQLLGLSETDSTRLHIAQPSGCNPIASAIVAEEAEVHPVVPETAAHSLAIGAPGDGYLVIDAVLKRGGSGGYATDPEIFAGIDLLAATEGLLTEPAGGTTIAVLEKMAAAGTFDTDETVVAIITGNGLKTLDDHPAKPWPAKVACERDAMMAALEQLKEGPSLTESARGRLNI

SEQ ID NO: 409 - protein, 437 aa, unidentified
  REGION 1..437: note = Description of Unknown: uncultivated organism sequence
  REGION 1..437: note = Category: MG37 effectors
  REGION 1..437: note = Description: MG37-162 effector
MSDAVDPHRTEPYGLRTDSCATELTCRDCGYRTPLLDKAFKCPACGEGLDVDYDYDLAKKRISERGLDERPWNIWRFEELLPILNRRAQQRVAQFAGKTPLIHAERLGAELGLSNLYIKDDSTNRPSLSYKDRVVGMAIARLLELGKDEVGCVSTGNVGTAVAALAAQAGARPYIFYPGNMEKGKAKACRAMGAQVIQLDANYDGANRACRELALATGMEFANITLRPFYAEGAKTMAFEVVEELGWQPPDHFVIPAAGGTLSSRVHKGLLELEKVGLAETAGAKIDIAQASGCSPISTAILEGGELVPQTPETAAHSIAIGAPGDGALVVDAVRSRNGSAAMVSDEEIFGAIDLLGATEGILTEPAGGTTIASTARLAQEGKIGPDETVVAVISGNGLKTLHEHPEKTWPEGVPCEVGAMEEVLNDFRRAVAAAPH

SEQ ID NO: 410 - protein, 444 aa, unidentified
  REGION 1..444: note = Description of Unknown: uncultivated organism sequence
  REGION 1..444: note = Category: MG37 effectors
  REGION 1..444: note = Description: MG37-163 effector
MSPSSTASPQGTRQRTRSCATDLVCHRCDHRYPLTDTVFACPDCGKGLDIVYDYELAASHFRDFPSSERPQNIWHFEELLPILDASAQARVGQHSGYTPLIRADRLGAELGVNNLYLKDDSSNRPSLSYKDRVVSMSVARLLERGKTEIGCVSTGNVGTAVASMAATAGVDAFIFYPNRLEETKARVCMALGAKVVQVEGNYDEANRRCREVAAETGMDFANITLRPFYAEGAKTAAFEIVEQLQWASPDHIVSPAAGGTLSSRMHKGLGELQLLGLAETEATQIHIAQPSGCNPIASAILAEEAEVHPVMPETAAHSLAIGAPGDGYLVIDAVHKRGGTAAFASDPEIFAGIDLLAATEGLLTEPAGGTTIAVLEKLAAAGRFAPEDTVVALITGNGLKTLDEHPPKAWPAKIDCELESMLEALDELKRTPTLMQTAHEQLRA

SEQ ID NO: 411 - protein, 437 aa, unidentified
  REGION 1..437: note = Description of Unknown: uncultivated organism sequence
  REGION 1..437: note = Category: MG37 effectors
  REGION 1..437: note = Description: MG37-164 effector
MSDAVDPHRTEPYGLRTRSCATELNCRECGYRTPLLDKAFKCPACGEGLDVDYDYELARERIAERSHDERPWNIWRFEELLPILNRRAQERVAQFAGKTPLIHAERLGAELGLSNLYLKDDSTNRPSLSYKDRVVGMAIARLLELGKKEVGCVSTGNVGTAVAALAAQAGARPYIFDPGNMEKGKAKACRAMGAQVIQLDANYDQANRACRELALATGMEFANITLRPFYAEGAKTMAFEVVEELGWKAPDHFVIPAAGGTLSSRVHKGLVELETVGLAETAAAKINIAQASGCSPIATAITGGGEIVTQTPETAAHSLAIGAPGDGNLVVDAVRSRDGSAATASDEEIWSAIDLLGTTEGILTEPAGGTTIASTARLAQEGKIGPDDVVVAIISGNGLKTLQEHPDKPWPEMVTCEVGPMEEILNDFRQAAAAALH

SEQ ID NO: 412 - protein, 430 aa, unidentified
  REGION 1..430: note = Description of Unknown: uncultivated organism sequence
  REGION 1..430: note = Category: MG37 effectors
  REGION 1..430: note = Description: MG37-165 effector
MSPFAEETRSCATELVCRDCGQRLPLMDTTFKCLGCGQGLDIDYDYELAKARLGELPMSEREINIWRFEELLPILDARAQRRVGFYSGRTPLIHADRLGAELGLRKLYLKDDSTQRPSLSYKDRVVSMAVARLLELGKEEIGCVSTGNVGTAVASLAAKAGVTAYVFYPSNLEPGKARTCRALGAAVIQLDGNYDQANRACRELALASGVQFANITLRPFYAEGAKTVAYEVVEKLDWISPDHFVIPAAGGTLSSRVHKGLQELEKVGLSETAATKIHAAQPDGCGPIAGAILDGSGEIQPQTPHTAAHSLAIGAPGDGPLVVDAVMSRGGSAATVTDEEIFEAIDLLGATEGILTEPAGGTTVASTAKLAAEGKFGPDETVVAVISGNGYKTLDEHPEKPWPSMVSCDVESMGEMLAEFRQHGVGATLS

SEQ ID NO: 413 - protein, 430 aa, unidentified
  REGION 1..430: note = Description of Unknown: uncultivated organism sequence
  REGION 1..430: note = Category: MG37 effectors
  REGION 1..430: note = Description: MG37-166 effector
MLNGEDRTRSCATELVCRDCGRRLPLLDTTFKCLGCGQGLDVDYDYEMATARLAELPPAERPLNIWRFEELLPILDGRAQARVGRNSGRTPLIHADRLGAELGLRNLYLKDDSTARPSLSYKDRVVSMAVARLLELGKEEIGCVSTGNVGTAVASLAAKAGVTAYVFYPSNLEKGKARACRALGAAVCQLDGNYDEANRACRELALTSGIQFANITLRPFYAEGAKTVAYEVVEQLDWRSPDHFVIPAAGGTLSSRVHKGLTELEKVGLAETGATKISVAQADGCGPIAGAILDGSGEIEPQTPHTAAHSLAIGAPGDGPLVVDAVLSRGGSAATATDAEIFDAIDLLGATEGILTEPAGGTTVAATMKLAGEGKLRPDDTVVAVISGNGYKTLDEHPDKPWPEMVACDVESMGEMLAEFRQHGVGAALT

SEQ ID NO: 414 - protein, 445 aa, unidentified
  REGION 1..445: note = Description of Unknown: uncultivated organism sequence
  REGION 1..445: note = Category: MG37 effectors
  REGION 1..445: note = Description: MG37-167 effector
MSSSSTTASSQGTRQRTRSCATELVCHRCDHRYPLTDTVFACPDCGKGLDIAYDYELAGTHFRDFPISERPQNIWHFEELLPILDANAQARVGQYSGYTPLIRADRLGAELGLNNLYLKDDSTSRPSLSYKDRVVSMSVARLLERGKTEIGCVSTGNVGTAVASMAAKAGVDAFIFYPNRLEEMKARACMALGAKVVQVEGNYDEANRRCREVAAETGMDFANITLRPFYAEGAKTAAFEIVEQLQWASPDHIVSPAAGGTLSSRMHKGLGELQLLGLSETEGTQIHIAQPSGCNPIASAILAEEAEVVPVMPETAAHSLAIGAPGDGYLVIDAVHKRGGTAAFASDPEIFAGIDLLAATEGLLTEPAGGTTIAVLEKLAAAGRFAPEDTVVALITGNGLKTLDEHPSKAWPAKIDCELDPMLGALAELKRTPTLMQTAREQLRA

SEQ ID NO: 415 - protein, 437 aa, unidentified
  REGION 1..437: note = Description of Unknown: uncultivated organism sequence
  REGION 1..437: note = Category: MG37 effectors
  REGION 1..437: note = Description: MG37-168 effector
MSDAVEPHQGEAVGPRTTSCATELVCRDCGYRTPLLDTAFKCPACGEGLDIDYDYERATSLIAERGLADRPDNIWRFEELLPILSQRAQAKVGQFAGQTPLIKADRLGAELGLKNLYLKDDSTNRPSLSYKDRVVSMAVARMLALGKNEIGCVSTGNVGTAVAALAAKAGATAYNFYPRNMEKGKAKACRALGAQVCQLDGNYDQANRACRELSLASGIEFANITLRPFYAEGAKTMAFEVVEQLDWAAPDHFVIPAAGGTLSSRVHKGLNELEIVGLAETAGTKINIAQASGCGPIATAILGGGEIEPQTPDTAAHSIAIGAPGDGALVLDAVRTRGGSAATASDAEIFAAIDLLGATEGILTEPAGGTTVAATARLAAEGKIGADDTVVAVISGNGLKTLQDHPEKQWPEMVSCDVETMGELLAEFRQTAAAALR

SEQ ID NO: 416 - protein, 430 aa, unidentified
  REGION 1..430: note = Description of Unknown: uncultivated organism sequence
  REGION 1..430: note = Category: MG37 effectors
  REGION 1..430: note = Description: MG37-169 effector
MSLPADQRTRSCATELVCPDCGIGLPLSDTTFRCPDCDKGLDVVYDYELARQRIAEIGPAQRPQNIWRYEELLPIVDRAASERVGAFAGQTPLIRADRLGAELGLRNLYVKDDSTNRPSLSYKDRVVSMAVARAIELGCTEIGCVSTGNVGTATAALANKAGLTPYIFYPANLERAKARSCRALGAEVCQLNGNYDQANKACRELAEASGMQFANITLRPFYSEGAKTLAYEVVEQLDWVSPDHIVMPAAGGTLSSRVHKGLNELEAVGLAQTAHTRAHIGQPSGCSPIATAIVEDAAEIVHQVPETLAQSLAIGAPGDGPLVVDAVRSRRGSAAAVPDGEIITAMELLAATEGVLTEPAGGTTLAATMKLAQQGVIRPDDTVVVVISGNGLKTLSEQPVRPWPERIPCDPAAMEEVVRGFRRSGVGAAL

SEQ ID NO: 417 - protein, 445 aa, unidentified
  REGION 1..445: note = Description of Unknown: uncultivated organism sequence
  REGION 1..445: note = Category: MG37 effectors
  REGION 1..445: note = Description: MG37-170 effector
MSTVTSQKRAPEPARRTRSCAKALACHRCDLEYPLQERVFACPQCAKGLDVIYDYELAARRFEEVPREARPHNIWHFEELLPIVDAAAQARVGLTAGYTPLIAANRLGAELGLSNLYLKDDSTSRPSLSYKDRVVAMSVARLLELGEQEMGCVSTGNVGTAVASYAAKAGVDAYVFYPNRLEDTKARACRALGAKVCQVEGNYDEANRRCREVAEATGLEFANITLRPFYAEGAKTSAFEICEQLDWRAPDHIVTAAAGGTLSSRMHKGLRELAQLGLADTDPTRIHIAQPSGCNPIASAIIAEEAEIRAVTPETAAHSLAIGAPGDGYLVIDAVLKRGGTGGFASDPEIFAGIDLLAATEGILTEPAGGTTIAVLEKLAAAGRFGADESVVAIVTGNGLKTLDDHPEKPWPAKIDCELDAMLAALEDLRRGGSPSASERERLPA

SEQ ID NO: 418 - protein, 445 aa, unidentified
  REGION 1..445: note = Description of Unknown: uncultivated organism sequence
  REGION 1..445: note = Category: MG37 effectors
  REGION 1..445: note = Description: MG37-171 effector
MSPSSTASPQGTRKRTRSCATDLVCHRCEHRYPLNDTVFACPDCGKGLDIAYDYELAASHFRASPSSERPQNIWHFEELLPILDASAQARVGQHSGYTPLIRADRLGAELGLSNLYLKDDSSNRPSLSYKDRVVSMSLARLLERGKTEIGCVSTGNVGTAVASMAAKAGVDAFIFYPNRLEEMKARACMALGAQVVQVQGNYDEANRRCREVAAETGMDFANITLRPFYAEGAKTAAFEIVEQLQWASPDHIVSPAAGGTLSSRMHKGLGELQLLGLSETDATQIHIAQPSGCNPIASAILAEEAEVHPVMPETAAHSLAIGAPGDGYLVIDAVHKRGGTAAFASDPEIFAGIDLLAATEGLLTEPAGGTTIAVLEKLAAAGRFAPEDTVVALITGNGLKTTDCLQDAYEQNKAIRPRLTDFENFVEERNAVNEALRLVGESYVR

SEQ ID NO: 419 - protein, 445 aa, unidentified
  REGION 1..445: note = Description of Unknown: uncultivated organism sequence
  REGION 1..445: note = Category: MG37 effectors
  REGION 1..445: note = Description: MG37-172 effector
MSTPTAQSPHQGSRQRTRSCATGLVCHRCGHSYPLEDTVFACPDCGKGLDVEYDYELAARRFEEVPRSQRPQNIWRFEELLPIVDATAQARVAQHAGWTPLIRADRLGAELGLANLYLKDDSTSRPSLSYKDRVVSMSVARLLEKGKQEIGCVSTGNVGTAVASMAAKAGVDAYVFYPNRLEDMKARACRALGAKVCQVEGNYDEANKRCREVALATGMDFANITLRPFYAEGAKTAAFEIVGQLEWQAPEHIITAAAGGTLSSRLHKGLGELQLLGLAETDPTRIHIAQPSGCNPIASAILAEEAEVHAVTPETAAHSLAIGAPGDGYLVIDAVLKRGGTAGFASDPEIFAGIDLLAATEGLLTEPAGGTTIAVLEKLAAAGRFDPGDTVVAIITGNGLKTLDDHPAKPWPDKIDCELDAMLEALATLKGSGSLVDDAREQLQA

SEQ ID NO: 420 - protein, 358 aa, unidentified
  REGION 1..358: note = Description of Unknown: uncultivated organism sequence
  REGION 1..358: note = Category: MG37 effectors
  REGION 1..358: note = Description: MG37-173 effector
MSEAVDPRLGGPGGPRTSSCATELVCRECGYRAPLSDTAFRCPTCDAGLDVDYDYERAKASIAARGLAERPWNIWRFEELLPIAGRRAAGTVAQFAGQTPLIPARRLGAELGLRNLYVKDDSTNRPSLSYKDRVVGMAVARALELGAGEIGCVSTGNVGTATASLAAAAGLKPYVFYPANLERAKARGCRALGAQVCQVDGNYDEANRACRELTEATGIPFANISLRPFYAEGAKTLAYELVEGLGWRSPDHVVMPAAGGTLSSRVHKGLLEFEILDLAETAATKLHVGQPTGCSPIVTTIVAGAKETVPQQPETLAHSLAIGAPGDGDLVVEAVRSRGGSAAAVPDGRSPLTTSSSS

SEQ ID NO: 421 - protein, 439 aa, unidentified
  REGION 1..439: note = Description of Unknown: uncultivated organism sequence
  REGION 1..439: note = Category: MG37 effectors
  REGION 1..439: note = Description: MG37-174 effector
MSDAADPHLGEAIGPRTSSCATELVCRDCGYRTPLLDTAFKCPACGEGLDIDYDYERAKSLIAKRGLAERPDNIWRFEELLPILSQRAQGMVGQFSGQTPLIKADRLGAELGLKNLYLKDDSTNRPTLSYKDRVVSMAIARMLALGKDEIGCVSTGNVGTAVAALAAKAGAMAYIFYPGNMEKGKAKACRALGAQVCQLDGNYDEANRACRELSLASGIEFANITLRPFYAEGAKTVAYEVVEKLDWVSPDHFVIPAAGGTLSSRVHKGLVELEKVGLSETAQTKIHAAQADGCGPIAAAILDGSGEIEPQTPHTAAHSLAIGAPGDGPLVVDAVMSRGGSAATASDPEIFEALDLLGATEGILTEPAGGTTVASTAKLAAEGKLGPDDTVVAVISGNGYKTLDEHPEKPWPSMVSCDVESMGVMLAEFRQHGAGATLS

SEQ ID NO: 422 - protein, 444 aa, unidentified
  REGION 1..444: note = Description of Unknown: uncultivated organism sequence
  REGION 1..444: note = Category: MG37 effectors
  REGION 1..444: note = Description: MG37-175 effector
MSTQTAHPTAGPRQRTRSCATGLVCHRCEHSYPLESTVFACPDCGKGLDIVYDYELAASHFRDVPSSERPQNIWHFEELLPIVDASAQARVGQHSGYTPLIRADRLGAELGLSNLYLKDDSSNRPSLSYKDRVVSMSVARLLERGETEMGCVSTGNVGTAVASLAAKAGVAAYVFYPNALEDTKARACMALGAKVCQVEGNYDEANKRCRELAEATGMDFANITLRPFYAEGAKTAAFEIVEQLDWQSPDHIITAAAGGTLSSRLHKGLVELQLLELAETDPTRIHIAQPSGCNPIATAIVAEEAEIHAVTPETAAHSLAIGNPGDGYLVIDAVLKRGGTGGFASDPEIFAGIDLLAATEGLLTEPAGGTTIAVLEKLAASGRFAPDDTVVAIITGNGLKTLDDHPRKPWPAKVDCELDAMMAALSELKSGGTLVESAREQLRF

SEQ ID NO: 423 - protein, 388 aa, unidentified
  REGION 1..388: note = Description of Unknown: uncultivated organism sequence
  REGION 1..388: note = Category: MG37 effectors
  REGION 1..388: note = Description: MG37-176 effector
MLLHADVRERLGEIPPAEREINIWRFEELLPIVDAKAQARVGRYSGRTPLIHADRLGAELGLKKLYLKDDSTSRPSLSYKDRVVSMAVARLLELGEDEIGCVSTGNVGTAVSSLASKAGVRAYVFYPSNMERGKARACRALGAAVCQLDGNYDEANRACRELALASGIQFANITLRPFYAEGAKTVAYEVVEQLEWEAPDHIVIPAAGGTLSSRVHKGLDELETVGLAETSGVKIDVAQAEGCSPIATAISDGSGRIEPQTPHTAAHSIAIGAPGDGRLVVDAVMSRGGSAATASDQEIFEAIDLLGATEGILTEPAGGTTIACTARLANEGKLGPEDTVVAIVSGNGYKTLDEHPDKPWAEGVACDVDAMSEMLEEFRQHGVGATLG

SEQ ID NO: 424 - protein, 445 aa, unidentified
  REGION 1..445: note = Description of Unknown: uncultivated organism sequence
  REGION 1..445: note = Category: MG37 effectors
  REGION 1..445: note = Description: MG37-177 effector
MSTHTAESPARGARQRTRSCATGLACHRCQHSYELADTVFACPDCGKGLDVVYDYELAARHFRDFPSSERPRNIWHFEELLPIVDAGAQARVGQHSGYTPLIRAERLGAELGLSNLYLKDDSTSRPSLSYKDRVVSMSVARLLERGKREIGCVSTGNVGTAVASLAATAGVDAYVVYPNRLEDMKARACRALGAKVFQVEGNYDEANRRCRELAEATGMDFANITLRPFYAEGAKTAAFEIVEQLGWQAPDHIVTAAAGGTLSSRLHKGLGELQLLGLSQTDPTRIHIAQPSGCNPIASAILAEEAEVHPVTPETAAHSLAIGAPGDGYLVVDAVRKRGGTGGFATDPEIFAGIDLLAATEGILTEPAGGTTIAVLEKLAAAGRFAPDDTVVAIVTGNGLKTLDDHPQKPWPDKVDCELDAMLAALAELKSGGTLMDTAREQLHA

SEQ ID NO: 425 - protein, 1341 aa, unidentified
  REGION 1..1341: note = Description of Unknown: uncultivated organism sequence
  REGION 1..1341: note = Category: MG37 effectors
  REGION 1..1341: note = Description: MG37-178 effector
MKKWGKRIISGVIVASLLTAAAISGSEQGTATVSSVVQAGTETSFMGKLLEGGYIDVFTSWTQEEQNKFYDRLSPKEKSVFLEVTNCQIIRELIKSERTKEELERFFDRLEPYFLMLKKGSQEKPDEEIVIECINQIEGKDYESLEQYLKQLVSEKHGYYLDFYTALKRVKDGKSEIESAVNDLYKNLGFLKEDKVPAKPDKVSPLPVQVQKKAAKAVSDGYSNFKAVSSLKALKDAVASVEKGEKIAVRVDKGFNVTSAIRTNGRHVKIYADGESAHNLNRAVGYKDAMLEVNGGSLTLGAYDGDGRAKNNLYINGKNVAASAPMIEVTSGQLYLNKYSRIIDGYFLADFAGGAGIAMNSGTSCYMFGGKIDSCRAKSSKDVSSSSPKSSHGGGVLVGNGASFYMFAGSIEHCQAIHGGGIMNYGTLRLYGGTVSDCAASNKKKDALGGAVKVQGAIETDGKVNSTKGDLGVWKYTRSGTWAVNGKDGYQQKSTTGVVLKNNQADAGGAVCLNNGSNGAIQDCNIYGNHSNGNGAGICLSNGSYKKGAALEIKTGAVIHGNESKGYGGGIYCADSVKGSLRGGSMYDNSAVYGAGVYHEAEFRMTGGTVRNNHSGNSGGGIYAKGKLSMTGGEISSNTAATYGGGAILKNAGGSLSGGSIKNNTASVNGGGLQIDGAVSFSNVSVSSNSASGKGGGISVSSAGTCSFSSGNVSGNTSKAGGGGIYIDGTCKANGSNFTGNQSYGDGGAVYIASGTFTTFQANQAVNIQGNSASGNGSGIYNRNTAILNNNAHILNNQCKNGTQRGIFHEGSLFSIEGHTEIQQEIYLAKDRFITVSNRYFSNSNSLTARISLDAANIRNGYAAVKGNISNSADSNYKTGDALLNNQSVNGRFMYAGSGYVMRPGNLKKSSSGCVPYSIVLSQAYQIRYDKNSKEEVMNMPTAAVKYWEEDIRLSALTPSGGSGVFVAWNTNADGTGDGYQPGNVYTANADATLFALWPHYRVEYLPGIQGAAGTTDSQEQNKSENILLRKNSFRSSEGKFIGWKQDISSARKRRELEPVGYKELKEERERGKSDHILAFAKSYKKVNASVNLDNKNSLLNAEDIFFMEGQWDSKPDIILHDKKTFLENEKIRKNDLLKAVKGCYDDEDGDLTEKVQIIKLDYGTSMEGYRPEPQNFSGGMNDTDVIDTYFMKLEKDETVEVKVIFQVEDSVGNVAEKEGTVYVTYNNPPKLHSQNLAFYQKDLDNNPQTVLKEILENYQVEDLEDDKSGLKVPVSVVDPIPMQIEKLNSVGEHKIVYQAIDSLGKKTKLDSTVYIAENNPFKDSYKYLSLIHISEPTRPY

SEQ ID NO: 426 - protein, 438 aa, unidentified
  REGION 1..438: note = Description of Unknown: uncultivated organism sequence
  REGION 1..438: note = Category: MG37 effectors
  REGION 1..438: note = Description: MG37-179 effector
MSPSTTSSSTQGARKLTRSCATGLICHRCDRRYPLTDAVFACPDCGKGLDIAYDYERAARHFKEVPSSERPQNIWHFEELLPIVDASAQARVGRYAGYTPLIHADRLGAELGLSNLYLKDDSTSRPSLSYKDRVVSMSVARLLELGKDEIGCVSTGNVGTAVASLAAKAGVDAYVFYPNRLEDMKARACRALGAKVCQVEGNYDEANRRCREVAEATGLEFANITLRPFYAEGAKTAAFEIVEQLDWQSPDHIVTAAAGGTLSSRLHKGLGELQLLGLSETDPTRIHIAQPSGCNPIATAILAEEAEIHAVMPETAAHSLAIGNPGDGYLVIDAVRKRGGTGGFASDPEIFAGIDLLAATEGLLTEPAGGTTIAVLEKLAREGKFAPDDTVVAIVTGNGLKTLDEHPAKPWPAKVDCELAAMLAALDGLGRKPSPVAA

SEQ ID NO: 427 - protein, 1004 aa, unidentified
  REGION 1..1004: note = Description of Unknown: uncultivated organism sequence
  REGION 1..1004: note = Category: MG53 effectors
  REGION 1..1004: note = Description: MG53-1 effector
MNRSFTARLSAKTPRRLRDYLWATHRIFNESLAYVLKHYFWMQNLNDRTAEQDRRNRLRNRFDDAQLDRLRMIYRDMMGLDLPKEKRAGRSQSAHAWMEPITFSTESKGSGPGESSKNLLPQVKEAIRQIRRRNTWLFDRELAFPLSPNKGFRRGLFEAAARRILNFEQNQDTHKSYLEEARSQYERWTGGEQRDVTDEEGADERRAGWRRTVLLRAWGKEQNAQREAEIDEIARLNWSDFERARVAFEAYEQERSEKRAREHGQQFDGTKVERINAAMTRGWRDIYERLMPPDAQGAPDRTTAEEVIKGYQMSEPRRIGDVNFFLWLADKPHLWRYVDTMRAYNTHQRKLQQYAKDIQFRYPRYNVRPDWFTFSETSPGYMYTIVSMSPLVVELSVLVPKEDEPILKKHAKGKPLTEDEQARLSQPIDWSTYHLTREALANRLDRYREDLTKKHADLIAKANLGPVHDWTNGMWQQLLDGFFRGDPPLDMARFTRVMVRYALSTDRRLRPFVPQPSEDSDLIGRLEVLSNERKKRHYQGTYEYWFGPLAEARGLLVERRRYLRRIPLTVGGIRLEYRGRLRSDAEPIFTLSCELDERLNGPEGKRVFPAPAHRIPPKSDTAETAEGSAASAANKRRISKKRPKMPVGLRVMAVDLGLRHPGTGAVVEFVDDGHGHGRLPEPLKPVAVEILDVAGTSLVHIQRHQDERRRKQKKACPRGSRRRFEIRGAHLAHGQEFARGLLNHVENLKDDRRKKAAHTILRAALKHKVDYIVFENLAGYRPEMEFGRKVNAALMTWNRRELVEFVKMEAAPLGIHVYEWVPPHHTSRFCHRCGAVGHRFSHIRSIDAKKDALAPAEPLLDNAGNPKLDSYGKPILRRKWTPQARRVRGTPLGLIAGMRQAIDGGRQFCCTECGLIVNADYNAAMNLARKLADEFHAYQRYAYDREKRTWTVNGETLPGRDFWERAKALVQQRLNQRFRQPPETPPAGGWPRSLEPSPIEPTPW

SEQ ID NO: 428 - protein, 1005 aa, unidentified
  REGION 1..1005: note = Description of Unknown: uncultivated organism sequence
  REGION 1..1005: note = Category: MG53 effectors
  REGION 1..1005: note = Description: MG53-2 effector
MNRSFTARLSRKTHRRLRDYLWATHRIFNESLAYLLKHYFWMQNLTDRELEQDKKNRLRQRFDAAQLDQLQLIYRDMMGLDLPKEKRAGRSQSAQAWMEPITFSTRSTGKGPGELSTNILPKVKVAIRTMRQQNLWVFDRELAFPIEPHNGFRRGLFGGAARRILNFEQNQETHRGYLEDAKRAYERWRGGQAREAAEDDTVDARRAGWRRTVLLRAWGEGQEPNREAEIDGIAQLQWADFQRAREEFSQYESQRAADRAREQKRPVTENAVEKINAAMTRGWRDVYQQRLMPPDADGPPDAATAGRLIKDYQAAEPTRIGDINFFLWLADKPHLWRFVDTMKAYNAHQRKLERYGRPIQFTYPRYNRRPEWFTFSETSPGHMYTIVSMTPLKVDLAVFVPNEDVPLLEKLSKGQPLTGEETRRLNEPLDWTAYRLTPERLVERRNAHRTKLTERIPDAIAKYGLDAVHAWTDGVWERLLGGFFREDPPLDMSRFTRVMVRYSLSTDVRLRPFAPEPASEEDLLGRLVVRSNDRQKPHWQGTYQYMFGPLTEPNDSLPDRRRHLRAMPMVVGGIRLEYRDCLRNDADPIFTLSCELDERVAGPEGKQVYPAPQHRIPKKAQPTEAAEEGTPQEGKKRKDAKKRPKMPVGLRVLSVDLGMRHIGTGAVVEFVDDGHGNGRLPHPLKPVGIEFLDAPGIALRHIDRHSDERRRKQRKACPRGSRRAFEIRGAHLPRGQVFARHLLDHTENLKDDRRKKAAHAILRAALKHNVDYIVFENLKGYRPDFEFGRRVNATLMKWNRRELVEFVKMEAQPFGIWVYDFVRPSHTSQFCHRCGAAGYRFSQITRREAAFDTPAPKEPLFDEHGNRKLDSNGKPLFRHRWTPQARRIRGTPLGLIAGMRQAIDGGKHFCCSECGLIVNADYNAAMNLARKLADDFSAYQKYSYNPEDKSWALSGKRMAGKTFWEHIKATVQQRLNTRFGQPVQTPPAGGWPKEFAPESIGLTPW

SEQ ID NO: 429 - protein, 784 aa, unidentified
  REGION 1..784: note = Description of Unknown: uncultivated organism sequence
  REGION 1..784: note = Category: MG54 effectors
  REGION 1..784: note = Description: MG54-1 effector
MGVRALRARIECDRETLLHLWRTHCAFNQRLLSILTKLFGMRRGELGETAARRALYQRVARFLLARDSKDAPYLLNSVSIQGWKPATALKMKVRMPAPDGTLAEVSADTWAPEAAKLSAHGTLAYDKEAVRDGLPDSLFQPMLRDAVAYISGHIELARNWEAEHADWLKAKAEWEEKDEHKKYLALRPRFDAFEQSVGGKAGKRRERWHLYLTWLRENPALAAWRGGPPAVHPLDAKATARVAKAKPWKKRSVEADEFWKANPELRELDKLHGYYEREFVRRRKTKKNPDGFDHRPTFTLPHAVLHPRWTLFNAPQTSPQGYADLRLPQRPGTLGSVKLRLLTGEKAPDGCPNEWVGVQFRADPRLSQFAERAEAQEIRKGKKKGTQKTVRVFRFVDQQLNCERPAQISGAKLIFKNVKLNDDGSLKSATPYLVFACTIDNLPLTEHARAIQWSETGEVTKTGKKRKAKKLPTGLVTCAVDLGLRNLAFLTLATSGEGPQNNTHDGIRVLRSRNQWLALEETAGTHPGRWSAGPDLAHIAAHKREIRRLRRLRGKPVKGQQSHVELQGHIDHMGQDRFKKAARAIVNFALNVDRAAGQSGQPYPRADLLIVEKLEGFIPDAARERGINRALVAWNRGQLVTRIKEVAADAGLKLFPVHPAGTSQCCSRCGALGRRYSIVRDQQTGVPAIRFGWVEKLFACPNRECPGRAPDKPDQPFTCNADHNASLNLHRRFVLDDRAVAAFFAWKNKTNAERERELTQMDQALRPELEKLHRLPLAELATPF

SEQ ID NO: 430 - protein, 784 aa, unidentified
  REGION 1..784: note = Description of Unknown: uncultivated organism sequence
  REGION 1..784: note = Category: MG54 effectors
  REGION 1..784: note = Description: MG54-2 effector
MGVRALRARIECDRETLLHLWRTHCAFNQRLLSILTKLFGMRRGELGETAARRALYQRVARFLLARDSKDAPYLLNSVSIQGWKPATALKMKVRMPAPDGTLAEVSADTWAPEAAKLSAHGTLAYDKEAVRDGLPDSLFQPMLRDAVAYISGHIELARNWEAEHADWLKAKAEWEEKDEHKKYLALRPRFDAFEQSVGGKAGKRRERWHLYLTWLRENPALAAWRGGPPAVHPLDAKATARVAKAKPWKKRSVEADEFWKANPELRELDKLHGYYEREFVRRRKTKKNPDGFDHRPTFTLPHAVLHPRWTLFNAPQTSPQGYADLRLPQRPGTLGSVKLRLLTGEKAPDGCPNEWVGVQFRADPRLSQFAERAEAQEIRKGKKKGTQKTVRVFRFVDQQLNCERPAQISGAKLIFKNVKLNDDGSLKSATPYLVFACTIDNLPLTEHARAIQWSETGEVTKTGKKRKAKKLPTGLVTCAVDLGLRNLAFLTLATSGEGPQNNTHDGIRVLRSRNQWLALEETAGTHPGRWSAGPDLAHIAAHKREIRRLRRLRGKPVKGQQSHVELQGHIDHMGQDRFKKAARAIVNFALNVDRAAGQSGQPYPRADLLIVEKLEGFIPDAARERGINRALVAWNRGQLVTRIKEVAADAGLKLFPVHPAGTSQCCSRCGALGRRYSIVRDQQTGVPAIRFGWVEKLFACPNRECPGRAPDKPDQPFTCNADHNASLNLLRRFVLDDRAVAAFFAWKNKTNAERERELTQMDQALRPELEKLHRLPLAELATPF

SEQ ID NO: 431 - protein, 783 aa, unidentified
  REGION 1..783: note = Description of Unknown: uncultivated organism sequence
  REGION 1..783: note = Category: MG55 effectors
  REGION 1..783: note = Description: MG55-2 effector
GCKLMYELKHRIIDRLEQMFSFKTRGEWFREGVCPQCGKKELYTHAHNPRIVKCGRLNKCGYEEHVKDICEDLFKDWSKEFPKTEAKPHAAADAYLEHGRGFDLTKLKGRFTQEAFHNEQKFPGQVSATVRFELAPGVYWERLIDRPERFGRQKANFKGKYEGLSWTMWQLDDLCHAESIWITEGIFNSIALTLSGVPSIATMSSGNYPVKLLQQITDRCHELKKDKPRLCWAYDNDKEGRKKLKKFHLRALQEKWSSTAALPPNQIKGRSFDWNDLYMHDLLHSEERKKYRHYGELLIAESAEQAGLLIYNFKEGRTRTFFFNHEFRLYYFNLDIDKYNKALDIIEKNENLNHLLDEQKREQALRDSASCTEICNRQIKPLYFQRNEITDEHWYYAQIVSEDTEVNTTFTSSMIRNSDKFAERLLGVNEGAWWTGSTNQLVSYMKPRTEFIKRVKTIDYIGYTKEDKAWLFNDYAVHDGQIIPINEHDYFRIKRLDIKTLSNDPQIQLNPKAKFNPTWWKDFYRVRGNKGIVALAWWMGTYFAEQIRGLNSSYPFMEIVGQAGAGKSRLIEFMWKLSGRKDYEGFDPNKSTSVAVYRNFAKISNLPVVLIEGDRNDINGNAIQKAKFSWDELKDAFNGRAIRSKGVKNAGNDTYEPPFRGAILISQNTQIQASEAILTRTLLLEFDRSGQSLETKRIVDELDRMELEDACTFMTHCLRNEDKILETYASKLQSIEDHYHEIGITHTRIALCHAQVAALIEAMTKHVLPIDLEDMLEAQEMLE

SEQ ID NO: 432 - protein, 788 aa, unidentified
  REGION 1..788: note = Description of Unknown: uncultivated organism sequence
  REGION 1..788: note = Category: MG55 effectors
  REGION 1..788: note = Description: MG55-3 effector
GEWFREGVCPQCGKKELYTHAHNPRIVKCGRLNKCGYEEHVKDICEDLFKDWSKEFPKTEAKPHAAADAYLEHGRGFDLTKLKGRFTQEAFHNEQKFPGQVSATVRFELAPGVYWERLIDRPERFGRQKANFKGKYEGLSWTMWQLDDLCHAESIWITEGIFNSIALTLSGVPSIATMSSGNYPVKLLQQITDRCHELKKDKPRLCWAYDNDKEGRKKLKKFHLRALQEKWSSTAALPPNQIKGRSFDWNDLYMHDLLHSEERKKYRHYGELLIAESAEQAGLLIYNFKEGRTRTFFFNHEFRLYYFNLDIDKYNKALDIIEKNENLNHLLDEQKREQALRDSASCTEICNRQIKPLYFQRNEITDEHWYYAQIVSEDTEVNTTFTSSMIRNSDKFAERLLGVNEGAWWTGSTNQLVSYMKPRTEFIKRVKTIDYIGYTKEDKAWLFNDYAVHDGQIIPINEHDYFRIKRLDIKTLSNDPQIQLNPKAKFNPTWWKDFYRVRGNKGIVALAWWMGTYFAEQIRGLNSSYPFMEIVGQAGAGKSRLIEFMWKLSGRKDYEGFDPNKSTSVAVYRNFAKISNLPVVLIEGDRNDINGNAIQKAKFSWDELKDAFNGRAIRSKGVKNAGNDTYEPPFRGAILISQNTQIQASEAILTRTLLLEFDRSGQSLETKRIVDELDRMELEDACTFMTHCLRNEDKILETYASKLQSIYDHYHEIGITHTRIALCHAQVAALIEAMTKHVLPIDLEDMLEAQDMLEDMARERVAQLTGDHPDEEKFWDAYEYLQGN

SEQ ID NO: 433 - protein, 909 aa, unidentified
  REGION 1..909: note = Description of Unknown: uncultivated organism sequence
  REGION 1..909: note = Category: MG55 effectors
  REGION 1..909: note = Description: MG55-5 effector
MITYQDLLLPFGVKEKKGKKYAKCPFCKNGTLNINSNVFFCSKCGFRGSERDFLKKLNIKTTSDVIVSNTHPQVKINNPERPIFLVFDSELFKYLSDKFSNINLILNPIVSMKEVQNKILYICSEKQNIEYADIFFASAKLLKILNYDELFKCNTEEQLKELVLKSSFYDPYPINGLIISDDKKIVDYINKLKYTAVLAKTVSPSIIEENCNVFFLYKTATIYDIAKVINPLFQKTQNIFLFSAENITVNVFTDILSEKQKFTVQFKKIVYQTYEKIIINSDIFKKIPPNIFEQTMNEFYGCKKLIENMEFNSFLNLVLSKYDFLIKNIPWGKIEMSYLNIYEKYVGSIKKIGKSYMALCPFHPDTNPSMKIDPEKGFFYCFGCNVKGKLNNFLDKLKAECGVEVDKEDYENSKTNKKGFIKKEPINYDEVYTNKTYYSYVDLNGNLAYIKIRYDTPKENSPDVRPKTFVIEFHTQDKRLFFYNLQGLNYIKDEDKKNYEIWFAEGEKCVDVIERVLDPEPEEEYPCIVLGYNNPEREWEYLPESYKAIFKDRDIKIFVDNDEIGQKKALQLIEILKKYAKKISLIQFSDKPSGYDIADFLEEGNPIFDALAISNTVYEVRKFSGNVLDILEYEVPEQKYVLQDNLHIPTGILSIIAGSGGLGKSYLSLYFALELMAEGKNVSMITLEDPIEKIIERIQRLLRKYQKTIDKSVKFTVYEYQEQDLLELTKNILENESDVLFIDPIGSVFEDENDNAETSRFMRKLAQIAISTKKNIFLVHHIRKMMQKPKEKETTKEDLYDMVRGASAIPNTAKHVVYVRRWKEDKNVLEVITVKHNYHRTDIDLRVKNLFDRNVPVEIEKFEFEKKIERPTKELVESEVVAKNIDEQDKDFSLSKRKESKNGRRDKQL

SEQ ID NO: 434 - protein, 853 aa, unidentified
  REGION 1..853: note = Description of Unknown: uncultivated organism sequence
  REGION 1..853: note = Category: MG55 effectors
  REGION 1..853: note = Description: MG55-6 effector
MKTIYITEEQKNNIKNIELLTEARGERALRKYIIDYTNSYVAQFLDIPLTEIPQNLIAICNPGEGESEMFSSVKNNSSGNNKFIDFLRVNFYEQFGMLHNGPTKKYMEGIARIALGELGFYSFDNRLQGSKIVNLGRVIKIISNNEDLLRSNNINLDGNLNNLSYNELMEYLNPVVQEYIDNSKNELNNSVYETPANYVIHEIKDVSVNNYGTPMKTPTRESYDYLESLAPYCDWCIVGNRHPGMYGQYTSNGGKFYICEKEGFKDIPREQGENCPLDEYGLSLICVLVAPDGFPENITTRWNHDFNGENNPNLENAIQLQNILKVKYLDVFKPRNEEEVNSMTRTGIQESEKPAAQDQVDNKVNAGIMDAVTAGGTMEEGAEPESDKYEIGSEKDGDINPYYHVNESDDKEESELKKYCGEIADFMKKIGINVYPYPKLNLDWSEQDGLFIKTGFYAPDEKAITIFCKDRHPKDILRTFSHEMIHHSQNLNGKDLNFSSDDDVKDNDKLKDIEAEAYLKGNIYFRQWTEYKNSERDSLNESKTNKKVINDEGKVVPEKCEKCGGKIGVYICGEPIYKCSECGEYYGTVKFNLKESEIFEETNPDNIDLSSFNIKKELNPKFWKNGLLDSRIRLKLMDIADDFIDFLGIDWVKPDDIIMTGSLANFNWNKKYSDIDLHILIDFSKVDKRKDFVKKYFDSLKNSWNEQHEGLSIFGFPVEVYVQDTNESHTSTGVYSLDKNEWIKEPERKKLATSKVNKSLIRNKVANYINQIDDLEEKYNTNKDNEFKVRKISEKLEKLWDTIKNERKSELNNDKGKEISNGNIIFKCLRRLNYIDKLYDLKTKTYDKMNSLP

SEQ ID NO: 435 - protein, 881 aa, unidentified
  REGION 1..881: note = Description of Unknown: uncultivated organism sequence
  REGION 1..881: note = Category: MG55 effectors
  REGION 1..881: note = Description: MG55-7 effector
MNNDAMEHTLGGGILTTSGSKQRKTSKFVMGKYTLYETKDRMYIVGSNKRETMFRILEIDLTVPRGELTVLEDNVFFTRNEIMNVLASLEEATEDGLHKKITGYGLLGFIKFTCWYYLIMVTKYSQVAVIGGHGIYHIDGIDIIPITNNYKKPEKSSDEARLLNIFKDLDLTKTFYFSYTYDITNTLQTNILREKLKAVDRCDITIPCGITDYNEMFVWNNNLLSPIFACIDTVFDWFQCIIHGFIDQVNVSVLGKSIYITLIARRSHHFAGARFLKRGVNNKGHVANEVETEQIVTDMILTPFHQPGNGFFDSDRYTSFVQHRGSIPLYWTQDASNLTTKPPIRINVVDPFFSPAALHFDNLFQRYGGGTIQILNLIKTKEKTPRETKLLWEFEQCIDYLNEFLPTLKKLDYTSWDMSRASKQDGQGVIEFLEKYAVNTVTTTGIFHNGPDFASTKIQEGICRSNCIDCLDRTNAAQFVIGKRALGCQLKSLGIIDNSYLEYDSDIVNILTELFHDLGDTIALQYGGSHLVNTMETYRKINQWSSHSRDMIESIKRFYSNSFVDAQRQDAINLFLGHYSWREGFPSLWEMNTDFYLHNAYSLNMPKRSYTHWWNDYNIKSIKELINEELIATGNDVTREKIIKNVRGYPGAFDNYWNEYYLPRSVTWIRDLFAYNMNSTRRYHNAVSKQDKAMSPFTSRKQSWLNNKLKMITSSKSLEKAEGRVVETTDLDRDTSPKQELELYEHYLHIISDRSQKLEEKMNSFSYSKYPIFISHESSEIPPMRKVIGEPLVDIAEDFTDVYDDDDDDDGDDENDEMTTEALLIAPDHVSVDEKFYEKVLNVDDYKPALDDYSAVIHIKPDNLQLYRDLCFSKDIQLDFQ

SEQ ID NO: 436 - protein, 996 aa, unidentified
  REGION 1..996: note = Description of Unknown: uncultivated organism sequence
  REGION 1..996: note = Category: MG55 effectors
  REGION 1..996: note = Description: MG55-8 effector
MNRIYQGRVLSWSQAGEGEEAKPIKGMDNPLWVHHELFQAAVNYYYLALGALGQAATEGPFFGLQSRIKESWESDPIHKRKASGLRQLLMPYLKINESTTLDEVYSLVLGQGHAKPKTLFKVGLAVAKDLGGDSSIQMKGREYLPRLCDTKYKGKFPRETTSREKEQMKLLLPHWLHGDDVDNRIHEIIGKLKFHHFANKTGKDLSFDESKALLATGVKFLSEKSLITSSEQVKLVEKIEKLPQDFSIPTYAGGSVNKEALQVRFYAYLITINFWSSKRGLKLLRDAYPKPKTTKIPDVTLSDEETFMLVDEDDPVKMARGKRGYVFRAFTSLPVWGGKSAADIQWKEFDIAAFKEALTTFNLYKQKTEERKDRLAKVEVSLDRMNGGEKYLQADKEIRDEAADLPVMKGDPRVEKLRELLYKKIPGVDGDRFDVGVTLRSLRHYDDLVKVWQSTSRNNSDKGDAEIRDLLIDCVTQSQQKNKRTFGDVNLFRALCEPENWIVWENSDEDFLKQKNAKSWADNVVDAFRIQLKLLDDQEYLQQPIKFRPAHPIDSPRQFRFSDLVTKNHTLHKPENHLQVSVAHRDEASGLFSKQGLSLHYSAPRIYRDAIGSSGEESDHGVWLQPMMKALGIPDLPKVDIKSAAVVLNMKIDRDKTDVRAYVDFPIDLKDAAKALSDYMGKQDLWDKQFNTNKDKEKLGLYWKGMTNAPEKLWHSKKEVKENGMQILGVDLGQRTAFAYSLIDCRGDKDFSKKQNGSKRNIITAIGHDGNNTWEAALLHSGMGRLPGEDSKQFDKNGNWVTERGGKKGRKANADDIVLAKCLLKEMEVDEEGSLSEDLLKVEYAPELWDRMLRYCKCMRNRLGRYYYSAVDLLSEKPDDREKMIQYLKSHPLPGVKENDELSETWKEFAIRCLEKYETDLQKFREILLAITDEILPVRGKRWKWVPHPDFPEHGYHLLINESDESTKGKKIRGQRGLSFDRMEQLENLRKLFQAL

SEQ ID NO: 437 - protein, 912 aa, unidentified
  REGION 1..912: note = Description of Unknown: uncultivated organism sequence
  REGION 1..912: note = Category: MG55 effectors
  REGION 1..912: note = Description: MG55-9 effector
MSEIKHRIINRLENMFSFKTRGEWFREGVCPQCGKKELYTHAHNPRIVKCGRLVKCGYEEHVKDICEDLFKDWSEYHPQTDTNPNAAADAFLSEGRGFDISNLIGKYTQQFYKDSNTGESSATVRFMLDDKNYWERLIDRPERFGNKKARFNFGFKNAGQAWSMHELDEICRLGEKGEAIWITEGIFDAIALSQSGVKAISCLSCVNYPSAFLKQIADRCHELKIDKPRLRWAFDNDSAGKGYTVKWHERSRAEGWSSTAAQPPANGGKKLDWNDLFQWDKLNPDQFPKYKHYGELLIAESAEDAGLLIYNFKQGRLKSFYFEYNYAMYHFNLDIEKYTKKLEKIEEDENQDHLLDKQKREMALRECQSIRQICSSSIQPLYFVRDNITDQSFYYIKVQSEKQQIVVNFTSDQISSPAKLKPRLLGVLSGTNWKGNQNDVDYLIDRMKDLKTVHTVDFIGYSREYQTYLFEKYAIHKGQIIPINEHNFFKVKRKELKTLAVSPAITLNPKQEFKPSWWNDFHRVRGAKGIVALAWWMGSYFAEQIRAMHSSYPFMEIVGEAGAGKSRLIEMMWKLSGRKDYEGFDANKSTNVAVYRNFAQIANLPVVLIEGDRNDVNGNAVQKSKFSWDELKDAFNGRAIRSKGLKTAGNETYEPPFRGAILISQNTAIQASEAILTRTLHLYFDRKGQSLETKRIVDELDRMELEDACAFMTHCLRNEDKILQTYASKLQSIEDHYHEIGITHTRIALCHAQVAALIEAMTKHVLPIDLEDMLEAQEMLEQMARERVEQLNGDHPDVEKFWDVYEYLQGNRSPEWGLNHHPADAQTVAINLNEIYKVAARNYQQLPEINEMKKLLRTSRKYKFIESNKQVYSDRFPADDVAAVNKSREAPGKPSRNVKCWIFTNPNLGAKK

SEQ ID NO: 438 - protein, 909 aa, unidentified
  REGION 1..909: note = Description of Unknown: uncultivated organism sequence
  REGION 1..909: note = Category: MG55 effectors
  REGION 1..909: note = Description: MG55-10 effector
MSELKHRIIERLEKTFNFKKRDEWFREGLCPSCGKKEVFTHAINPRIVKCGRLNKCGYEEHVKDICEDLFKDWSKEFPKTEAKPHAAADAYLQHGRGFDLSKINGLYTQEAFHNEKKFPGLVSATVRFKLAPGIYWERLIDRPERFGRQKANFIGKYEGYSWTMMELDALCNADSIWFTEGIFNAIALTLSNVPAVATMSSGNYPTKLLQQITDRCHELKKDKPRLCWAFDNDKAGKKAIKKFHLRAIQEKWSSTAALPPHQIKDKNFDWNDLYMHDLLHSEERKKYRHYGELLIAETAEQAGLLIYNFKEGRTRTFYYNHDFRLYYFNLDIDKFNKSLEHIEKNEDMDHLLEQQKREQALRDSASCTELCTRQIQPLYFQRNEITDDHWYYVQIISEDSEINTTFTSSMIRNSDKFAERLLGVHEGAWWTGSTNQLISYMKPRTEFIKRVKTIDYVGYTKEDKAWLFNDYAVHDGQIIPINKHDYFRIKRMDIKTLSNDPHIQLNPQGKFTPTWWNDFYRVRGTKGIIALAWWMGSYFAEQIRAEHSSYPFIEIVGEAGAGKSRLIEFMWKLSGRKDYEGFDPNKSTSVSVYRNLSKVSNLPVVLIEGDRNDANGNAVQKAKFSWDELKDAFNGRSIRSKGLKTSGNETYEPPFRGAVLISQNTAIQASEAILTRTLHLYFDRKGQSLETKRIVDELDRMELEDACTFMTHCLRNESKILETYKNSLQEIEAEYHEMGITHTRIALCHAQVASLITAMAQHVLPIDLEEVIKAQNMLQVMARDRVDQLNGDHPDVEKFWDVYEYLEGNRSAAWSLNHHDSDNQTVAINLNEVYKVAARNFQQLPEINEMKKLLRTSRKYKFIESNRQCHSERFPADEVSGVAKDREPTVKPKRNVKCWIFTNPNLGGK

SEQ ID NO: 439 - protein, 909 aa, unidentified
  REGION 1..909: note = Description of Unknown: uncultivated organism sequence
  REGION 1..909: note = Category: MG55 effectors
  REGION 1..909: note = Description: MG55-11 effector
MSELKHRIIERLEKTFNFKKRDEWFREGLCPSCGKKEVFTHAINPRIVKCGRLNKCGYEEHVKDICEDLFKDWSKEFPKTEAKPHAAADAYLQHGRGFDLSKINGLYTQEAFHNEKKFPGLVSATVRFKLAPGIYWERLIDRPERFGRQKANFIGKYEGYSWTMMELDALCNADSIWFTEGIFNAIALTLSNVPAVATMSSGNYPTKLLQQITDRCHELKKDKPRLCWAFDNDKAGKKAIKKFHLRAIQEKWSSTAALPPHQIKDKNFDWNDLYMHELLHSEERKKYRHYGELLIAETAEQAGLLIYNFKEGRTRTFYYNHDFRLYYFNLDIDKFNKSLEHIEKNEDMDHLLEQQKREQALRDSASCTELCTRQIQPLYFQRNEITDEHWYYVQIISEDNEINTTFTSSMIRNSDKFAERLLGVHEGAWWTGSTNQLISYMKPRTEFIKRVKTIDYVGYTKEDKAWLFNDYAVHDGQIIPINKHDYFRIKRMDIKTLSNDPHIQLNPQGKFTPTWWNDFYRVRGTKGIIALAWWMGSYFAEQIRAEHSSYPFIEIVGEAGAGKSRLIEFMWKLSGRKDYEGFDPNKSTSVSVYRNLSKVSNLPVVLIEGDRNDANGNAVQKAKFSWDELKDAFNGRSIRSKGLKTSGNETYEPPFRGAVLISQNTAIQASEAILTRTLHLYFDRKGQSLETKRIVDELDRMELEDACTFMTHCLRNESKILETYKNSLQEIEAEYHEMGITHTRIALCHAQVASLITAMAQHVLPIDLEEVIKAQNMLQVMARDRVDQLNGDHPDVEKFWDVYEYLEGNRSAAWSLNHHDSDNQTVAINLNEVYKVAARNFQQLPEINEMKKLLRTSRKYKFIESNRQCHSERFPADEVSGVAKDREPTVKPKRNVKCWIFTNPNLGGK

SEQ ID NO: 440 - protein, 906 aa, unidentified
  REGION 1..906: note = Description of Unknown: uncultivated organism sequence
  REGION 1..906: note = Category: MG55 effectors
  REGION 1..906: note = Description: MG55-13 effector
MSNIHVLIDEKLNQLFSFKRVGEWYRQGICPNCGKKELYTHAVNPRVVKCARLNKCGYEEHVKEICEDLFKDWSKDFPRTKENPNAAADAYLLHARGFDPNILKGLYTQELFRNDLKYPNEVTATIRFKLANGIYWERFIDRPERFGRQKANFIGKYEGHAWTLEQLDTLCNAQSIWITEGIFNAIALSFSKQPSIATLSTSNYPSLILKQITDRCIELKKDRPRLRWAFDNDKAGKKAIKKFHLRALQEKWNSTAALPSGQLDWNDLYQRDQLHSEYRDQYKHYGELHIAESPEQAGLLIYNYKDARRKTFWFIHNFRLYWFNLDMDKYTKELERIEADPERDLLLDSQKRELALQQCAAVSEICNRQLNPLYFQRNEITDESWYYFQILNPESEAKATFTADQISARGKFAPRLLSVQVGAWWTGNDHQLLTFMKNQTERLREVKTIDFIGYSKEYQAYIFNKHAVYKGQVIDINDHDFYKVGRIELKTLANSPNVQLNPKSTFKPTWWKDFYRVRGAKGLVALAWWTGSYFAEQIRSMHSSFPFIEIVGEAGAGKSRLIEFMWKLSGRPDYEGFDANKSTNVAVYRNFAQISNLPVVLIEGDRNDQNGNSVGKPKFSWDELKDAYNGRAIRSKGLKTAGNETYEPPFRGAIMISQNTAIQASEAILTRTLHLYFDRKGQSLETKRIVDDLDRMNIEEACTYMTHCLRHENAFLKTYAEKLEQTEKEFHNNGITHTRIALCHAQVSALIDAVAKHILHDVIDLEEVCAAQNMLLDMAHERVKQLNGDHPLVEQFWDVYEYLNSSRSTEFSINHFEHDAHQIAINLNEVYKVAAKNYQQLPDIKEMKNLLTASRRYKFVDKSRVVKSHRYPADEVKNALEDKTLREHTVRCWIFQNPAISGSPNS

SEQ ID NO: 441 - protein, 906 aa, unidentified
  REGION 1..906: note = Description of Unknown: uncultivated organism sequence
  REGION 1..906: note = Category: MG55 effectors
  REGION 1..906: note = Description: MG55-14 effector
MSNIHVLIDEKLNQLFSFKRVGEWYRQGICPNCGKKELYTHAVNPRVVKCARLNKCGYEEHVKEICEDLFKDWSKDFPRTKENPNAAADAYLLHARGFDPNILKGLYTQELFRNDLKYPNEVTATIRFKLANGIYWERFIDRPERFGRQKANFIGKYEGHAWTLEQLDTLCNAQSIWITEGIFNAIALSFSKQPSIATLSTSNYPSLILKQITDRCIELKKDRPRLRWAFDNDKAGKKAIKKFHLRALQEKWNSTAALPSGQLDWNDLYQRDQLHSEYRDQYKHYGELHIAESPEQAGLLIYNYKDARRKTFWFIHNFRLYWFNLDMDKYTKELERIEADPERDLLLDSQKRELALQQCAAVSEICNRQLNPLYFQRNEITDESWYYFQILNPESEAKATFTADQISARGKFAPRLLSVQVGAWWTGNDHQLLTFMKNQTERLREVKTIDFIGYSKEYQAYIFNKHAVYKGQVIDINDHDFYKVGRIELKTLANSPNVQLNPKSTFKPTWWKDFYRVRGAKGLVALAWWTGSYFAEQIRTMHSSFPFIEIVGEAGAGKSRLIEFMWKLSGRPDYEGFDANKSTNVAVYRNFAQISNLPVVLIEGDRNDQNGNSVGKPKFSWDELKDAYNGRAIRSKGLKTAGNETYEPPFRGAIMISQNTAIQASEAILTRTLHLYFDRKGQSLETKRIVDDLDRMNIEEACTYMTHCLRHENAFLKTYAEKLEQTEKEFHNNGITHTRIALCHAQVSALIDAVAKHILHDVIDLEEVCAAQNMLLDMAHERVKQLNGDHPLVEQFWDVYEYLNSSRSTEFSINHFEHDAHQIAINLNEVYKVAAKNYQQLPDIKEMKNLLTASRRYKFVDKSRVVKSHRYPADEVKNALEDKTLREHTVRCWIFQNPAISGSPNS

SEQ ID NO: 442 - protein, 769 aa, unidentified
  REGION 1..769: note = Description of Unknown: uncultivated organism sequence
  REGION 1..769: note = Category: MG55 effectors
  REGION 1..769: note = Description: MG55-15 effector
MYELKHRIIDRLEQMFSFKTRGEWFREGLCPSCGKKEVFTHAINPRIVKCGRLNKCGYEEHVKDICEDLFKDWSKEFPKTEAKPHAAADAYLQHGRGFDLSKINGLYTQEAFHNEKKFPGLVSATVRFKLAPGIYWERLIDRPERFGRQKANFIGKYEGYSWTMMELDALCNADSIWFTEGIFNAIALTLSNVPAVATMSSGNYPTKLLQQITDRCHELKKDKPRLCWAFDNDKAGKKAIKKFHLRAIQEKWSSTAALPPHQIKDKNFDWNDLYMHELLHSEERKKYRHYGELLIAETAEQAGLLIYNFKEGRTRTFYYNHDFRLYYFNLDIDKFNKSLEHIEKNEDMDHLLEQQKREQALRDSASCTELCTRQIQPLYFQRNEITDEHWYYVQIISEDNEINTTFTSSMIRNSDKFAERLLGVHEGAWWTGSTNQLISYMKPRTEFIKRVKTIDYVGYTKEDKAWLFNDYAVHDGQIIPINKHDYFRIKRMDIKTLSNDPHIQLNPQGKFTPTWWNDFYRVRGTKGIIALAWWMGSYFAEQIRAEHSSYPFIEIVGEAGAGKSRLIEFMWKLSGRKDYEGFDPNKSTSVSVYRNLSKVSNLPVVLIEGDRNDANGNAVQKAKFSWDELKDAFNGRSIRSKGLKTSGNETYEPPFRGAVLISQNTAIQASEAILTRTLHLYFDRKGQSLETKRIVDELDRMELEDACTFMTHCLRNEDKILETYASKLQSIEDHYHAIGITHTRIALCHAQVAALIEAMTKHVLPIDLE

SEQ ID NO: 443 - protein, 882 aa, unidentified
  REGION 1..882: note = Description of Unknown: uncultivated organism sequence
  REGION 1..882: note = Category: MG55 effectors
  REGION 1..882: note = Description: MG55-16 effector
MYELKHRIIDRLEQMFSFKTRGEWFREGVCPQCGKKELYTHAHNPRIVKCGRLNKCGYEEHVKDICEDLFKDWSKEFPKTEAKPHAAADAYLEHGRGFDLTKLKGRFTQEAFHNEQKFPGQVSATVRFELAPGVYWERLIDRPERFGRQKANFKGKYEGLSWTMWQLDDLCHAESIWITEGIFNSIALTLSGVPSIATMSSGNYPVKLLQQITDRCHELKKDKPRLCWAYDNDKEGRKKLKKFHLRALQEKWSSTAALPPNQIKGRSFDWNDLYMHDLLHSEERKKYRHYGELLIAESAEQAGLLIYNFKEGRTRTFFFNHEFRLYYFNLDIDKYNKALDIIEKNENLNHLLDEQKREQALRDSASCTEICNRQIKPLYFQRNEITDEHWYYAQIVSEDTEVNTTFTSSMIRNSDKFAERLLGVNEGAWWTGSTNQLVSYMKPRTEFIKRVKTIDYIGYTKEDKAWLFNDYAVHDGQIIPINEHDYFRIKRLDIKTLSNEPQIQLNPKAKFNPTWWKDFYRVRGNKGIVALAWWMGTYFAEQIRGLNSSYPFMEIVGQAGAGKSRLIEFMWKLSGRKDYEGFDPNKSTSVAVYRNFAKISNLPVVLIEGDRNDINGNAIQKAKFSWDELKDAFNGRAIRSKGVKNAGNDTYEPPFRGAILISQNTQIQASEAILTRTLLLEFDRSGQSLETKRIVDELDRMELEDACTFMTHCLRNEDKILETYASKLQSIEDHYHEIGITHTRIALCHAQVAALIEAMTKHVLPIDLEDMLEAQEMLEDMARERVEQLNGDHPDVEKFWDAYEYLQGNRSPEWGLNHHDNDAQTIAINLNEIYKVAARNYQQLPEINEMKKLLRTSRKYKFIESNKQVYSDRFPADDVAAV

SEQ ID NO: 444 - protein, 751 aa, unidentified
  REGION 1..751: note = Description of Unknown: uncultivated organism sequence
  REGION 1..751: note = Category: MG55 effectors
  REGION 1..751: note = Description: MG55-17 effector
MYELKHRIIDRLEQMFSVKTRGEWFREGVCPQCGKKELYTHAHNPRIVKCGRLNKCGYEEHVKDICEDLFKDWSKEFPKTEAKPHAAADAYLEHGRGFDLTKLKGRFTQEAFHNEQKFPGQVSATVRFELAPGVYWERLIDRPERFGRQKANFKGKYEGLSWTMWQLDDLCHAESIWITEGIFNSIALTLSGVPSIATMSSGNYPVKLLQQITDRCHELKKDKPRLCWAYDNDKEGRKKLKKFHLRALQEKWSSTAALPPNQIKGRSFDWNDLYMHDLLHSEERKKYRHYGELLIAESAEQAGLLIYNFKEGRTRTFFFNHEFRLYYFNLDIDKYNKALDIIEKNENLNHLLDEQKREQALRDSASCTEICNRQIKPLYFQRNEITDEHWYYAQIVSEDTEVNTTFTSSMIRNSDKFAERLLGVNEGAWWTGSTNQLVNYMKPRTEFIKRVKTIDYIGYTKEDKAWLFNDYAVHDGQIIPINEHDYFRIKRLDIKTLSNDPQIQLNPKAKFNPTWWKDFYRVRGNKGIVALAWWMGTYFAEQIRGLNSSYPFMEIVGQAGAGKSRLIEFMWKLSGRKDYEGFDPNKSTSVAVYRNFAKISNLPVVLIEGDRNDINGNAIQKAKFSWDELKDAFNGRAIRSKGVKNAGNDTYEPPFRGAILISQNTQIQASEAILTRTLLLEFDRSGQSLETKRIVDELDRMELEDACTFMTHCLRNEDKILETYASKLQSIEDHYHAIGITHTRIALCHAQ

SEQ ID NO: 445 - protein, 753 aa, unidentified
  REGION 1..753: note = Description of Unknown: uncultivated organism sequence
  REGION 1..753: note = Category: MG55 effectors
  REGION 1..753: note = Description: MG55-18 effector
NRRNKISGRKLMSELKHRIIDRLENMFSFKTRGEWFREGICPQCGKKELYTHAHNPRIVKCGRLVKCGYEEHVKDICEDLFKDWSEFHPQTDTNPNAAADAFLSEGRGFDISNLIGKYTQQFYKDSNTGESSATVRFMLDDKNYWERLIDRPERFGNKKARFNFGFKNAGQAWSVHELDEICRLGEKGEAIWITEGIFDAIALSQSGVKAISCLSCVNYPSAFLKQIADRCHELKIDKPRLRWAFDNDSAGKGYTVKWHERSRAEGWSSTAAQPPANGGKKLDWNDLFQWDKLNPDQFPKYKHYGELLIAESAEDAGLLIYNFKQGRLKSFYFEHHFSMYHFNLDIEKYTKKLEKIEEDETQDHLLDKQKRELALRECQSIRQICSASIQPLYFVRDSVTDQAFYYFKITSKKQETIVNFTSEQISSPAKLKTRLLSVLSGANWTGNQNDLDHFITRIEDLKTVLTIDFVGYSREHETYIFEKYAVHKGQVIPINEHDFFKVKRKEIKTLASSPEISLNPKKQFDPSWWNDFHKIRGAKGIVALAWWMGSYFAEQIRAMHSSYPFMEIVGEAGAGKSRLIELMWKLSGRKDYEGFDPNKGSFAGIYRNFGKVSNLPTVLIEADRNDVNGNSVQKSKFSWDELKDMFNGRTIRTMGVKTSGNETHEPPFRSSILISQNTQIQASEAILTRTLHLYFDRKGQSLETKRIVDELDRMELEDACTFMTHCLRNEDKILETYASKLQSIEDHYHEIGI

SEQ ID NO: 446 - protein, 777 aa, unidentified
  REGION 1..777: note = Description of Unknown: uncultivated organism sequence
  REGION 1..777: note = Category: MG55 effectors
  REGION 1..777: note = Description: MG55-19 effector
REGVCPQCGKKELYTHAHNPRIVKCGRLVKCGYEEHVKDICDDLFKDWSEYHPQTDTNPNAAADAFLSEGRGFDISNLIGKYTQQFYTDKDSKESSATVRFMLDDKNYWERLIDRPERFGNKKARFNFGFKNAGQAWSVHELDEICRLGEKGEAIWITEGIFDAIALSQSGVKAISCLSCVNYPSAFLKQIADRCHELKIDKPRLRWAFDNDSAGKGYTVKWHERSRAEGWSSTAAQPPANGGKKLDWNDLFQWDKLNPDQFPKYKHYGELLIAETAEDAGLLIYNFKQGRLKSFYFEHHFSMYHFNLDIEKYTKKLEKIEEDETQDHLLDKQKRELALRECQSIRQICSASIQPLYFVRDSVTDQAFYYFKITSKKQETIVNFTSEQISSPAKLKTRLLSVLSGANWTGNQNDLDHFITRIEDLKTVLTIDFVGYSREHETYIFEKYAVHKGQVIPINEHDFFKVKRKEIKTLASSPEISLNPKKQFDPSWWNDFHKVRGAKGIVALAWWMGSYFAEQIRAMHSSYPFMEIVGEAGAGKSRLIELMWKLSGRKDYEGFDPNKGSFAGIYRNFGKVSNLPTVLIEADRNDVNGNSVQKSKFSWDELKDMFNGRTIRTMGVKTSGNETHEPPFRSSILISQNTQIQASEAILTRTLHLYFDRKGQSLETKRIVDELDRMELEDACTFMTHCLRNEDKILETYASKLQSIEDHYHEIGITHTRIALCHAQVAALIEAMTKHVLPIDLEDMLEAQEMLEDMARERVEQLNGDHPDVEKFW

SEQ ID NO: 447 - protein, 793 aa, unidentified
  REGION 1..793: note = Description of Unknown: uncultivated organism sequence
  REGION 1..793: note = Category: MG55 effectors
  REGION 1..793: note = Description: MG55-20 effector
SGCKLMYELKHRIIDRLEQMFSFKTRGEWFREGVCPQCGKKELYTHAHNPRIVKCGRLNKCGYEEHVKDICEDLFKDWSKEFPKTEAKPHAAADAYLEHGRGFDLTKLKGRFTQEAFHNEQKFPGQVSATVRFELAPGVYWERLIDRPERFGRQKANFKGKYEGLSWTMWQLDDLCHAESIWITEGIFNSIALTLSGVPSIATMSSGNYPVKLLQQITDRCHELKKDKPRLCWAYDNDKEGRKKLKKFHLRALQEKWSSTAALPPNQIKGRSFDWNDLYMHDLLHSEERKKYRHYGELLIAESAEQAGLLIYNFKEGRTRTFFFNHEFRLYYFNLDIDKYNKALDIIEKNENLNHLLDEQKREQALRDSASCTEICNRQIKPLYFQRNEITDEHWYYAQIVSEDTEVNTTFTSSMIRNSDKFAERLLGVNEGAWWTGSTNQLVSYMKPRTEFIKRVKTIDYIGYTKEDKAWLFNDYAVHDGQIIPINEHDYFRIKRLDIKTLSNDPQIQLNPKAKFNPTWWKDFYRVRGNKGIVALAWWMGTYFAEQIRGLNSSYPFMEIVGQAGAGKSRLIEFMWKLSGRKDYEGFDPNKSTSVAVYRNFAKISNLPVVLIEGDRNDINGNAIQKAKFSWDELKDAFNGRAIRSKGVKNAGNDTYEPPFRGAILISQNTQIQASEAILTRTLLLEFDRSGQSLETKRIVDELDRMELEDACTFMTHCLRNEDKILETYASKLQSIEDHYHEIGITHTRIALCHAQVAALIEAMTKHVLPIDLEDMLEAQEMLEDMARERVEQ

SEQ ID NO: 448 - protein, 840 aa, unidentified
  REGION 1..840: note = Description of Unknown: uncultivated organism sequence
  REGION 1..840: note = Category: MG55 effectors
  REGION 1..840: note = Description: MG55-21 effector
MIFLLYHVIFIYNYTLMNFRKTLQKCKEKLQNNIINQNDSIWMPLDVRVCDNYHFKTDSFNLIVKYDSEHLEHNNTFHFNNYEHLQAKIVNVFFDKVQKSIIKTWMKLYKYTYDTVIQIFSHVYNLCNIYYKINFYDARKILTNFISYNCKNNYKFNYFYKLNKHTIRKFYFYRNNKLCNKEIKILKKQFTKIKFNNIYNSDNYINLFKILKEYRSEYVKYVKFYSANPIHFLNKLHFTDFYNKLQDEYKQLFINLKCPIEEIILQEKNINIPIFKYDDYNPYMKKYTDFIKNRDNINNYEEHNKIYRLYVNYENKLINKQKRLLEIRSKLIYTKLSVIVKLIDNVINTFYKHIYKIIEEKLPQQVNNFVDQVKLYKTNEQFRNKKNAILQKYGYKTTINYKNTINEMRKSSVGKKIIINEKKLLYKDIIKTNHVSIFEPKYTNSLRNNTNVSRHTIDLAVEKACANYKTCLTNLKNRNIDNFNLREIKLRKMIIDIEPNEFSKEGIRKNILGTTTGFYNGILFDFTTINKATILKYNEKLNKYTLHVPYINKNLSEDEKKEKIKILEKKLKMTKKQKKRNKRRRKEKIKKRNNKNKKKETIKNIKKEIKRIKKNNMEKTGEGTISLDPGVRKYLTGYSSEKKKNIEIRENIKIKKNCYKIYETTKKYGLSSGKKKKVKKKEKKEKKEKKVKREIKVISEKEKEKVKRKLENRSKKVYRQMTDFHNKVIKYLTENYASILIGDMSLKGILNKKTSKLKKKTKYLCTRLRIGMLRTKLKKKCEEKNLKYKLVNEAYTSKTCTKCGTINENLKSKETFNCNECKIIIDRDLNGARNIHLASL

SEQ ID NO: 449 - protein, 719 aa, unidentified
  REGION 1..719: note = Description of Unknown: uncultivated organism sequence
  REGION 1..719: note = Category: MG55 effectors
  REGION 1..719: note = Description: MG55-22 effector
MQVVKRDGKLVDFDQSKIRVAIEKANREVRPRERATKEEINQIIDYVEDLDKKRILVEDIQDIIEEQLMSFGKYLLAKKYITYRYTRELVRKANTTDQSIKELIDGESDYWNNENSNKNARVVTTQRDYLAGITSTDITRRFLLPEDVVKAHDEGIIHFHDADYFAQNALTNCELINLEDMLQNGTIMNGVMIEKPHRFLTAMTIATQIILGVTSSTYGGATVSLTHLAPFVKSSYDRYYKKYKKRGLSEAQCKEYAEQDTKKEVSDGVQTFNYQVNSMTNTNGQAPFLSVCMYLGETDEYKKELAMIIEEFLKQRIEGFKNEKGVYITPAFPKLLYVLEEDNIHKDSKYWYLTELAAKCTAKRLVPDYISEKKMKELKIDKNGNGNCYPCMGCRSFLTPYVDPETNKPKYYGRFNQGVVTINLVDVALSSKQDEEKFWKIFDERLELCHKALQIRHERLSKVTSDVAPILWQHGALARLEKGESIHKLLHDGYSTISLGYAGLYECVKYMTGHSHTDNGEGEEFAIKVMQKLNDKCKEWKEAEKIDYSVYGTPIESTTYKFAKCLKKRFGTVEGITDRSYITNSYHVPVFEDIDAFSKLKLESKFQKLSPGGAISYVETPNLQDNLEVVLQIINFIYDNIMYAELNTKSDYCQKCGFDGEILIDENLEWYCPNCGNRDHNTLNVARRTCGYIGSQFWNKGRTQEIKERVLHIDNKDDE

SEQ ID NO: 450 - protein, 719 aa, unidentified
  REGION 1..719: note = Description of Unknown: uncultivated organism sequence
  REGION 1..719: note = Category: MG55 effectors
  REGION 1..719: note = Description: MG55-23 effector
MQVVKRDGKLVDFDQSKIRVAIEKANREVRPRERATKEEINQIIDYVEDLDKKRILVEDIQDIIEEQLMSFGKYLLAKKYITYRYTRELVRKANTTDQSIKELIDGESDYWNNENSNKNARVVTTQRDYLAGITSTDITRRFLLPEDVVKAHDEGIIHFHDADYFAQNALTNCELINLEDMLQNGTIMNGVMIEKPHRFLTAMTIATQIILGVTSSTYGGATVSLTHLAPFVKSSYDRYYKKYKKRGLSEAQCKEYAEQDTKKEVSDGVQTFNYQVNSMTNTNGQAPFLSVCMYLGETDEYKKELAMIIEEFLKQRIEGFKNEKGVYITPAFPKLLYVLEEDNIHKDSKYWYLTELAAKCTAKRLVPDYISEKKMKELKIDKNGNGNCYPCMGCRSFLTPYVDPETNKPKYYGRFNQGVVTINLVDVALSSKQDEEKFWKIFDERLELCHKALQIRHERLSKVTSDVAPILWQHGALARLKKGESIHKLLHDGYSTISLGYAGLYECVKYMTGHSHTDNGEGEEFAIKVMQKLNDKCKEWKEAEKIDYSVYGTPIESTTYKFAKCLKKRFGTVEGITDRSYITNSYHVPVFEDIDAFSKLKLESKFQKLSPGGAISYVETPNLQDNLEVVLQIINFIYDNIMYAELNTKSDYCQKCGFDGEILIDENLEWYCPNCGNRDHNTLNVARRTCGYIGSQFWNKGRTQEIKERVLHIDNKDDE

SEQ ID NO: 451 - protein, 719 aa, unidentified
  REGION 1..719: note = Description of Unknown: uncultivated organism sequence
  REGION 1..719: note = Category: MG55 effectors
  REGION 1..719: note = Description: MG55-24 effector
MQVVKRDGKLVDFDQSKIRVAIEKANREVRPRERATKEEINQIIDYVEDLDKKRILVEDIQDIIEEQLMSFGKYLLAKKYITYRYTRELVRKANTTDQSIKELIDGESDYWNNENSNKNARVVTTQRDYLAGITSTDITRRFLLPEDVVKAHDEGIIHFHDADYFAQNALTNCELINLEDMLQNGTIMNGVMIEKPHRFLTAMTIATQIILGVTSSTYGGATVSLTHLAPFVKSSYDRYYKKYKKRGLSEAQCKEYAEQDTKKEVSDGVQTFNYQVNSMTNTNGQAPFLSVCMYLGETDEYKKELAMIIEEFLKQRIEGFKNEKGVYITPAFPKLLYVLEEDNIHKDSKYWYLTELAAKCTAKRLVPDYISEKKMKELKIDKNGNGNCYPCMGCRSFLTPYVDPETNKPKYYGRFNQGVVTINLVDVALSSKQDEEKFWKIFDERLELCHKALQIRHERLSKVTSDVAPILWQHGALARLEKGESIHKLLHDGYSTISLGYAGLYECVKYMTGHSHTDNGEGEEFAIKVMQKLNDKCKEWKEAEKIDYSVYGTPIESTTYKFAKCLKKRFGTVEGITDRNYITNSYHVPVFEDIDAFSKLKLESKFQKLSPGGAISYVETPNLQDNLEVVLQIINFIYDNIMYAELNTKSDYCQKCGFDGEILIDENLEWYCPNCGNRDHNTLNVARRTCGYIGSQFWNKGRTQEIKERVLHIDNKDDE

SEQ ID NO: 452 - protein, 719 aa, unidentified
  REGION 1..719: note = Description of Unknown: uncultivated organism sequence
  REGION 1..719: note = Category: MG55 effectors
  REGION 1..719: note = Description: MG55-25 effector
MQVVKRDGKLVDFDQSKIRVAIEKANREVKPRERATKEEINQIIDYVEDLDKKRILVEDIQDIIEEQLMSFGKYLLAKKYITYRYTRELVRKANTTDQSIKELIDGESDYWNNENSNKNARVVTTQRDYLAGITSTDITRRFLLPEDVVKAHDEGIIHFHDADYFAQNALTNCELINLEDMLQNGTIMNGVMIEKPHRFLTAMTIATQIILGVTSSTYGGATVSLTHLAPFVKSSYDRYYKKYKKRGLSEAQCKEYAEQDTKKEVSDGVQTFNYQVNSMTNTNGQAPFLSVCMYLGETDEYKKELAMIIEEFLKQRIEGFKNEKGVYITPAFPKLLYVLEEDNIHKDSKYWYLTELAAKCTAKRLVPDYISEKKMKELKIDKNGNGNCYPCMGCRSFLTPYVDPETNKPKYYGRFNQGVVTINLVDVALSSKQDEEKFWKIFDERLELCHKALQIRHERLSKVTSDVAPILWQHGALARLKKGESIHKLLHDGYSTISLGYAGLYECVKYMTGHSHTDNGEGEEFAIKVMQKLNDKCKEWKEAEKIDYSVYGTPIESTTYKFAKCLKKRFGTVEGITDRSYITNSYHVPVFEDIDAFSKLKLESKFQKLSPGGAISYVETPNLQDNLEVVLQIINFIYDNIMYAELNTKSDYCQKCGFDGEILIDENLEWYCPNCGNRDHNTLNVARRTCGYIGSQFWNKGRTQEIKERVLHIDNKDDE

SEQ ID NO: 453 - protein, 719 aa, unidentified
  REGION 1..719: note = Description of Unknown: uncultivated organism sequence
  REGION 1..719: note = Category: MG55 effectors
  REGION 1..719: note = Description: MG55-26 effector
MQVVKRDGKLVDFDQSKIRVAIEKANREVKPRERATKEEINQIIDYVEDLDKKRILVEDIQDIIEEQLMSFGKYLLAKKYITYRYTRELVRKANTTDQSIKELIDGESDYWNNENSNKNARVVTTQRDYLAGITSTDITRRFLLPEDVVKAHDEGIIHFHDADYFAQNALTNCELINLEDMLQNGTIMNGVMIEKPHRFLTAMTIATQIILGVTSSTYGGATVSLTHLAPFVKSSYDRYYKKYKKRGLSEAQCKEYAEQDTKKEVSDGVQTFNYQVNSMTNTNGQAPFLSVCMYLGETDEYKKELAMIIEEFLKQRIEGFKNEKGVYITPAFPKLLYVLEEDNIHKDSKYWYLTELAAKCTAKRLVPDYISEKKMKEYKIDKNGNGNCYPCMGCRSFLTPYVDPETNKPKYYGRFNQGVVTINLVDVALSSKQDEEKFWKIFDERLELCHKALQIRHERLSKVTSDVAPILWQHGALARLKKGESIHKLLHDGYSTISLGYAGLYECVKYMTGHSHTDNGEGEEFAIKVMQKLNDKCKEWKEAEKIDYSVYGTPIESTTYKFAKCLKKRFGTVEGITDRNYITNSYHVPVFEDIDAFSKLKLESKFQKLSPGGAISYVETPNLQDNLEVVLQIINFIYDNIMYAELNTKSDYCQKCGFDGEILIDENLEWYCPNCGNRDHNTLNVARRTCGYIGSQFWNKGRTQEIKERVLHIDNKDDE

SEQ ID NO: 454 - protein, 719 aa, unidentified
  REGION 1..719: note = Description of Unknown: uncultivated organism sequence
  REGION 1..719: note = Category: MG55 effectors
  REGION 1..719: note = Description: MG55-27 effector
MQVVKRDGKLVDFDQSKIRVAIEKANREVRPRERATKEEINQIIDYVEDLDKKRILVEDIQDIIEEQLMSFGKYLLAKKYITYRYTRELVRKANTTDQSIKELIDGESDYWNNENSNKNARVVTTQRDYLAGITSTDITRRFLLPEDVVKAHDEGIIHFHDADYFAQNALTNCELINLEDMLQNGTIMNGVMIEKPHRFLTAMTIATQIILGVTSSTYGGATVSLTHLAPFVKSSYDRYYKKYKKRGLSEAQCKEYAEQDTKKEVSDGVQTFNYQVNSMTNTNGQAPFLSVCMYLGETDEYKKELAMIIEEFLKQRIEGFKNEKGVYITPAFPKLLYVLEEDNIHKESKYWYLTELAAKCTAKRLVPDYISEKKMKELKIDKNGNGNCYPCMGCRSFLTPYVDPETNKPKYYGRFNQGVVTINLVDVALSSKQDEEKFWKIFDERLELCHKALQIRHERLSKVTSDVAPILWQHGALARLEKGESIHKLLHDGYSTISLGYAGLYECVKYMTGHSHTDNGEGEEFAIKVMQKLNDKCKEWKEAEKIDYSVYGTPIESTTYKFAKCLKKRFGTVEGITDRSYITNSYHVPVFEDIDAFSKLKLESKFQKLSPGGAISYVETPNLQDNLEVVLQIINFIYDNIMYAELNTKSDYCQKCGFDGEILIDENLEWYCPNCGNRDHNTLNVARRTCGYIGSQFWNKGRTQEIKERVLHIDNKDDE

SEQ ID NO: 455 - protein, 719 aa, unidentified
  REGION 1..719: note = Description of Unknown: uncultivated organism sequence
  REGION 1..719: note = Category: MG55 effectors
  REGION 1..719: note = Description: MG55-28 effector
MQVVKRDGKLVDFDQSKIRVAIEKANREVRPRERATKEEINQIIDYVEDLDKKRILVEDIQDIIEEQLMSFGKYLLAKKYITYRYTRELVRKSNTTDQSIKELIDGESDYWNNENSNKNARVVTTQRDYLAGITSTDITRRFLLPEDVVKAHDEGIIHFHDADYFAQNALTNCELINLEDMLQNGTIMNGVMIEKPHRFLTAMTIATQIILGVTSSTYGGATVSLTHLAPFVKSSYDRYYKKYKKRGLSEAQCKEYAEQDTKKEVSDGVQTFNYQVNSMTNTNGQAPFLSVCMYLGETDEYKKELAMIIEEFLKQRIEGFKNEKGVYITPAFPKLLYVLEEDNIHKESKYWYLTELAAKCTAKRLVPDYISEKKMKELKIDKNGNGNCYPCMGCRSFLTPYVDPETNKPKYYGRFNQGVVTINLVDVALSSKQDEEKFWKIFDERLELCHKALQIRHERLSKVTSDVAPILWQHGALARLKKGESIHKLLHDGYSTISLGYAGLYECVKYMTGHSHTDNGEGEEFAIKVMQKLNDKCKEWKEAEKIDYSVYGTPIESTTYKFAKCLKKRFGTIEGITDRSYITNSYHVPVFEDIDAFSKLKLESKFQKLSPGGAISYVETPNLQDNLEVVLQIINFIYDNIMYAELNTKSDYCQKCGFDGEILIDENLEWYCPNCGNRDHNTLNVARRTCGYIGSQFWNKGRTQEIKERVLHIDNKDDE

SEQ ID NO: 456 - protein, 719 aa, unidentified
  REGION 1..719: note = Description of Unknown: uncultivated organism sequence
  REGION 1..719: note = Category: MG55 effectors
  REGION 1..719: note = Description: MG55-29 effector
MQVIKRDGKVVDFDQSKIKIAIEKANKEVKPRERASKDEINQIIGYVEDLDKKRILVEDIQDIIEEQLMSFGKYVLAKKYITYRYTRELVRKANTTDQSIKELIDGESDYWNNENSNKNAQVVTTQRDYLAGITSTDITRRFLLPEDVVKAHDEGIIHFHDADYFAQNALTNCELINLEDMLQNGTIMNGVMIEKPHRFLTAMTIATQIILGVTSSTYGGATVSLTHLAPFVRSSYDRYYKKYKQRGLSEKQCKEYAEQDTKKEVSDGVQTFNYQVNSMTNTNGQAPFLSVCMYLGETDEYKQELAMIIEEFLKQRIEGFKNEKGVYITPAFPKLLYVLEEDNIHKDSKYWYLTELAAKCTAKRLVPDYISEKKMKEYKIDKNGNGNCYPCMGCRSFLTPYVDPETNKPKYYGRFNQGVVTINLVDVALSSKQDEEKFWKIFDERLELCHKALQIRHERLSKVTSDVAPILWQHGALARLKKGESIHKLLHDGYSTISLGYAGLYECVKYMTGNSHTDNGIGEEFALRVMQKLNDKCKEWKEAEKIDYSVYGTPIESTTYKFAKCLKKRFGTIEGITDRSYITNSYHVPVFEDIDAFSKLKLESKFQKLSPGGAISYVETPNLQNNLEVVLQIIHFIYDNIMYAELNTKSDYCQKCGFDGEILIDENLEWYCPNCGNRDHNTLNVARRTCGYIGSQFWNKGRTQEIKERVLHIDNKDDE

SEQ ID NO: 457 - protein, 708 aa, unidentified
  REGION 1..708: note = Description of Unknown: uncultivated organism sequence
  REGION 1..708: note = Category: MG55 effectors
  REGION 1..708: note = Description: MG55-30 effector
MKVIKRDGTTVSYDRNKIKIAIQKANSEVEPAEKVTDETIEYIISCIETKNRSRMLVEDIQDIIEQKLMDEKKFVLAKTYIIYRYSRELVRKANTTDDSILSLIQNRNKDVMEENSNKNATVASTQRDLIAGEVSKDLTKRILLPEKISKAHEEGILHFHDADYFLQPIFNCCLINIGDMLDNGTVMNGKLIESPKSFQVACTVMTQVIAAVASSQYGGQSVDVRHLGKYLRKSYNKFKTKMTAEFGDTVPEEIIEKMVQERLQDELRSGVQTIQYQINTLMTTNGQSPFVTLFLNLDKDDEYIKENAMIIEEILRQRLEGIKNEKGVYVTPAFPKLIYVLDEHNCLKGGKYDYITELAVKCSAKRLYPDYISAKKMRENYEGNVFSCMGCRSFLTPWKDENGNYKFEGRFNQGVVSLNLPQIGIIAAGDEETFWDLLEERLELCYEALMCRHNALMGVTSDVSPVHWQYGAIARLEKGEPIDKLLLDGYSTISLGYIGLYEVTKLMKGCSHTEPAGQDFALRVMNRLRAATDKWKAETGIGFGLYGSPAESLCYRFARIDLERFGSIPDVTDKGYYTNSYHVDVRENIDAFSKFRFESQFQKISSGGAISYVEIPNMRNNLDALAEVVRFIYDNIQYAEFNTKSDYCHVCGYDGEIMINDDNEWECPQCGNKDHAKMNVTRRTCGYLGENFWNVGKTKEIKARVLHL

SEQ ID NO: 458 - protein, 724 aa, unidentified
  REGION 1..724: note = Description of Unknown: uncultivated organism sequence
  REGION 1..724: note = Category: MG55 effectors
  REGION 1..724: note = Description: MG55-31 effector
MKIIKRSGAENTFDKEKIENAVAKANITVEEKDRLSEGEIGEIAQNIEDKCSEMNRAMDVETIQDWVEADIMRHGKYTVAKHYITYRYERSIVRQANTTDKQILSLLNFENEEVKQENSNKNPTVNSVQRDYMAGEVSKDITRRFLLPDDIVEAHEKGLIHFHDADYFAQHMHNCCLVNLEDMLQNGTVISEVMIEKPHSFSTACNIATQSIAQIASSQYGGQSITLSHLAPFVQISRDKYRREVKKEFAELNIPADEDTINKVAEMRVKAEIVQGVQMIQYQVITLMTTNGQAPFVTVFMYLDEVPEGQTRDDLAAIIEEMLRQRIQGVKNEKGVYITPAFPKLIYVLEEDNIREGSKYWELTKLAAKCTAKRMVPDYISEKKMKELKVDKNGNGQCYPCMGCRSFLTTYLDENGKPKYYGRFNQGVVTINLVDVACSSYKDMDKFWKIFDERLELCRRALMLRHERLKGTPSDVAPILWQNGALARLKKGETIDKLLFGGYSTISLGYAGLCECVRYMTGKSHTDPSATPFALEVMQHLNDACTKWRAETNIDFSLYGTPLESTTYKFARCLQKRFGVIEGVTDRNYITNSYHIHVTENIDAFDKLTFESQFQALSPGGAISYVEVPNMQNNIEAVLAVMQHIYDNIMYAELNTKSDYCQKCGFDGEIKIVEDDGKLVWECPNCGNRDQNTLNVARRTCGYIGTQFWNQGRTQEIKERVLHL

SEQ ID NO: 459 - protein, 719 aa, unidentified
  REGION 1..719: note = Description of Unknown: uncultivated organism sequence
  REGION 1..719: note = Category: MG55 effectors
  REGION 1..719: note = Description: MG55-32 effector
MQVIKRDGKVVDFDQSKIKIAIEKANKEVKPRERATKEEINQIISYIEELDKKRILVEDIQDIIEEQLMTFGKYILAKKYITYRYTRELVRKSNTTDQSIKELIDGESDYWNNENSNKNARVVTTQRDYLAGITSTDITRRFLLPEDVVKAHDEGIIHFHDADYFAQNALTNCELINLEDMLQNGTIMNGVMIEKPHRFLTAMTIATQIILGVTSSTYGGATVSITHLAPFVKSSYEKYYKKYKQRGLNEKQCKEYAEQDTRKEVSDGVQTFNYQVNSMTNTNGQAPFLSVCMYLGETDEYKQELAMIIEEFLKQRIEGFKNEKGVYITPAFPKLLYVLEEDNIHKDSKYWYLTELAAKCTAKRLVPDYISEKKMKEYKIDKNGNGNCYPCMGCRSFLTPYVDPETNKPKYYGRFNQGVVTINLVDVALSSKQDEEKFWKIFDERLELCHKALQIRHERLSKVTSDVAPILWQHGALARLKKGESIHKLLHDGYSTISLGYAGLYECVKYMTGNSHTDNGIGEEFALKVMQKLNDKCKEWKEAEKIDYSVYGTPIESTTYKFAKCLRKRFGTIEGITDRSYITNSYHVPVFEDIDAFSKLKLESKFQKLSPGGAISYVETPNLQNNLEVVLQIIHFIYDNIMYAELNTKSDYCQKCGFDGEILIDENLEWYCPNCGNRDHNTLNVARRTCGYIGSQFWNKGRTQEIKERVLHIDNKDDE

SEQ ID NO: 460 - protein, 404 aa, unidentified
  REGION 1..404: note = Description of Unknown: uncultivated organism sequence
  REGION 1..404: note = Category: MG55 effectors
  REGION 1..404: note = Description: MG55-33 effector
MAKVKKANTGLNRTVVFEVSVANNNIKKQVMASIDKYRAVARKMYSSVAMAATAGATIEVKNGDVRVKPYTQNSKDILSKAYNVSGKAQFYELRNFVLKDHANTWQSVIWDSCRLAVAGTWNHADPEFSKGEKKVGRGWLSLQGARAFGFFNRCGIGLPNTKSIQFGSKSMTMKWDKEIDDVTFFVDSKLPGNTFWKFKNIRDGVWERGTCYIGWKYKNIGGGKKVKTLYITMTYKLPENYFNEESGEGVMIVEFTDDPENGIVMYSDDKFHYSDKISVYEAIAWNKQLNVVKDYYKKQRASVGGRDKQWGLNQSLMVISNKSENLTKRRINGKKHRNHIWANRIVARVRQWGMGVVVLKDFPDGLLIDQEWSMFELKEILKYKLREIGCELKTYNTPKEEEAA

SEQ ID NO: 461 - protein, 724 aa, unidentified
  REGION 1..724: note = Description of Unknown: uncultivated organism sequence
  REGION 1..724: note = Category: MG55 effectors
  REGION 1..724: note = Description: MG55-34 effector
MKIIKRSGAENTFDKEKIENAVAKANITVEEKDRLSEGEIGEIAQNIEDKCSEMNRAMDVETIQDWVEADIMRHGKYTVAKHYITYRYERSIVRQANTTDKQILSLLNFENEEVKQENSNKNPTVNSVQRDYMAGEVSKDITRRFLLPDDIVEAHEKGLIHFHDADYFAQHMHNCCLVNLEDMLQNGTVISEVMIEKPHSFSTACNIATQSIAQIASSQYGGQSITLSHLAPFVQISRDKYRREVKKEFAELNIPADEDTINKVAEMRVKAEIVQGVQMIQYQVITLMTTNGQAPFVTVFMYLDEVPKGQTRDDLAAIIEEMLRQRIQGVKNEKGVYITPAFPKLIYVLEEDNIREGSKYWELTKLAAKCTAKRMVPDYISEKKMKELKVDKNGNGQCYPCMGCRSFLTTYLDENGKPKYYGRFNQGVVTINLVDVACSSYKDMDKFWKIFDERLELCRRALMLRHERLKGTPSDVAPILWQNGALARLKKGETIDKLLFGGYSTISLGYAGLCECVRYMTGKSHTDPSATPFALEVMQHLNDACAKWRAETNIDFSLYGTPLESTTYKFARCLQKRFGVIEGVTDRNYITNSYHIHVTENIDAFDKLTFESQFQALSPGGAISYVEVPNMQNNIEAVLAVMQHIYDNIMYAELNTKSDYCQKCGFDGEIKIVEDDGKLVWECPNCGNRDQNTLNVARRTCGYIGTQFWNQGRTQEIKERVLHL

SEQ ID NO: 462 - protein, 719 aa, unidentified
  REGION 1..719: note = Description of Unknown: uncultivated organism sequence
  REGION 1..719: note = Category: MG55 effectors
  REGION 1..719: note = Description: MG55-35 effector
MQVIKRDGKVVDFDQSKIKIAIEKANKEVKPRERATKEEINQIISYIEELDKKRILVEDIQDIIEEQLMTFGKYILAKKYITYRYTRELVRKSNTTDQSIKELIDGESDYWNNENSNKNARVVTTQRDYLAGITSTDITRRFLLPEDVVKAHDEGIIHFHDADYFAQNALTNCELINLEDMLQNGTIMNGVMIEKPHRFLTAMTIATQIILGVTSSTYGGATVSITHLAPFVRSSYDRYYKKYKQRGLSEKQCKEYAEQDTKKEISDGVQTFNYQVNSMTNTNGQAPFLSVCMYLGETDEYKQELAMIIEEFLKQRIEGFKNEKGVYITPAFPKLLYVLEEDNIHKDSKYWYLTELAAKCTAKRLVPDYISEKKMKELKIDKNGNGNCYPCMGCRSFLTPYVDPETNKPKYYGRFNQGVVTINLVDVALSSKQDEEKFWKIFDERLELCHKALQIRHERLSKVTSDVAPILWQHGALARLKKGESIHKLLHDGYSTISLGYAGLYECVKYMTGNSHTDNGIGEEFALKVMQKLNDKCKEWKEAEKIDYSVYGTPIESTTYKFAKCLRKRFGTIEGITDRSYITNSYHVPVFEDIDAFSKLKLESKFQKLSPGGAISYVETPNLQNNLEVVLQIIHFIYDNIMYAELNTKSDYCQKCGFDGEILIDENLEWYCPNCGNRDHNTLNVARRTCGYIGSQFWNKGRTQEIKERVLHIDNKDDE

SEQ ID NO: 463 - protein, 707 aa, unidentified
  REGION 1..707: note = Description of Unknown: uncultivated organism sequence
  REGION 1..707: note = Category: MG55 effectors
  REGION 1..707: note = Description: MG55-36 effector
MQVIKRDGSVVEYDRTKIAIAIGKANAEVEKKERASKEEIETILAAVEEKKKKRMLVEDIQDIIEEKLMELGHYELAKTYIIYRYNRALVRKANTTDEAILSLISNSNKDVMEENSNKNALAAATQRDLIAGEVSKDLTRRILLPEKISKAHDEGILHFHDADYFIQPIFNCCLINIGDMLDNGTVMNGKLIESPKSFQVACTVVTQIIAAVACSQYGGQSVDIRHLGKYLRKSRVKFEKHFRETCPELAEEEVKKLVDDRIQDELKSGVQTIQYQINTLMTTNGQSPFVTLFLYLDKDDEYLEENAQIVMEILRQRYEGIKNEKGVYVTPAFPKLVYVLDEINCLKGGKYDYITEFAVKCSAKRLYPDYISAKKMRETYEGNVFSPMGCRSFLSPWKDENGNYKFEGRFNQGVVSINLPQIGIIAKGDEEKFWKLFDERLDLCREALMCRHRALLGTKSDVSPIHWQYGAIARLDKGEVIDKLLFNGYSTLSLGYIGLYEVTKLMTGVTQTDPKGEEFALRVMQHMRDKTDEWKMETGLGFALYGTPAESLCYRFARIDKEKFGTIEDVTDKGYYTNSYHVDVREHIDAFSKFSFEAQFQRISSGGCISYVEIPNMQNNLEAMQEIVRFIYDNIQYAEFNTKSDYCHVCGWDGEIIINDDNEWECPNCHNKDHRKMNVTRRTCGYLGENFWNLGKTKEIKARVLHL

SEQ ID NO: 464 - protein, 719 aa, unidentified
  REGION 1..719: note = Description of Unknown: uncultivated organism sequence
  REGION 1..719: note = Category: MG55 effectors
  REGION 1..719: note = Description: MG55-37 effector
MQVIKRDGKVVDFDQSKIKIAIEKANKEVKPRERASKDEINQIIGYVEDLDKKRILVEDIQDIIEEQLMSFGKYVLAKKYITYRYTRELVRKANTTDQSIKELIDGESDYWNNENSNKNAQVVTTQRDYLAGITSTDITRRFLLPEDVVKAHDEGIIHFHDADYFAQNALTNCELINLEDMLQNGTIMNGVMIEKPHRFLTAMTIATQIILGVTSSTYGGATVSLTHLAPFVRSSYDRYYKKYKQRGLSEKQCKEYAEQDTKKEVSDGVQTFNYQVNSMTNTNGQAPFLSVCMYLGETDEYKQELAMIIEEFLKQRIEGFKNEKGVYITPAFPKLLYVLEEDNIHKDSKYWYLTELAAKCTAKRLVPDYISEKKMKEYKIDKNGNGNCYPCMGCRSFLTPYVDPETNKPKYYGRFNQGVVTINLVDVALSSKQDEEKFWKIFNERLELCHKALQIRHERLSKVTSDVAPILWQHGALARLKKGESIHKLLHDGYSTISLGYAGLYECVKYMTGNSHTDNGIGEEFALRVMQKLNDKCKEWKEAEKIDYSVYGTPIESTTYKFAKCLKKRFGTIEGITDRSYITNSYHVPVFEDIDAFSKLKLESKFQKLSPGGAISYVETPNLQNNLEVVLQIIHFIYDNIMYAELNTKSDYCQKCGFDGEILIDENLEWYCPNCGNRDHNTLNVARRTCGYIGSQFWNKGRTQEIKERVLHIDNKDDE

SEQ ID NO: 465 - protein, 730 aa, unidentified
  REGION 1..730: note = Description of Unknown: uncultivated organism sequence
  REGION 1..730: note = Category: MG55 effectors
  REGION 1..730: note = Description: MG55-38 effector
MQVIKRDGRIVDFDRQKIAAAIGKANAEVKPRERASKEDIKGIIEYVEGLDKKRILVEDIQDIIEEKLMECEKYLLAKKYITYRYTRELVRKANTTDQSIKELIDGESDYWNNENSNKNARVVTTQRDYLAGITSTDITRRFLLPKDVVEAHDEGIIHFHDADYFAQNALTNCELINLDDMLQNGTIMNGVMIEKPHRFLTAMTIATQIILAVTSSTYGGATVSLTHLAPFVRSSYERYYKKYKERGLSEKQCKEYAEQDTKKEIADGVQTFNYQVNSMTNTNGQAPFLSVNMYLGETKEYKKELAMVIEEFLKQRIEGFKNEKGVYITPAFPKLLYVLEKDNITEDSPYWYLTELAAKCTAKRMVPDYISEKKMLELKIDKNGNGNCYPCMGCRSFLTPYVDPKTNKPKYYGRFNQGVVTINLVDVALSSDKDMDKFWKIFDERLELCHRALQVRHERLSKVTSDVAPILWQNGALARLKKGESIHPLLHGGYSTISLGYAGLYECVKYMTDHSHTDNGEGKDFGIKVMQKLNDKCKEWKAAEDIDYSVYGTPIESTTYKFAKCLKKRFGVIEGITDRDYITNSYHIPVFEEIDAFSKLSIESQFQQLSPGGAISYIETPNLQNNIESVLQIIKFIYDNIMYAELNTKSDYCQVCGFDGEILIDDNLEWYCPNCGNRNHDTLNVARRTCGYIGSQFWNKGRTQEIKERVLHIDNKDAEMPKKEKTKVAV

SEQ ID NO: 466 - protein, 719 aa, unidentified
  REGION 1..719: note = Description of Unknown: uncultivated organism sequence
  REGION 1..719: note = Category: MG55 effectors
  REGION 1..719: note = Description: MG55-39 effector
MQVVKRDGKLVDFDQSKIRVAIEKANREVKPRERATKEEINQIIDYVEDLDKKRILVEDIQDIIEEQLMSFGKYLLAKKYITYRYTRELVRKANTTDQSIKELIDGESDYWNNENSNKNARVVTTQRDYLAGITSTDITRRFLLPEDVVKAHDEGIIHFHDADYFAQNALTNCELINLEDMLQNGTIMNGVMIEKPHRFLTAMTIATQIILGVTSSTYGGATVSLTHLAPFVKSSYDRYYKKYKKRGLSEAQCKEYAEQDTKKEVSDGVQTFNYQVNSMTNTNGQAPFLSVCMYLGETDEYKKELAMIIEEFLKQRIEGFKNEKGVYITPAFPKLLYVLEEDNIHKDSKYWYLTELAAKCTAKRLVPDYISEKKMKEYKIDKNGNGNCYPCMGCRSFLTPYVDPETNKPKYYGRFNQGVVTINLVDVALSSKQDEEKFWKIFDERLELCHKALQIRHERLSKVTSDVAPILWQHGALARLEKGESIHKLLHDGYSTISLGYAGLYECVKYMTGHSHTDNGEGEEFAIKVMQKLNDKCKEWKEAEKIDYSVYGTPIESTTYKFAKCLKKRFGTVEGITDRNYITNSYHVPVFEDIDAFSKLKLESKFQKLSPGGAISYVETPNLQDNLEVVLQIINFIYDNIMYAELNTKSDYCQKCGFDGEILIDENLEWYCPNCGNRDHNTLNVARRTCGYIGSQFWNKGRTQEIKERVLHIDNKDDE

SEQ ID NO: 467 - protein, 724 aa, unidentified
  REGION 1..724: note = Description of Unknown: uncultivated organism sequence
  REGION 1..724: note = Category: MG55 effectors
  REGION 1..724: note = Description: MG55-40 effector
MKIIKRNGAEATFDISKIIMAITKANAAVEECDRMTPRQIQRIAESVELACQELGRSAAVEEIQDMVEKQIMAHGAFEVAKAYITYRYTRSLVRRANTTDDRILSLIECNNEEAKQENSNKNPIVNSTQRDYMAGEVSRDITSRLLLPKDIVEAHEEGIIHFHDADYYAQHMHNCDLVNLEDMLENGTVITGTLIERPHSFSTACNIATQIIAQVASNQYGGQSISLTHLAPFVQVSRERIRREVEAEMQAIDAHPGEEKLAELVENRVREEIRRGVQTIQYQVVTLLTTNGQAPFVTVFMYLGEAKNEQERHDLAMIIEETLRQRYQGVKNEKGVWVTPAFPKLIYVLEEDNIHEDSPYWYLTELAARCTAKRMVPDYISEKKMLELKVDKNGEGHCYTCMGCRSFLTPYVDENGKPKYYGRFNQGVVTINLPDVALSSGGNMEKFWKIFDERLELCHRALMCRHERLKGTLSDAAPILWQYGALARLKKGEPIDKLLYGGYSTISLGYAGLYECVKYMTGKSHTDPSATPFALEIMQHMNDACAKWKQMHNIDFSLYGTPLESTTYKFAKCLQKRFGIIPGVTDKGYITNSYHIHVTEHIDAFSKLAFESKFQALSPGGAISYVEVPNMQNNIPAVLEVMKFIYDNIMYAELNTKSDYCQVCGYDGEIEIVEHDGKLIWRCPNCGNTDQDKMNVARRTCGYIGTQFWNQGRTQEIKERVLHL

SEQ ID NO: 468 - protein, 712 aa, unidentified
  REGION 1..712: note = Description of Unknown: uncultivated organism sequence
  REGION 1..712: note = Category: MG55 effectors
  REGION 1..712: note = Description: MG55-41 effector
MISKVRKRDGRIKDFDSRRIIEALRKAFEELGYTSSYEYINVAGSVVSELSKLDSEICDVEAIQDIVVKVLQESHPEVAKKYEEYRLKRTEIREENSKLIKSVEGLLNFSNDEVMLENSNKQAQLISTTRDLMAGEVSKFIVRKMIPKDILELHDRGVIHIHDMDYGANDMFNCELVNLQDMLDNGTVINKKMIHSPHTLRTAMTIATQISAQVASYQYGGQTMTLSHLAPYVRKSESVIRREIESDYPELSKERKDKIVERRLRKEIKDSVQLFNYQISTIQSTNGQAPFISLAIYLSERPGYEREVAMLAEEFFNQRIEGIENENGVKATQTFPKLLYFLDENNTYEGSEYFWLTQLAVKSTSLRMNPDYISAKKMKENVGHVFSCMGCRAFLSPFQDKDGNWIFYGRGNLGVCTINLPHVALSAKGDINKFWEILDERLEACRWVGEWRYNKMKGVKAKEAPILWQHGAISRLNPEDDVIKAIDERGFTVTLGYSGIYETVKVLIGKSHTTDNGFDLAEKIMIHLRDKCTEWKTEKPWLRFALYGTPQESTTETFSKALIRDFGEIEGICGKGKLWVTNSYHVDIQEEINAFDKLAIEGELQKYSTGGAVSYVETYNMSKNQEALLQVVQYMYETIMYAEINFESDVCGECGYSGVMDNDPKTLEWVCPNCGNRNQDTLSVVRRTCGYLAETKWTPGRLLDILNRVKHL

SEQ ID NO: 469 - protein, 724 aa, unidentified
  REGION 1..724: note = Description of Unknown: uncultivated organism sequence
  REGION 1..724: note = Category: MG55 effectors
  REGION 1..724: note = Description: MG55-42 effector
MKIIKRSGAENTFDKEKIENAVAKANITVEEKDRLSEGEIGEIAQNIEDKCSEMNRAMDVETIQDWVEADIMRHGKYTVAKHYITYRYERSIVRQANTTDKQILSLLNFENEEVKQENSNKNPTVNSVQRDYMAGEVSKDITRRFLLPDDIVEAHEKGLIHFHDADYFAQHMHNCCLVNLEDMLQNGTVISEVMIEKPHSFSTACNIATQSIAQIASSQYGGQSITLSHLAPFVQISRDKYRREVKKEFAELNIPADEDTINKVAEMRVKAEIVQGVQMIQYQVITLMTTNGQAPFVTVFMYLDEVPEGQTRDDLAAIIEEMLRQRIQGVKNEKGVYITPAFPKLIYVLEEDNIREGSKYWELTKLAAKCTAKRMVPDYISEKKMKELKVDKNGNGQCYPCMGCRSFLTTYLDENGKPKYYGRFNQGVVTINLVDVACSSYKDMDKFWKIFDERLELCRRALMLRHERLKGTPSDVAPILWQNGALARLKKGETIDKLLFGGYSTISLGYAGLCECVRYMTGKSHTDPSATPFALEVMQHLNDACAKWRAETNIDFSLYGTPLESTTYKFARCLQKRFGVIEGVTDRNYITNSYHIHVTENIDAFDKLTFESQFQALSPGGAISYVEVPNMQNNIEAVLAVMQHIYDNIMYAELNTKSDYCQKCGFDGEIKIVEDDGKLVWECPNCGNRDQNTLNVARRTCGYIGTQFWNQGRTQEIKERVLHL

SEQ ID NO: 470 - protein, 463 aa, unidentified
  REGION 1..463: note = Description of Unknown: uncultivated organism sequence
  REGION 1..463: note = Category: MG55 effectors
  REGION 1..463: note = Description: MG55-43 effector
MEQITLTRKIELFVNEEGNKKNECYDLLHYLNNNLYKIANDSVNYLHIKKNLPEFILKHNKEDYEKYVNNLNKMSEIKNFKSTEFIELKNQNRDIINKYSNNEEYKKMIYNDSKETTLVYHNINKRLPKGLSSISASLSKKIENDYKIKEKEYFLGKSTLNIYKRGLPIPFNISGKLVKDPSLFFKFDNGKYYINLFGYNFGLFFGPDRSNNKAIIEHIINDTDKYKLCDSAIQFKDKKIFLLLSFKQPLDNTIKLDDNKVLGVDLGVNAPVYLAINDNDYYKKQIGDIHHFDSHKLQYKKRYTSLIKNLEISNGGRGRKKKLSALDKLKKVEKNWTNTEQHKISNSVIKEALNNNCKYINIENLENYKENLTENKKYIMRIWGYYGIQEKIMYKAKKHNIVVRKINPAYTSQKCHKCGNIEKTARNKQIFTCLNEKCSIFGKEIHADFNGAKNISLSTEFKK

SEQ ID NO: 471 - protein, 1231 aa, unidentified
  REGION 1..1231: note = Description of Unknown: uncultivated organism sequence
  REGION 1..1231: note = Category: MG55 effectors
  REGION 1..1231: note = Description: MG55-44 effector
MSVFSKYRNFFPVKKSISLGAIPTPVTVSNMKKDRILENDIIREERASRMEDVYDEEYKKLIEKILSSMDNKKELKELISAYEKRKEDRNGYADAENDFVESISKALSESEEYKNLCNAEYFSKELPKKVSSEIADLISKLNFGSFETHRKTRTTLFGVKDGSVAKRIGHDNFLIYMDNCAKLENALSILGKETLEKYVAEMGDASDITEELIYGYAEKENYISLFSQKAIDDYNLLINGYTVGKRTKIKGINELINEHNQQEKEKEMKLAFLSKLQKLPLFDATSYSVIPESFSSDSELIESIDMLYNKDIGERKSLKSVIENAAKIFLGFSEVYDLSHIYINPKKNNAFSKNFLGKWNILERLFKEDFAKKNESPKLKGKKLDKLVEDAYKNKVFSFTDVEKIADMCDGFEEFSIEKAYIRDILDKALAVSNAYNEYKAYMEEREKMENAPAIKRDNRAAAVIRELCLAVKECERSLIYILHGEELIEVGAEGDAVFYEKFNSLAETIKDSDRLYNKIRNFVSQTKVSEDKTRLMFNNDEFLKGWSDSSKKGGAIIRDGKEYYLICIMKGFKGIENIQSDGNDLDLMEYNFTGDVSKCLGKNLMYTGMKNKSGAGSKYVYNENSKIVADYGLTEDVFNAYQNGIHTKGYADQGYTEEEHKDALRKIIRYFNKALPLAYSGFDAEGLRDDYETFNEYCNELNKRNFTLGFRKASRTKIDEYEKAGYIYKFRIWCRDFSEKAYGIKQNYALIFNALFNEKNEYYSKIRLCGSAKLIFVKASIKDEDKVVHKAGQPIRNKNPKSGKPTSTYSYDIIKDRRKLKDHYIIQLPYEINRQALGNPVNLNAVVLDDIRNGNLKSIVSIKTGQDNLLWVCVTDMEGNIKKQYPLNVIDNNDYREKISARQNEMKSGNKEWRPGADIKSLKEGYLTLAIRKIVDAVFENDAILLLESSNGNKKEKTFGVDTRLYDRLADMLQVKLHYCFSKRKPFLEEGGLLNAYQLCGALPTGDKKKKVFQNGIVFFTNTAYTKNTDPITGFVPPVIGEYLNLKSAISIISNIKEIGYEKGQYYLLIDKKMYKNNYEGKTDWKCYIAGERIVAIRDDSLARGRRYEKADIGKIFADFLKENGIDANKNIKEQILERDDKPFFASLLEILNNVFRMNNGHGDENFFVSPVKNDKGLFFDSRISKEIPCTDANAAYNMARKMVISIEKIKNEETKTIPTTAEYLERIQK

SEQ ID NO: 472 - protein, 724 aa, unidentified
  REGION 1..724: note = Description of Unknown: uncultivated organism sequence
  REGION 1..724: note = Category: MG55 effectors
  REGION 1..724: note = Description: MG55-45 effector
MKIIKRSGAENTFDREKIENAVAKANITVEEKDRLSEGEIEEIAQNIENKCSEMNRAMDVETIQDWVEADIMRHGKYTVAKHYITYRYERSIVRQANTTDKQILSLLNFENEEVKQENSNKNPTVNSVQRDYMAGEVSKDITRRFLLPDDIVEAHEKGMIHFHDADYFAQHMHNCCLVNLEDMLQNGTVISEVMIEKPHSFSTACNIATQSIAQIASSQYGGQSITLSHLAPFVQISRDKYRREVKKEFAELNIPADEDTINKVAEMRVKAEIVQGVQMIQYQVITLMTTNGQAPFVTVFMYLDEVPEGQTRDDLAAIIEEMLRQRIQGVKNEKGVYITPAFPKLIYVLEEDNIREGSKYWELTKLAAKCTAKRMVPDYISEKKMKELKVDENGNGQCYPCMGCRSFLTTYLDENGKPKYYGRFNQGVVTINLVDVACSSYKDMDKFWKIFDERLELCRRALMLRHERLKGTPSDVAPILWQNGALARLKKGETIDKLLYGGYSTISLGYAGLCECVRYMTGKSHTDPSATPFALKVMQHLNDACAKWRAETNIDFSLYGTPLESTTYKFARCLQKRFGIIEGVTDRNYITNSYHIHVTENIDAFDKLTFESQFQALSPGGAISYVEVPNMQNNIEAVLAVMQHIYENIMYAELNTKSDYCQKCGFDGEIKIAEDDGKLVWECPNCGNRDQNTMNVARRTCGYIGTQFWNQGRTQEIKERVLHL

SEQ ID NO: 473 - protein, 730 aa, unidentified
  REGION 1..730: note = Description of Unknown: uncultivated organism sequence
  REGION 1..730: note = Category: MG55 effectors
  REGION 1..730: note = Description: MG55-46 effector
MQVIKRDGRIIDFDRQKIVSAIGKANAEVKPKERASKDDIKSIIEYIEGLGKKRILVEDIQDIIEEKLMELDKYSLAKKYITYRYTRELVRKANTTDQSIKELIDGESEYWNNENSNKNAKVVTTQRDYLAGITSTDITRRFLLPKDIVEAHDEGIIHFHDADYFAQNALTNCELINLEDMLQNGTIMNGVMIEKPHRFLTAMTIATQIILAVTSSTYGGATVSLAHLAPFVRSSYDRYYKKYKDRGLKEEQCKEFAMQDTKKEVADGVQTFNYQVNSMTNTNGQAPFLSVCMYLGETKEYKKELAMVIEEFLKQRIEGFKNEKGVYITPAFPKLLYVLEKDNVTEDSKYWYLTELAAKCTAKRMVPDYISEKKMLELKIDKNGNGNCYPCMGCRSFLTPYVDPKTNKPKYYGRFNQGVVTINLVDVALSSDKDMDKFWKIFDERLELCHRALQVRHERLSKVTSDVAPILWQHGALARLKKGESIHPLLHGGYSTISLGYAGLYECVKYMTEHSHTDNGEGKDFGIQVMQRLNDKCKEWKAAEDIDYSVYGTPIESTTYKFAKCLKKRFGVIKGITDRDYITNSYHIPVFEEIDAFSKLSIESQFQQLSPGGAISYVETPNLQNNIEAVIQIIKFIYDNIMYAELNTKSDYCQECGFDGEILIDDNLEWYCPNCGNRNHDTLNVARRTCGYIGSQFWNKGRTQEIKERVLHIDNKDAEMPKKEKTKVAV

SEQ ID NO: 474 - protein, 724 aa, unidentified
  REGION 1..724: note = Description of Unknown: uncultivated organism sequence
  REGION 1..724: note = Category: MG55 effectors
  REGION 1..724: note = Description: MG55-47 effector
MKIIKRSGAENTFDKEKIENAVAKANITVEEKDRLSEGEIGEIAQNIEDKCSEMNRAMDVETIQDWVEADIMRHGKYTVAKHYITYRYERSIVRQANTTDKQILSLLNFENEEVKQENSNKNPTVNSVQRDYMAGEVSKDITRRFLLPDDIVEAHEKGLIHFHDADYFAQHMHNCCLVNLEDMLQNGTVISEVMIEKPHSFSTACNIATQSIAQIASSQYGGQSITLSHLAPFVQISRDKYRREVKKEFAELNIPTDEDTINKVAEMRVKAEIVQGVQMIQYQVITLMTTNGQAPFVTVFMYLDEVPEGQTRDDLAAIIEEMLRQRIQGVKNEKGVYITPAFPKLIYVLEEDNIREGSKYWELTKLAAKCTAKRMVPDYISEKKMKELKVDKNGNGQCYPCMGCRSFLTTYLDENGKPKYYGRFNQGVVTINLVDVACSSYKDMDKFWKIFDERLELCRRALMLRHERLKGTPSDVAPILWQNGALARLKKGETIDKLLFGGYSTISLGYAGLCECVRYMTGKSHTDPSATPFALEVMQHLNDACAKWRAETNIDFSLYGTPLESTTYKFARCLQKRFGVIEGVTDRNYITNSYHIHVTENIDAFDKLTFESQFQALSPGGAISYVEVPNMQNNIEAVLAVMQHIYDNIMYAELNTKSDYCQKCGFDGEIKIVEDDGKLVWECPNCGNRDQNTLNVARRTCGYIGTQFWNQGRTQEIKERVLHL

SEQ ID NO: 475 - protein, 724 aa, unidentified
  REGION 1..724: note = Description of Unknown: uncultivated organism sequence
  REGION 1..724: note = Category: MG55 effectors
  REGION 1..724: note = Description: MG55-48 effector
MKIIKRNGAEENFDISKIIMAVTKANAAVEECDRMTPRQIQRIAESVELACQELGRSAAVEEIQDMVEKQIMAHGAFEVAKAYITYRYTRSLVRRANTTDDRILSLIECNNEEAKQENSNKNPIVNSTQRDYMAGEVSRDITSRLLLPKDIVEAHEEGIIHFHDADYYAQHMHNCDLVNLEDMLENGTVITGTLIERPHSFSTACNIATQIIAQVASNQYGGQSISLTHLAPFVQVSRERIRREVEAEMQAIDAHPGEEKLAELVENRVREEIRRGVQTIQYQVVTLLTTNGQAPFVTVFMYLGEAKNEQERHDLAMIIEETLRQRYQGVKNEKGVWVTPAFPKLIYVLEEDNIHEDSPYWYLTELAARCTAKRMVPDYISEKKMLELKVDKNGEGHCYTCMGCRSFLTPYVDENGKPKYYGRFNQGVVTINLPDVALSSGGNMEKFWKIFDERLELCHRALMCRHERLKGTLSDAAPILWQYGALARLKKGEPIDKLLYGGYSTISLGYAGLYECVKYMTGKSHTDPSATPFALEIMQHMNDACAKWKQMHNIDFSLYGTPLESTTYKFAKCLQKRFGIIPGVTDKGYITNSYHIHVTEKIDAFSKLAFESKFQALSPGGAISYVEVPNMQNNIPAVLEVMKFIYDNIMYAELNTKSDYCQVCGYDGEIEIVEHDGKLIWRCPNCGNTDQDKMNVARRTCGYIGTQFWNQGRTQEIKERVLHL

SEQ ID NO: 476 - protein, 712 aa, unidentified
  REGION 1..712: note = Description of Unknown: uncultivated organism sequence
  REGION 1..712: note = Category: MG55 effectors
  REGION 1..712: note = Description: MG55-49 effector
MISKVRKRDGRIKDFDSRRIIEALRKAFEELGYTSSYEYINVAGSVVSELSKLDSEICDVEAIQDIVVKVLQESHPEVAKKYEEYRLKRTEIREENSKLIKSVEGLLNFSNDEVMLENSNKQAQLISTTRDLMAGEVSKFIVRKMIPKDILELHDRGVIHIHDMDYGANDMFNCELVNLQDMLDNGTVINKKMIHSPHTLRTAMTIATQISAQVASYQYGGQTMTLSHLAPYVRKSESVIRREIESDYPELSKERKDKIVERRLKKEIKDSVQLFNYQISTIQSTNGQAPFISLAIYLSERPGYEREVAMLAEEFFNQRIEGIENENGVKATQTFPKLLYFLDENNTYEGSEYFWLTQLAVKSTSLRMNPDYISAKKMKENVGHVFSCMGCRAFLSPFQDKDGNWIFYGRGNLGVCTINLPHVALSAKGDINKFWEILDERLEACRWVGEWRYNKMKGVKAKEAPILWQHGAISRLNPEDDVIKAIDERGFTVTLGYSGIYETVKVLIGKSHTTDNGFDLAEKIMIHLRDKCTEWKTEKPWLRFALYGTPQESTTETFSKALIRDFGEIEGICGKGKLWVTNSYHVDIQEEINAFDKLAIEGELQKYSTGGAVSYVETYNMSKNQEALLQVVQYMYETIMYAEINFESDVCGECGYSGVMDNDPKTLEWVCPNCGNRNQDTLSVVRRTCGYLAETKWTPGRLLDILNRVKHL

SEQ ID NO: 477 - protein, 724 aa, unidentified
  REGION 1..724: note = Description of Unknown: uncultivated organism sequence
  REGION 1..724: note = Category: MG55 effectors
  REGION 1..724: note = Description: MG55-50 effector
MKIIKRNGAEATFDISKIIMAITKANAAVEEGDRMTPRQIQRIAESVELACQELGRSAAVEEIQDMVEKQIMAHGAFEVAKAYITYRYTRSLVRRANTTDDRILSLIECNNEEAKQENSNKNPIVNSTQRDYMAGEVSRDITSRLLLPKDIVEAHEEGIIHFHDADYYAQHMHNCDLVNLEDMLENGTVITGTLIERPHSFSTACNIATQIIAQVASNQYGGQSISLTHLAPFVQVSRERIRREVAAEMQAINADPGEEKLAELVENRVREEIRRGVQTIQYQVVTLLTTNGQAPFVTVFMYLGEAKNEQERHDLAMIIEETLRQRYQGVKNEKGVWVTPAFPKLIYVLEEDNIHEDAPYWYLTELAARCTAKRMVPDYISEKKMLELKVDKNGEGHCYTCMGCRSFLTPYVDENGKPKYYGRFNQGVVTINLPDVALSSGGNMEKFWKIFDERLELCHRALMCRHERLKGTLSDAAPILWQYGALARLKKGEPIDKLLYGGYSTISLGYAGLYECVKYMTGKSHTDPSATPFALEVMQHMNDACKHWKQMHNIDFSLYGTPLESTTYKFAKCLQKRFGIIPGVTDKGYITNSYHIHVTENIDAFSKLAFESKFQALSPGGAISYVEVPNMQNNIPAVLEVMKFIYDNIMYAELNTKSDYCQVCGYDGEIEIVERDGKLIWRCPNCGNTDQDKMNVARRTCGYIGTQFWNQGRTQEIKERVLHL

SEQ ID NO: 478 - protein, 463 aa, unidentified
  REGION 1..463: note = Description of Unknown: uncultivated organism sequence
  REGION 1..463: note = Category: MG55 effectors
  REGION 1..463: note = Description: MG55-51 effector
MARRIKNVASNNYTLGIDIGSTTAKLALMCDGKIVYSKYQRHRSRIISTTLDMLREMKEIYPVDKVRVTISGSAGMGMAEKAGIDFIQEVYATGEVVYKLAPDTGVVIELGGEDAKVIFFKGGVDERMNGSCAGGTGAFIDQMAVLLNMSVDDMDKASLEAKRIYPIASRCGVFAKTDIQPLLNQGASKSDIAASIFQAVVNQTITGLIQGRKIEGKVMFLGGPLYYCEGLKKRFYETLSLTEETAVFPEYALYAVAMGASMYAQNSEEISFEELEKRIENSAKCESRGLDTLPPLFASKEEYDYFVQRHNKATVPQKDINTYIGNAWLGIDCGSTTTKLVLISDDRSILYSFYSSNKGNPVKLVKEQLEIIYSLCQNRIKICGSSVTGYGEELIRHAFRTDEGVVETIAHYTAAKYFRPDVDFILDIGGQDIKCFKIRNGAIDSIIFRVRFFCRDIRKGNGI

SEQ ID NO: 479 - protein, 420 aa, unidentified
  REGION 1..420: note = Description of Unknown: uncultivated organism sequence
  REGION 1..420: note = Category: MG55 effectors
  REGION 1..420: note = Description: MG55-52 effector
MVTSSMKIKIIPVDVISKNWIFDIFNVSYKILNRAYDISRMLHQYPVIMSPVTPPKSQVYNLTTQEFPKVITTYLRDWVYQAENNYKSDVKAGLLSGKRSPRLYKKYGATRFQFLKNSNPKLIKENGDFFILINSRTNIKFKIIFDKKTGHLKTMLNRFLDLENKKYNLNSTFLIKYTNRKELMLILSYEQDIQGYVGIDNRVMGIDMGVRRFISLRINDIPSYQKSIHSEKLVQQKYGIAMKNKRVQESSVLAKSGHGRTRKMQVYNKVKDSETSFTDNVLDKLSKEVIESAAKLKVQQINMERLDKNSMKEQNSYLGRYWGVMTLMNLIEQKAIKRGIIIKYIDPYHTSQICSCCGSIGERNGAEFKCLSSKCDDFNKVIDSDYNAAMNIATSVDYLDDASKGKYYLNKTEKVLEEVL

SEQ ID NO: 480 - protein, 724 aa, unidentified
  REGION 1..724: note = Description of Unknown: uncultivated organism sequence
  REGION 1..724: note = Category: MG55 effectors
  REGION 1..724: note = Description: MG55-53 effector
MKIIKRNGAEVGFDITKIIIAITKANEAVEEADRMTPMQIQRIAESVELQCQKMNRAPTVEEIQDMVEHYIMAHGAFEVAKHYITYRYTRSLVRKSNTTDDKILSLIECNNEEAKQENSNKNPVVNSTQRDYMAGEVSRDLSERILLPQDIVEAHREGIIHFHDSDYYAQHMHNCDLVNLEDMLQNGTVITGTLIEKPHSFATACNIATQIVAQVASNQYGGQSISLTHLAPFVQVSRDKIRASVRSEFDAVGVAVTEDDINAIAEKRLREEIRRGVQTIQYQVVTLLTTNGQAPFVTVFMYLGEAKNQQEKDDLALIIEETLLQRYQGVKNEKGVWVTPAFPKLIYVLEEDNVHEDSKYWYLTKLAAKCTAKRMVPDYISEKKMLELKVDKNGNGHCYPCMGCRSFLTPYVDENGQPKYYGRFNQGVVTVNLPDIALSSGGNIEKFWRIFDERMELCHRALLCRHERLKGTLSDAAPILWQYGACARLKKGEPIDKLLYGGYSTISLGYAGLYECVKYMTGKSHTDPAATPFALEIMNALNAACKKWKAQHNIDFSLYGTPLESTTYKFAKCLQKRFGVIKGITDKGYITNSYHVHVTEPIDAFKKLEFEAQFQHLSPGGAISYVEVPDMQNNLDAVLEVMKFIYDHIIYAELNTKSDYCQVCGWDGEIEVVEEDGKLIWKCPQCGNTDQDKMNVARRTCGYIGTQFWNQGRTQEIKDRVLHL

SEQ ID NO: 481 - protein, 719 aa, unidentified
  REGION 1..719: note = Description of Unknown: uncultivated organism sequence
  REGION 1..719: note = Category: MG55 effectors
  REGION 1..719: note = Description: MG55-54 effector
MQVVKRDGKLVDFDQSKIRVAIEKANREVRPRERATKEEINQIIDYVEDLDKKRILVEDIQDIIEEQLMSFGKYLLAKKYITYRYTRELVRKANTTDQSIKELIDGESDYWNNENSNKNARVVTTQRDYLAGITSTDITRRFLLPEDVVKAHDEGIIHFHDADYFAQNALTNCELINLEDMLQNGTIMNGVMIEKPHRFLTAMTIATQIILGVTSSTYGGATVSLTHLAPFVKSSYDRYYKKYKKRGLSEAQCKEYAEQDTKKEVSDGVQTFNYQVNSMTNTNGQAPFLSVCMYLGETDEYKKELAMIIEEFLKQRIEGFKNEKGVYITPAFPKLLYVLEEDNIHKDSKYWYLTELAAKCTAKRLVPDYISEKKMKEYKIDKNGNGNCYPCMGCRSFLTPYVDPETNKPKYYGRFNQGVVTINLVDVALSSKQDEEKFWKIFDERLELCHKALQIRHERLSKVTSDVAPILWQHGALARLEKGESIHKLLHDGYSTISLGYAGLYECVKYMTGHSHTDNGEGEEFAIKVMQKLNDKCKEWKEAEKIDYSVYGTPIESTTYKFAKCLKKRFGTVEGITDRNYITNSYHVPVFEDIDAFSKLKLESKFQKLSPGGAISYVETPNLQDNLEVVLQIINFIYDNIMYAELNTKSDYCQKCGFDGEILIDENLEWYCPNCGNRDHNTLNVARRTCGYIGSQFWNKGRTQEIKERVLHIDNKDDE

SEQ ID NO: 482 - protein, 724 aa, unidentified
  REGION 1..724: note = Description of Unknown: uncultivated organism sequence
  REGION 1..724: note = Category: MG55 effectors
  REGION 1..724: note = Description: MG55-55 effector
MKIIKRSGAENTFDKEKIENAVAKANITVEEKDRLSEGEIGEIAQNIEDKCSEMNRAMDVETIQDWVEADIMRHGKYTVAKHYITYRYERSIVRQANTTDKQILSLLNFENEEVKQENSNKNPTVNSVQRDYMAGEVSKDITRRFLLPDDIVEAHEKGLIHFHDADYFAQHMHNCCLVNLEDMLQNGTVISEVMIEKPHSFSTACNIATQSIAQIASSQYGGQSITLSHLAPFVQISRDKYRREVKKEFAELNIPADEDTINKVAEMRVKAEIVQGVQMIQYQVITLMTTNGQAPFVTVFMYLDEVPEGQTRDDLAAIIEEMLRQRIQGVKNEKGVYITPAFPKLIYVLEEDNIREGSKYWELTKLAAKCTAKRMVPDYISEKKMKELKVDKNGNGQCYPCMGCRSFLTTYLDENGKPKYYGRFNQGVVTINLVDVACSSYKDMDKFWKIFDERLELCRRALMLRHERLKGTPSDVAPILWQNGALARLKKGETIDKLLFGGYSTISLGYAGLCECVRYMTGKSHTDPSATPFALEVMQHLNDACTKWRAETNIDFSLYGTPLESTTYKFARCLQKRFGVIEGVTDRNYITNSYHIHVTEDIDAFDKLTFESQFQALSPGGAISYVEVPNMQNNIEAVLAVMQHIYDNIMYAELNTKSDYCQKCGFDGEIKIVEDDGKLVWECPNCGNRDQNTLNVARRTCGYIGTQFWNQGRTQEIKERVLHL

SEQ ID NO: 483 - protein, 711 aa, unidentified
  REGION 1..711: note = Description of Unknown: uncultivated organism sequence
  REGION 1..711: note = Category: MG55 effectors
  REGION 1..711: note = Description: MG55-56 effector
MGIIVEKRDGVSRVAFDSNRIRNAVMKANEQVGEEDRASEAEIDLIVDEVIEKFGGLGYASVEEIQDVVEENLLSMKRKVGIKYHDFRRARAKTRNAAKESILQLVGGANKDVMEENSNKKATVASTQRDLIAGEVSKDITMSDILPTKIAKAHKEGVIHFHDMDYFIQPMFNCCLVNIKDMLDNGTVMNGKMIESPKSFQVACTVTTQIIASVASNQYGGQSVNVKHLAKYIRVSEKKYRKRFEALGMTGETLENLVEAELKAEISAGIQTMQYQINTLMTTNGQTPFVTLFLELEEGSEYEVEQAKLIEEILKQRLEGIKNNKGVYVTPAFPKLIYVLDEHNCLKGGKYDYLTKLAVKCSAKRMYPDYISAKKMRENHEGEVFSCMGCRSFLSEWKDEDGNYKWEGRFNQGVVSINLPQIAILSQTEEGADELRFWQLLDERLAICFEALMLRHKRLLGTKSDVSPIHWQDGAIARLKPGEVIDPLLKDGYSTISLGYIGIYETTKLMTGESNTTEKGRAFALKVMKYLRDTCDRWKSVTGLGFGLYGTPAESLCYRFARIDKKRFGEIKDVTDKGYYTNSYHVDVREPIDAFAKLQYEAEFQKISSGGAISYIEIPNMSKNLDALEAVVSYIYDNIQYAEVNTKSDYCQECGYDGEIIINDDNEWECPCCGNKNHETMNVVRRTCGYLGENFWNVGKTKEIKARVTHL

SEQ ID NO: 484 - protein, 724 aa, unidentified
  REGION 1..724: note = Description of Unknown: uncultivated organism sequence
  REGION 1..724: note = Category: MG55 effectors
  REGION 1..724: note = Description: MG55-57 effector
MKVIKRNGTEVVFDISKILVAVGKANNNVKEEHRMTPMQIQRIAESVELNCIELGRSPSVEEIQDMVEHQIMAHGAFEVAKEYITYRYTRSLVRRSNTTDDKILSLIECSNEEAKQENSNKNPIVNSTQRDYMAGEVSRDITNRLLLPKDIVQAHEEGIIHFHDADYYAQHMHNCDLVNLEDMLQNGTVITGTLIERPHSFSTACNIATQIIAQVASNQYGGQSISLAHLAPFVQVSREKIRRIVRTEMEKIHATPSEEEFNDLVESRLRDEVARGVQTIQYQVLTLLTTNGQAPFVTVFMYLNEARNEQEKKDLALIIEETLKQRYQGVKNEAGVWITPAFPKLIYVLEEDNIHDDSPYYYLTKLAAKCTAKRMVPDYISEKMMFQLKIDKNGEGHCYPCMGCRSFLTPYVDENGKPKYYGRFNQGVVTINLPDVALSSGGDIEKFWQIFDERLELCHRALMERHNRLKGTPSDVAPILWQYGACARLKKGEPIDKLLYGGYSTISLGYAGLYECVKYMTGKSHTDPAATPFALQIMNTMNAACKKWKEMHNIDFSLYGTPLESTTYKFAKCLQKRFGVIPGITDKGYITNSYHVHVTEKINAFDKLAFEAQFQHLSPGGAISYVEVPDMQNNLDAVLEVMKFIYDHIIYAELNTKSDYCQVCGWDGEIKIEEEDGKLIWKCPNCGNTDQNKMNVARRTCGYIGTQFWNQGRTQEIRDRVLHL

SEQ ID NO: 485 - protein, 719 aa, unidentified
  REGION 1..719: note = Description of Unknown: uncultivated organism sequence
  REGION 1..719: note = Category: MG55 effectors
  REGION 1..719: note = Description: MG55-58 effector
MQVVKRDGKLVDFDQSKIRVAIEKANREVRPRERATKEEINQIIDYVEDLDKKRILVEDIQDIIEEQLMSFGKYLLAKKYITYRYTRELVRKANTTDQSIKELIDGESDYWNNENSNKNARVVTTQRDYLAGITSTDITRRFLLPEDVVKAHDEGIIHFHDADYFAQNALTNCELINLEDMLQNGTIMNGVMIEKPHRFLTAMTIATQIILGVTSSTYGGATVSLTHLAPFVKSSYDRYYKKYKKRGLSEAQCKEYAEQDTKKEVSDGVQTFNYQVNSMTNTNGQAPFLSVCMYLGETDEYKKELAMIIEEFLKQRIEGFKNEKGVYITPAFPKLLYVLEEDNIHKDSKYWYLTELAAKCTAKRLVPDYISEKKMKELKIDKNGNGNCYPCMGCRSFLTPYVDPETNKPKYYGRFNQGVVTINLVDVALSSKQDEEKFWKIFDERLELCHKALQIRHERLSKVTSDVAPILWQHGALARLKKGESIHKLLHDGYSTISLGYAGLYECVKYMTGHSHTDNGEGEEFAIKVMQKLNDKCKEWKEAEKIDYSVYGTPIESTTYKFAKCLKKRFGTIEGITDRSYITNSYHVPVFEDIDAFSKLKLESKFQKLSPGGAISYVETPNLQDNLEVVLQIINFIYDNIMYAELNTKSDYCQKCGFDGEILIDENLEWYCPNCGNRDHNTLNVARRTCGYIGSQFWNKGRTQEIKERVLHIDNKDDE

SEQ ID NO: 486 - protein, 724 aa, unidentified
  REGION 1..724: note = Description of Unknown: uncultivated organism sequence
  REGION 1..724: note = Category: MG55 effectors
  REGION 1..724: note = Description: MG55-59 effector
MKVIKRNGTEVVFDISKILIAVGKANNNVKEEHRMTPMQIQRIAESVELNCIELGRSPSVEEIQDMVEHQIMAHGAFEVAKEYITYRYTRSLVRRSNTTDDKILSLIECSNEEAKQENSNKNPIVNSTQRDYMAGEGSRDITNRLLLPKDIVQAHEEGIIHFHDADYYAQHMHNCDLVNLEDMLQNGTVITGTLIERPHSFSTACNIATQIIAQVASNQYGGQSISLAHLAPFVQVSREKIRRIVRTEMEKIHATPSEEEFNDLVESRLRDEVARGVQTIQYQVLTLLTTNGQAPFVTVFMYLNEARNEQEKKDLALIIEETLKQRYQGVKNEAGVWITPAFPKLIYVLEEDNIHDDSPYYYLTKLAAKCTAKRMVPDYISEKMMFQLKIDKNGEGHCYPCMGCRSFLTPYVDENGKPKYYGRFNQGVVTINLPDVALSSGGDIEKFWQIFDERLELCHRALMERHNRLKGTPSDVAPILWQYGACARLKKGEPIDKLLYGGYSTISLGYAGLYECVKYMTGKSHTDPAATPFALQIMNTMNAACKKWKEMHNIDFSLYGTPLESTTYKFAKCLQKRFGVIPGITDKGYITNSYHVHVTEKINAFDKLAFEAQFQHLSPGGAISYVEVPDMQNNLDAVLEVMKFIYDHIIYAELNTKSDYCQVCGWDGEIKIEEEDGKLIWKCPNCGNTDQNKMNVARRTCGYIGTQFWNQGRTQEIRDRVLHL

SEQ ID NO: 487 - protein, 712 aa, unidentified
  REGION 1..712: note = Description of Unknown: uncultivated organism sequence
  REGION 1..712: note = Category: MG55 effectors
  REGION 1..712: note = Description: MG55-60 effector
MISKVRKRDGRIKDFDSRRIIEALRKAFEELGYTSSYEYINVAGSVVSELSKLDSEICDVEAIQDIVVKVLQESHPEVAKKYEEYRLKRTEIREENSKLIKSVEGLLNFSNDEVMLENSNKQAQLISTTRDLMAGEVSKFIVRKMIPKDILELHDRGVIHIHDMDYGANDMFNCELVNLQDMLDNGTVINKKMIHSPHTLRTAMTIATQISAQVASYQYGGQTMTLSHLAPYVRKSESVIRREIESDYPELSKERKDKIVERRLRKEIKDSVQLFNYQISTIQSTNGQAPFISLAIYLSERPGYEREVAMLAEEFFNQRIEGIENENGVKATQTFPKLLYFLDENNTYEGSEYFWLTQLAVKSTSLRMNPDYISAKKMKENVGHVFSCMGCRAFLSPFQDKDGNWIFYGRGNLGVCTINLPHVALSAKGDINKFWEILDERLEACRWVGEWRYNKMKGVKAKEAPILWQHGAISRLNPEDDVIKAIDERGFTVTLGYSGIYETVKVLTGKSHTTDNGFDLAEKIMIHLRDKCTEWKTEKPWLRFALYGTPQESTTETFSKALIRDFGEIEGICGKGKLWVTNSYHVDIQEEINAFDKLAIEGELQKYSTGGAVSYVETYNMSKNQEALLQVVQYMYETIMYAEINFESDVCGECGYSGVMDNDPKTLEWVCPNCGNRNQDTLSVVRRTCGYLAETKWTPGRLLDILNRVKHL

SEQ ID NO: 488 - protein, 722 aa, unidentified
  REGION 1..722: note = Description of Unknown: uncultivated organism sequence
  REGION 1..722: note = Category: MG55 effectors
  REGION 1..722: note = Description: MG55-61 effector
MEVIKRDGSKVAFDGSKIENAILKAMRYGSGIVKPEIASKISHEIEDWHKSSGAASISIYRIEGQVFEKLIEKGEVLTAKAYEGYRKVREFQRETNTIDNAIYGIVNQTNKEAMDENSNKDATVLATQRDLIAGEFSRDYCRRLLLPPKIVQAHDDGIIHFHDMDYYIQKMHNCDLVNLKDMFANGTVINDKLIETPKSLQTACTVATQIVQQVANGQYGGQTISISHLAPYVRVSYKKHLKAVRKEGKEVGIDYTEEQIEKIAKSRLHEEIKAGVQTIQYQINTFSTTNGQAPFLSIFMYLREEPDYIEETALLIEEILKQRYIGMKNPVGAYVTPAFPKLLYVLDDNNVPDDSQYRYLTDLAVKCVSKRMMPDFISAKIMRENYEGQVFPCMGCRSFLSPWKNEKGEYQWYGRFNQGVVTLNLTDVGLSANKNMDSFWKILDERLDLCYEALMLRHESLKGTPSDISPIHWQYGAIARLKPGEKIDSLLDTCYSTLSLGYIGLYECVVALIGQSHTTEEGDALALEIMQKLRNTCDKWKKDTGLGFALYGTPAESTTYTLARALKKRFGIVPGVTDKDYITNSYHVNVREHIDAFSKLGFEAKFQKISSGGAISYVEVTNMTNNFDAMKELINYMYETIQYAEINTKSDYCQECGFSGEILLDENNEWYCPNCGNRNHKTLNVCRRTCGYLGDNFWNKGRTQEIKERFVHLDNRVYQENN

SEQ ID NO: 489 - protein, 724 aa, unidentified
  REGION 1..724: note = Description of Unknown: uncultivated organism sequence
  REGION 1..724: note = Category: MG55 effectors
  REGION 1..724: note = Description: MG55-62 effector
MKIIKRNGAEENFDISKIIMAVTKANAAVEECDRMTPRQIQRIAESVELACQELGRSAAVEEIQDMVEKQIMAHGAFEVAKAYITYRYTRSLVRRANTTDDRILSLIECNNEEAKQENSNKNPIVNSTQRDYMAGEVSRDITSRLLLPKDIVEAHEEGIIHFHDADYYAQHMHNCDLVNLEDMLENGTVITGTLIERPHSFSTACNIATQIIAQVASNQYGGQSISLTHLAPFVQVSRERIRREVEAEMQAIDAHPGEEKLAELVENRVREEIRRGVQTIQYQVVTLLTTNGQAPFVTVFMYLGEAKNEQERHDLAMIIEETLRQRYQGVKNEKGVWVTPAFPKLIYVLEEDNIHEDSPYWYLTELAARCTAKRMVPDYISEKKMLELKVDKNGDGHCYTCMGCRSFLTPYVDENGKPKYYGRFNQGVVTINLPDVALSSGGNMEKFWKIFDERLELCHRALMCRHERLKGTLSDAAPILWQYGALARLKKGEPIDKLLYGGYSTISLGYAGLYECVKYMTGKSHTDPSATPFALEIMQHMNDACAKWKQMHNIDFSLYGTPLESTTYKFAKCLQKRFGIIPGVTDKGYITNSYHIHVTEHIDAFSKLAFESKFQALSPGGAISYVEVPNMQNNIPAVLEVMKFIYDNIMYAELNTKSDYCQVCGYDGEIEIVEHDGKLIWRCPNCGNTDQDKMNVARRTCGYIGTQFWNQGRTQEIKERVLHL

SEQ ID NO: 490 - protein, 724 aa, unidentified
  REGION 1..724: note = Description of Unknown: uncultivated organism sequence
  REGION 1..724: note = Category: MG55 effectors
  REGION 1..724: note = Description: MG55-63 effector
MKIIKRNGAEATFDISKIIMAITKANAAVEEGDRMTPRQIQRIAESVELACQELGRSAAVEEIQDMVEKQIMAHGAFEVAKAYITYRYTRSLVRRANTTDDRILSLIECNNEEAKQENSNKNPIVNSTQRDYMAGEVSRDITSRLLLPKDIVEAHEEGIIHFHDADYYAQHMHNCDLVNLEDMLENGTVITGTLIERPHSFSTACNIATQIIAQVASNQYGGQSISLTHLAPFVQVSRERIRREVAAEMQAINADPGEEKLAELVENRVREEIRRGVQTIQYQVVTLLTTNGQAPFVTVFMYLGEAKNEQERHDLAMIIEETLRQRYQGVKNEKGVWVTPAFPKLIYVLEEDNIHEDAPYWYLTELAARCTAKRMVPDYISEKKMLELKVDKNGEGHCYTCMGCRSFLTPYVDENGKPKYYGRFNQGVVTINLPDVALSSGGNMEKFWKIFDERLELCHRALMCRHERLKGTLSDAAPILWQYGALARLKKGEPIDKLLYGGYSTISLGYAGLYECVKYMTGKSHTDPSATPFALEIMQHMNDACKHWKQMHNIDFSLYGTPLESTTYKFAKCLQKRFGIIPGVTDKGYITNSYHIHVTENIDAFSKLAFESKFQALSPGGAISYVEVPNMQNNIPAVLEVMKFIYDNIMYAELNTKSDYCQVCGYDGEIEIVERDGKLIWRCPNCGNTDQDKMNVARRTCGYIGTQFWNQGRTQEIKERVLHL

SEQ ID NO: 491 - protein, 341 aa, unidentified
  REGION 1..341: note = Description of Unknown: uncultivated organism sequence
  REGION 1..341: note = Category: MG55 effectors
  REGION 1..341: note = Description: MG55-64 effector
MAATMKDIARRTGLGLATISSYFNGGNVREKNRVKIEEAIQELHYEVNEVARGLKTNATKTIGVVIPELNNTFCAEIITGMEDVLRSHGYATIVCDCRTDKKLERDAVEFLSRKRVDGIISMPVDAEGNHLKKFQKTGKPIVLIDRRIRELFCDSVLVDNEKAAEDAMRVFFQAGHRKIGIIGGPEEISTAQERLQGYRNAYEKENIPVRESLIYHGDYTIQGGVQGIEKLVADNPDMTAVFVTNYEMTMGAVIGMNELGLKIPEQLSMIGFDNLQFARACNPKLTIVAQPTQGIAGEVAGIMLKRLEGAASEETEPITEKLGAEIIMGKSVRVLDEKEKL

SEQ ID NO: 492 - protein, 724 aa, unidentified
  REGION 1..724: note = Description of Unknown: uncultivated organism sequence
  REGION 1..724: note = Category: MG55 effectors
  REGION 1..724: note = Description: MG55-65 effector
MKIIKRNGAEVGFDITKIIIAITKANEAVEEADRMTPMQIQRIAESVELQCQKMNRAPTVEEIQDMVEHYIMAHGAFEVAKHYITYRYTRSLVRKSNTTDDKILSLIECNNEEAKQENSNKNPVVNSTQRDYMAGEVSRDLSERILLPQDIVEAHREGIIHFHDSDYYAQHMHNCDLVNLEDMLQNGTVITGTLIEKPHSFATACNIATQIVAQVASNQYGGQSISLTHLAPFVQVSRDKIRASVRSEFDAVGVAVTEDDINAIAEKRLREEIRRGVQTIQYQVVTLLTTNGQAPFVTVFMYLGEAKSQQEKDDLALIIEETLLQRYQGVKNEKGVWVTPAFPKLIYVLEEDNIHEDSKYWYLTKLAAKCTAKRMVPDYISEKKMLELKVDKNGNGHCYPCMGCRSFLTPYVDENGQPKYYGRFNQGVVTVNLPDIALSSGGNIEKFWRIFDERMELCHRALLCRHERLKGTLSDAAPILWQYGACARLKKGEPIDKLLYGGYSTISLGYAGLYECVKYMTGKSHTDPAATPFALEIMNALNAACKKWKAQHNIDFSLYGTPLESTTYKFAKCLQKRFGVIKGITDKGYITNSYHVHVTEPIDAFKKLEFEAQFQHLSPGGAISYVEVPDMQNNLDAVLEVMKFIYDHIIYAELNTKSDYCQVCGWDGEIEVVEEDGKLIWKCPQCGNTDQDKMNVARRTCGYIGTQFWNQGRTQEIKDRVLHL

SEQ ID NO: 493 - protein, 707 aa, unidentified
  REGION 1..707: note = Description of Unknown: uncultivated organism sequence
  REGION 1..707: note = Category: MG55 effectors
  REGION 1..707: note = Description: MG55-66 effector
MQVIKRDGSVVDYDRAKIAIAIGKANAEVEKGERASKEEIGAILDHIESKKKKRMLVEDIQDIIEEKLMEQGHYELAKTYIIYRYNRALVRKANTTDEAILSLISNSNKDVMEENSNKNALAAATQRDLIAGEVSKDLTRRILLPEKISKAHDDGILHFHDADYFIQPIFNCCLINIGDMLDNGTVMNGKLIESPKSFQVACTVVTQIIAAVACSQYGGQSVDIRHLGKYLRKSRTKFENHYREACPELSDDEVKKLVDDRIQDELKSGVQTIQYQINTLMTTNGQSPFVTLFLYLDKDDEYLEENAQIVMEILRQRYEGIKNEKGVYVTPAFPKLVYVLDEINCLKGGKYDYITEFAVKCSAKRLYPDYISAKEMRETYEGNVFSPMGCRSFLSPWKDENGNYKFEGRFNQGVVSINLPQIGIIAQGDEEKFWKLFDERLDLCREALMCRHRALLGTKSDVSPIHWQYGAIARLDKGETIDKLLMGGYSTLSLGYIGLYEVTKLMTGVTQTDPKGEEFAVRVMQHMRDKTDQWKKETGLGFALYGTPAESLCYRFARIDKERFGTIEDVTDKGYYTNSYHVDVREHIDAFSKFSFEAQFQKISSGGCISYVEIPNMQNNLEAMQEIVRFIYDNIQYAEFNTKSDYCHVCGWDGEIIINDDNEWECPNCHNKDHKKMNVTRRTCGYLGENFWNLGKTKEIKARVLHL

SEQ ID NO: 494 - protein, 720 aa, unidentified
  REGION 1..720: note = Description of Unknown: uncultivated organism sequence
  REGION 1..720: note = Category: MG55 effectors
  REGION 1..720: note = Description: MG55-67 effector
MKIMKRSGIEADFDVTKISAAIKKANCEVAAVDQLSEEQIEEISTNVEKICSDIGRTLGVEEIQDLVEDQIMNKRAFVLARKYITYRYTRALVRKSNSTDKQILSLLECNNEEAKQENSNKNPTVNSVQRDYMAGEVSKDITKRFLLPEDIVAAHEQGIIHFHDSDYFAQHMHNCCLVNLEDMLQNGTVISETMIERPKSFSTACNIATQSIAQIASSQYGGQSISLAHLAPFVDVSRQKFRLQVRDEFEKANIAASEEQINNVAEQRVRDEIKRGVQMIQYQVITLMTTNGQAPFVTVFMYLDEVPEGRLRDDLALVTEEILRQRIQGVKNEKGVYITPAFPKLIYVLEEDNITEGSKYWELTKLAAKCTAKRMVPDYISEKIMRKLKDGNCYPCMGCRSFLTVYHDENDKPKFYGRFNQGVVTINLVDVACSSGKDMDKFWQIFDERLDLCYRALMCRHKRLLDTPSDVAPILWQYGALARLKKGETINKLLYNGYSTISLGYAGLCECTRYMTGHSHTDPESTPFALQVMQHMNDACAKWREETNIDFSLYGTPLESTTYKFAKCLQKRFGIIEGVTDRGYITNSYHVHVTEEINAFDKLKFEAQFQELSPGGAISYVEVPNMENNIEAVLNVMKYIYDNIMYAELNTKSDYCQCCGYTGQIQIVTDEHGKLIWECPNCGNTDQNKMNVARRTCGYIGTQFWNQGRTQEIKERVLHL

SEQ ID NO: 495 - protein, 732 aa, unidentified
  REGION 1..732: note = Description of Unknown: uncultivated organism sequence
  REGION 1..732: note = Category: MG55 effectors
  REGION 1..732: note = Description: MG55-68 effector
MKVIKRDGKIVEYDREKIRIAIGKANNEVSKKYRATEEEIKDIIEYIEELKKSRILVEDIQDIIEQKLMEMGKYELAKEYITYRYTRALVRKANTTDQSIKELIEGESEYWNNENSNKNAKVVTTQRDYLAGITSTDITRRFLLPDDVVKAHDEGIIHFHDADYFAQNALHNCDLINLEDMLQNGTNINGVLIEKPHKFLTAMTIATQIITAVTSSQYGGATVTMTHLAPFVRDSYNAYLKKYRERHLSKEQCEKFAKEDLKKEIQDGVQTFQYQINSMTTTNGQSPFLSVCMYLGETTEYKEELAMIIEEILKQRILGMKNEKGVYVTPAFPKLLYVLEEDNIHEDSKYYYLTKLAAKCTAKRMVPDYISEKIMKELKVDKNGNGQCYPCMGCRSFLTPYIDPETNKPKYYGRFNQGVVTINLVDVALSSGKDMNKFWKIYEERLELCHKALKVRHERLAKATSDVAPILWQYGALARLKKGESIHKLLHGGYSTISLGYAGLYECVKYMTGNSHTDGAKGEEFGLEVMQKLNDKCKEWKEAEDIDYSVYGTPIESTTYKFAKCLQRRFGKIKGITDRNYITNSYHVPVFEEIDAFSKLKLESKFQRLSPGGAISYVETPNLQDNLEVVLQIIKFIYDNIMYAELNTKSDYCQKCGFDGEILLDDNLEWYCPNCGNRDHSTLNVARRTCGYIGSNFWNKGRTQEIKERVLHIDNKDDTKKVEKEAKKDEIQ

SEQ ID NO: 496 - protein, 724 aa, unidentified
  REGION 1..724: note = Description of Unknown: uncultivated organism sequence
  REGION 1..724: note = Category: MG55 effectors
  REGION 1..724: note = Description: MG55-69 effector
MKIIKRNGAEVGFDITKIIIAITKANEAVEEADRMTPMQIQRIAESVELQCQKMNRAPTVEEIQDMVEHYIMAHGAFEVAKHYITYRYTRSLVRKSNTTDDKILSLIECNNEEAKQENSNKNPVVNSTQRDYMAGEVSRDLSERILLPQDIVEAHREGIIHFHDSDYYAQHMHNCDLVNLEDMLQNGTVITGTLIEKPHSFATACNIATQIVAQVASNQYGGQSISLTHLAPFVQVSRDKIRASVRSEFDAVGVAVTEDDINAIAEKRLREEIRRGVQTIQYQVVTLLTTNGQAPFVTVFMYLGEAKSQQEKDDLALIIEETLLQRYQGVKNEKGVWVTPAFPKLIYVLEEDNVHEDSKYWYLTKLAAKCTAKRMVPDYISEKKMLELKVDKNGNGHCYPCMGCRSFLTPYVDENGQPKYYGRFNQGVVTVNLPDIALSSGGNIEKFWRIFDERMELCHRALLCRHERLKGTLSDAAPILWQYGACARLKKGEPIDKLLYGGYSTISLGYAGLYECVKYMTGKSHTDPAATPFALEIMNALNAACKKWKAQHNIDFSLYGTPLESTTYKFAKCLQKRFGVIKGITDKGYITNSYHVHVTEPIDAFKKLEFEAQFQHLSPGGAISYVEVPDMQNNLDAVLEVMKFIYDHIIYAELNTKSDYCQVCGWDGEIEVVEEDGKLIWKCPQCGNTDQDKMNVARRTCGYIGTQFWNQGRTQEIKDRVLHL

SEQ ID NO: 497 - protein, 719 aa, unidentified
  REGION 1..719: note = Description of Unknown: uncultivated organism sequence
  REGION 1..719: note = Category: MG55 effectors
  REGION 1..719: note = Description: MG55-70 effector
MQVIKRDGKVVDFDQSKIKIAIEKANKEVKPRERATKEEINQIISYIEELDKKRILVEDIQDIIEEQLMTFGKYILAKKYITYRYTRELVRKSNTTDQSIKELIDGESDYWNNENSNKNARVVTTQRDYLAGITSTDITRRFLLPEDVVKAHDEGIIHFHDADYFAQNALTNCELINLEDMLQNGTIMNGVMIEKPHRFLTAMTIATQIILGVTSSTYGGATVSITHLAPFVKSSYEKYYKKYKQRGLNEKQCKEYAEQDTRKEVSDGVQTFNYQVNSMTNTNGQAPFLSVCMYLGETDEYKQELAMIIEEFLKQRIEGFKNEKGVYITPAFPKLLYVLEEDNIHKDSKYWYLTELAAKCTAKRLVPDYISEKKMKELKIDKNGNGNCYPCMGCRSFLTPYVDPETNKPKYYGRFNQGVVTINLVDVALSSKQDEEKFWKIFDERLELCHKALQIRHERLSKVTSDVAPILWQHGALARLKKGESIHKLLHDGYSTISLGYAGLYECVKYMTGNSHTDNGIGEEFALKVMQKLNDKCKEWKEAEKIDYSVYGTPIESTTYKFAKCLRKRFGTIEGITDRSYITNSYHVPVFEDIDAFSKLKLESKFQKLSPGGAISYVETPNLQNNLEVVLQIIHFIYDNIMYAELNTKSDYCQKCGFDGEILIDENLEWYCPNCGNRDHNTLNVARRTCGYIGSQFWNKGRTQEIKERVLHIDNKDDE

SEQ ID NO: 498 - protein, 722 aa, unidentified
  REGION 1..722: note = Description of Unknown: uncultivated organism sequence
  REGION 1..722: note = Category: MG55 effectors
  REGION 1..722: note = Description: MG55-71 effector
MEVIKRDGSKVAFDGTKIENAILKAMRYGSGIVKPEIASKISHEIEDWHKSSGAASISIYRIEGQVFEKLIEKGEVLTAKAYEGYRKVREFQRETNTIDNAIYGIVNQTNKEAMDENSNKDATVLATQRDLIAGEFSRDYCRRLLLPPKIVQAHDDGIIHFHDMDYYIQKMHNCDLVNLKDMFANGTVINDKLIETPKSLQTACTVATQIVQQVANGQYGGQTISISHLAPYVRVSYKKHLKAVRKEGEEVGIDYTEEQIEKIAKSRLHEEIKAGVQTIQYQINTFSTTNGQAPFLSIFMYLREEPDYIEETALLIEEILKQRYIGMKNPVGAYVTPAFPKLLYVLDDNNVPDGSQYRYLTDLAVKCVSKRMMPDFISAKIMRENYEGQVFPCMGCRSFLSPWKNEKGEYQWYGRFNQGVVTLNLTDVGLSANKNMDSFWKILDERLDLCYEALMLRHESLKGTPSDISPIHWQYGAIARLKPGEKIDSLLDTCYSTLSLGYIGLYECVVALIGQSHTSEEGDALALEIMQKLRNACDKWKKDTGLGFALYGTPAESTTYTLARALKKRFGVVPGVTDKDYITNSYHVNVREQIDAFAKLGFEAKFQKISSGGAISYVEVTNMTNNFDAMKELINYMYETIQYAEINTKSDYCQECGFSGEILLDENNEWYCPNCGNRNHKTLNVCRRTCGYLGDNFWNKGRTQEIKERFVHLDNRVYQENN

SEQ ID NO: 499 - protein, 724 aa, unidentified
  REGION 1..724: note = Description of Unknown: uncultivated organism sequence
  REGION 1..724: note = Category: MG55 effectors
  REGION 1..724: note = Description: MG55-72 effector
MKIIKRSGAENTFDKEKIENAVAKANITVEEKDRLSEGEIGEIAQNIEDKCSEMNRAMDVETIQDWVEADIMRHGKYTVAKHYITYRYERSIVRQANTTDKQILSLLNFENEEVKQENSNKNPTVNSVQRDYMAGEVSKDITRRFLLPDDIVEAHEKGLIHFHDADYFAQHMHNCCLVNLEDMLQNGTVISEVMIEKPHSFSTACNIATQSIAQIASSQYGGQSITLSHLAPFVQISRDKYRREVKKEFAELNIPADEDTINKVAEMRVKAEIVQGVQMIQYQVITLMTTNGQAPFVTVFMYLDEVPEGQTRDDLAAIIEEMLRQRIQGVKNEKGVYITPAFPKLIYVLEEDNIREGSKYWELTKLAAKCTAKRMVPDYISEKKMKELKVDKNGNGQCYPCMGCRSFLTTYLDENGKPKYYGRFNQGVVTINLVDVACSSYKDMDKFWLIFDERLELCRRALMLRHERLKGTPSDVAPILWQNGALARLKKGETIDKLLFGGYSTISLGYAGLCECVRYMTGKSHTDPSATPFALEVMQHLNDACAKWRAETNIDFSLYGTPLESTTYKFARCLQKRFGVIEGVTDRNYITNSYHIHVTENIDAFDKLTFESQFQALSPGGAISYVEVPNMQNNIEAVLAVMQHIYDNIMYAELNTKSDYCQKCGFDGEIKIVEDDGKLVWECPNCGNRDQNTLNVARRTCGYIGTQFWNQGRTQEIKERVLHL

SEQ ID NO: 500 - protein, 1253 aa, unidentified
  REGION 1..1253: note = Description of Unknown: uncultivated organism sequence
  REGION 1..1253: note = Category: MG55 effectors
  REGION 1..1253: note = Description: MG55-73 effector
MGIFENYTNLYAVKKSIQIGAIPTERTKKTLATMGIVEKDRQRVENISKFCQVFDRFHKERAGKILEETSFKTLPAYESAYDAYHKALVEKAEDADAIRDELVNRTDEVLKEISDAFLKNDSITELFTGDFLNKEMPALLTDKKEKKLAEELSKSAGGFIRYHQARSLLYSVKHGSIAFRLINDNYPFFYKNCEIIEKFRAVSGRTEEFLEGMRKLDWFRDSYLDEISDRDNYGSCFTQAAIDRYNVMLNGFTMPDRVKIKGLNEYINEYNHTLSAAEKREKGLRLLDPLYKLPLFNDNSFSVIPEKFETDGELLDTVDRIFNDTIYTKALGEAIDEACRLFDKDLGEYDASGIYIAPRQLTAFSLMAFDKWNAIEKLFNLDYDNKNYKKLVLDNPKANEDKYEKDRRNVLNRNIFSLEDIRKLALLDEEESGDAVEALCRNVREKKAEVLAAYNEYTEARKERKEKEEREEEVVSVRRDVRLRSAIKGLCDSIKEFERSLNFILSGRSLTETGLAGDADFINAFNELHDIIREYDAAYNKIRNFISRTKTKSDSVELLFGNSSFLGGWSDMSVKGGTFIKDGDKIFFVAASHGATKLLDDEYLTYEDGEETVEVMDYYLLADAAKSIGRIFIYNGMKNKDGGPAKYKYNPDAVPAKEYGLTEELFNAYAKGMHKSNYKENGFTDEDNRKTLDALTEYLGKAMPKYFTKLDFQLEKHYDTYRDICDDLKKKASFALSFKKVSKDYIQKLENNGDICLFRLWCKDFSEHSSGREGNYTVILKNLFNTDKDAVSTIRLSGNAALRFEKASLKKEDLVVHKAGTWVENKNPNSENRKRKLEYDIIKDRRFHHDRFRLMLPYALNYTEGDFCPVNEKVREDIKAGKFKYITSVKGGMDNLLWVCVTDLKGNIVEQFPINTIGNTDWREKISIRQQEMKEGNKNWTPGTDIRTLKEGYLSLAIKLVYDTIMKYESLVVLEDNAPNFKGNKFGIDTRLYEVFTEALRQKLRYAFSRTEGERDYGGVLKGFQLVNPEKPKGMQDGIIFLINPAYTSNIDPATGFISYIRPRYENITRTKNMIEKIDGFAVKNGMFCMDIDFSRFGDVLKGTRSEWTVWANGSRIIWKRDEDLAKGGKFVEISINEAFLDFFKKNRIDIKGDIKAQLLSNNSKAFYSEFCELFGALLKLSNGKNDDNFIISPVKNKKGQFFNSKTSDTVTCSDSNSAYNLCRKMAICVRNISNDVKKPVPKSEEFIKEIQG

SEQ ID NO: 501 - protein, 573 aa, unidentified
  REGION 1..573: note = Description of Unknown: uncultivated organism sequence
  REGION 1..573: note = Category: MG55 effectors
  REGION 1..573: note = Description: MG55-74 effector
MPFNIEKLRPDYRTKNFQIPITSINLPEEFWTEAKTYKNCWNEIVAEFISFGEEHDALIVRYRELKTEKADLTGIKEELEALRDKRRDAVKAKWKAQSEHLFNNDLEVMLTGVEKSLKENSFRFKRGLDSIIFTKRYGKGGVKFSDLFTVEDSRSDSLKRKPFIVRKGIKRDSKRAEHKTPLHGSFLVGKNRVRLNFYGLWTYADFLDDCFIKRVSLNGKRDFQGWKWYLTVAAEMPPTEHLINRTLPVAGLDLGYRIFPEYIRFGVVSDSAGNIFEFRLPHGNMENQYLRRKNVFLEKNYGRKIDFVRDLYDYFAKDSAQGKTLEEAKQAVKKIYDTAQSEKINLPEEYKQAFTGFVKMRNHGLLKIKRVCGELIENLPDDKNQEVLIALTETKILIEEWSEKNDQFEQEKYFFRQKFIGRRKQLYRNIAVWLSTNYSKVIFEKDLNLAKLATKSKKSSRVTDAALLESNKFRQWTSLSELVRYLGETDQDFVGNWLTAGTTAYSTYFCDECGAGRASVPEDLIAVCDNGHRRDQDVKASRNLLAEAEIKPEKNSVKIPDYLKKNIVRITEK

SEQ ID NO: 502 - protein, 720 aa, unidentified
  REGION 1..720: note = Description of Unknown: uncultivated organism sequence
  REGION 1..720: note = Category: MG55 effectors
  REGION 1..720: note = Description: MG55-75 effector
MKIMKRSGIEADFDVTKISAAIKKANCEVAAVDQLSEEQIEEISTNVEKICSDIGRTLGVEEIQDLVEDQIMNKRAFVLARKYITYRYTRALIRKSNSTDKQILSLLECNNEEAKQENSNKNPTVNSVQRDYMAGEVSKDITKRFLLPEDIVAAHEQGIIHFHDSDYFAQHMHNCCLVNLEDMLQNGTVISETMIERPKSFSTACNIATQSIAQIASSQYGGQSISLAHLAPFVDVSRQKFRLQVRDEFEKANIAASEEQINNVAEQRVRDEIKRGVQMIQYQVITLMTTNGQAPFVTVFMYLDEVPEGRLRDDLALVTEEILRQRIQGVKNEKGVYITPAFPKLIYVLEEDNITEGSKYWELTKLAAKCTAKRMVPDYISEKIMRKLKDGNCYPCMGCRSFLTVYHDENDKPKFYGRFNQGVVTINLVDVACSSGKDMDKFWQIFDERLDLCYRALMCRHKRLLDTPSDVAPILWQYGALARLEKGETINKLLYNGYSTISLGYAGLCECTRYMTGHSHTDPESTPFALQVMQHMNDACAKWREETNIDFSLYGTPLESTTYKFAKCLQKRFGIIEGVTDRGYITNSYHVHVTEEINAFDKLKFEAQFQELSPGGAISYVEVPNMENNIEAVLNVMKYIYDNIMYAELNTKSDYCQCCGYTGQIQIVTDEHGKLIWECPNCGNTDQNKMNVARRTCGYIGTQFWNQGRTQEIKERVLHL

SEQ ID NO: 503 - protein, 724 aa, unidentified
  REGION 1..724: note = Description of Unknown: uncultivated organism sequence
  REGION 1..724: note = Category: MG55 effectors
  REGION 1..724: note = Description: MG55-76 effector
MKIIKRSGAENTFDKEKIENAVAKANITVEEKDRLSEGEIGEIAQNIEDKCSEMNRAMDVETIQDWVEADIMRHGKYTVAKHYITYRYERSIVRQANTTDKQILSLLNFENEEVKQENSNKNPTVNSVQRDYMAGEVSKDITRRFLLPDDIVEAHEKGLIHFHDADYFAQHMHNCCLVNLEDMLQNGTVISEVMIEKPHSFSTACNIATQSIAQIASSQYGGQSITLSHLAPFVQISRDKYRREVKKEFAELNIPADEDTINKVAEMRVKAEIVQGVQMIQYQVITLMTTNGQAPFVTVFMYLDEVPEGQTRDDLAAIIEEMLRQRIQGVKNEKGVYITPAFPKLIYVLEEDNIREGSKYWELTKLAAKCTAKRMVPDYISEKKMKELKVDKNGNGQCYPCMGCRSFLTTYLDENGKPKYYGRFNQGVVTINLVDVACSSYKDMDKFWKIFNERLELCRRALMLRHERLKGTPSDVAPILWQNGALARLKKGETIDKLLFGGYSTISLGYAGLCECVRYMTGKSHTDPSATPFALEVMQHLNDACAKWRAETNIDFSLYGTPLESTTYKFARCLQKRFGVIEGVTDRNYITNSYHIHVTENIDAFDKLTFESQFQALSPGGAISYVEVPNMQNNIEAVLAVMQHIYDNIMYAELNTKSDYCQKCGFDGEIKIVEDDGKLVWECPNCGNRDQNTLNVARRTCGYIGTQFWNQGRTQEIKERVLHL

SEQ ID NO: 504 - protein, 723 aa, unidentified
  REGION 1..723: note = Description of Unknown: uncultivated organism sequence
  REGION 1..723: note = Category: MG55 effectors
  REGION 1..723: note = Description: MG55-77 effector
MKVIKRDKKEVEFDSTKIEAAIKKARNACTSSNLSDENIADIADYITYKCKKLDHSVSVEDIQDMVEDQLMAHGEFALAKEYVKYRYNRQLVRKSNTTDEKILSLIELQNEEVKQENSNKNPTINSTQRDYMAGEVSRDLTNRILLPKDIVEAHEKGIIHFHDSDYFAQHMHNCDLVNLEDMLQNGTVISGTLIEKPHSFHTACNVATQIVAQVASAQYGGQSISLAHLAPFVDISRKKIYNKFRKNFEELGINVTEDKLSELVEKEVKEEINRGVQTIQYQVVTLMTTNGQTPFVTVFMYLGEAKNEREKADLALIIEEVLRQRIQGVKNEKGAWITPAFPKLIYVLEEQNITEDAPYFYLTELAAKCTAKRMVPDYISEKIMLELKKDKNGEGHCYTCMGCRSFLTPYLDKNGKPKYYGRFNQGVVTINLVDVACSSHKDINKFWEIFDERLELCHRALMCRHKRLKGTPSDVAPILWQHGALARLKKGEAIDKLLYGGYSTISLGYAGLCECTRYMTGKSHTDPSATPFALEVMKHMNDACAKWKEEENIDFSLYGTPLESTTYKFAKCLQKRFGIIKGVTDKAYITNSYHVHVTEEIDAFTKLAFESQFQKLSPGGAISYVEVPNMQNNIPAVIQVIQFIYDNIMYAELNTKSDYCQKCGYDGEIKLFKEDGKYVWKCPNCGNTDQNFLNIARRTCGYIGVNFWNFGRTEEIAERKLHL

SEQ ID NO: 505 - protein, 730 aa, unidentified
  REGION 1..730: note = Description of Unknown: uncultivated organism sequence
  REGION 1..730: note = Category: MG55 effectors
  REGION 1..730: note = Description: MG55-78 effector
MQVIKRDGRIVDFDRQKIAAAIGKANAEVKPRERASKEDIKGIIEYVEGLDKKRILVEDIQDIIEEKLMECEKYLLAKKYITYRYTRELVRKANTTDQSIKELIDGESDYWNNENSNKNARVVTTQRDYLAGITSTDITRRFLLPKDVVEAHDEGIIHFHDADYFAQNALTNCELINLDDMLQNGTIMNGVMIEKPHRFLTAMTIATQIILAVTSSTYGGATVSLTHLAPFVRSSYERYYKKYKERGLSEKQCKEYAEQDTKKEIADGVQTFNYQVNSMTNTNGQAPFLSVNMYLGETKEYKKELAMVIEEFLKQRMEGFKNEKGVYITPAFPKLLYVLEKDNITEDSPYWYLTELAAKCTAKRMVPDYISEKKMLELKIDKNGNGNCYPCMGCRSFLTPYVDPKTNKPKYYGRFNQGVVTINLVDVALSSDKDMDKFWKIFDERLELCHRALQVRHERLSKVTSDVAPILWQNGALARLKKGESIHPLLHGGYSTISLGYAGLYECVKYMTDHSHTDNGEGKDFGIKVMQKLNDKCKEWKAAEDIDYSVYGTPIESTTYKFAKCLKKRFGVIEGITDRDYITNSYHIPVFEEIDAFSKLSIESQFQQLSPGGAISYVETPNLQNNIESVLQIIKFIYDNIMYAELNTKSDYCQVCGFDGEILIDDNLEWYCPNCGNRNHDTLNVARRTCGYIGSQFWNKGRTQEIKERVLHIDNKDAEMPKKEKTKVAV

SEQ ID NO: 506 - protein, 736 aa, unidentified
  REGION 1..736: note = Description of Unknown: uncultivated organism sequence
  REGION 1..736: note = Category: MG55 effectors
  REGION 1..736: note = Description: MG55-79 effector
MENRDHMDVIHVKTNVIKRNGQEVSFDISKIINAIGKANKEVESIHQMNEFQIRAVADNIARKIASYPHAVNVEDIQDMVETGIMEMRGYEVAQKYVRYRYKREISRKSNTTDDGILSLIDLSNEEVKQENSNKNPVINSTQRDYMAGEVSKDLTKRLLLPEEIVKAHEEGIIHFHDADYFAQREHNCDLINLEDMLQNGTVISQTLIEKPHSFFTACNVTTQIVAQVASNQYGGQSFTLAHLAPFVDISRKKITKEVIEERKETGESMDESIIEKIVERRLKEEIKSGIQTIQYQLITLMTCNGQAPFVTMFMYLDEVPDGQTRKDLAMIIEEVLRQRMQGVKNEKGVWITPAFPKLIYVLDEDNIHDDSPYYYLTKLAAECTAKRMVPDYISAKIMKSLKNGDVYPCMGCRSFLTPDTEGLGPHGEHKYYGRFNQGVVTINLVDVACSSDGDMDRFWKILEDRLELCHRALRCRHERLLGTVSDVAPILWQYGALARLKKGETIDKLLFNNYSTISLGYAGLYEMCVRMLGVSHTTEEGRKFALAVMQKLNDKCAEWRKAENISYSVYGTPMESTTYKFAKCLQKRFGIIPGVTDKNYITNSYHVHVAEKIDAFHKLKFESDFQKLSPGGAISYIEVPNMQTNIPAVLTVMKYIYENIMYAELNTKSDYCMVCGYDGEIKIVEDENGKLVWECPNCGNRDQHKMSVARRTCGYIGTQFWNQGRTQEIKDRVLHL

SEQ ID NO: 507 - protein, 734 aa, unidentified
  REGION 1..734: note = Description of Unknown: uncultivated organism sequence
  REGION 1..734: note = Category: MG55 effectors
  REGION 1..734: note = Description: MG55-80 effector
MIYNKCILKQGEDMEMKIIKRDGSIVDYNPEKIRIAIKKANNEVSRKERATETEIEEIITYIEDLKKSRILVEDIQDIIEQKLMSLEKYQLAKTYITYRYTRALVRKANTTDQSIKELIEGESEYWNNENSNKNATVVTTQRDYLAGITSTDITRRFLLPEDIVKAHDEGIIHFHDADYFAQNALTNCELINLEDMLQNGTIMNGVMIEKPHRFITACTIATQIILAVTSSTYGGATISLSHLAPFVKSSYDKYYKKYKDRGLTEKQCEEYAKQDTRKEVSDGVQTFNYQVNSMTNTNGQAPFLSVCMYLGETEEYKEELAMIIEEFLKQRIEGFKNEKGVYVTPAFPKLLYVLEEDNVHEDSKFWYLTELAAKCTAKRMVPDYISEKKMLELKVDKNGEGHCYPCMGCRSFLTPYVDPETNKPKYYGRFNQGVVTINLVDVALTSGKDKNKFWKIYDERLELCHRALQARHERLSKVTSDVAPILWQNGAFARLPKGAPIHPLLHGGYSTISLGYAGLYECVKYMTDKSHTDNGEGKEFAIEVMKKLNEKCKEWKEKEDIDYSVYGSPIESTTYKFAKCLKERFGVVEGITDKNYITNSYHVPVFEEIDAFSKLKLESEFQVLSPGGAISYVETPNLQDNLEVVLQIIRFIYDNIMYAELNTKSDYCQKCGFDGEILIDDNLEWYCPNCGNRDHNTLNVARRTCGYIGSNFWNKGRTQEIKERVLHIDNKDDE

SEQ ID NO: 508 - protein, 420 aa, unidentified
  REGION 1..420: note = Description of Unknown: uncultivated organism sequence
  REGION 1..420: note = Category: MG55 effectors
  REGION 1..420: note = Description: MG55-81 effector
MNKYISAVKIRIVPLNKNTFDYINNLMYQTNKIYNDAYSHEWVFIKQKLSESIIPVKSAKTTKVYHSVRDLHPTFPTAILSNICHRVKKDFSNDIKNGLFKGKRTPRLYKYGAPIIYQFNSGGINPNFHNVNDDIILRIKNGLDFKLLFGKDKSGNKKLLERLMDKNDKSLNINRVFNVTYNKRDKHYYIIFTYETESEDYEKVKGRVCGIDLGVRRFVSIRLNDNIHVQKSIHSDDLIRVKMDINKKRREYQKSMVMAKGGHGRNRKLKYLDTIRKKEINFTNTALHKLSKQVIDFCIKYKVEQINMELLNRNIDKNSFFSRYWPISNFIDKLKYKVDSYGINLKFVDPYHTSQICSICGEIGERNGDTFICQNDKCKIHNENIDSDYNAAYNIAKSKLYVDKYENTQYYKLKNKEKVL

SEQ ID NO: 509 - protein, 739 aa, unidentified
  REGION 1..739: note = Description of Unknown: uncultivated organism sequence
  REGION 1..739: note = Category: MG55 effectors
  REGION 1..739: note = Description: MG55-82 effector
MNIIKRDGSVVEYDANKIRTAIGKANAEVQKNEKASKEEIEEIIKYIQELNKKRMLVEDIQDIIEEKLMSYNHYQLAKAYITYRYTRSLVRQANTTDQSIKELIDGTSEYWNTENSNKNARVVTTQRDYLAGITSTDISRRFLIPKEVVDAHDEGLIHFHDMDYFAQNALHNCDLIDLEDMLQNGTCINGVMIEKPHRFITAMTIATQIITAVNSSQYGGVTITLTHLAPFVRDSYLRYVKKYEERGFSKEDVEKYAKEDLQKEVVDGVQTFQYQINSMTTTNGQAPFLSVCMYLGETEEYKPELAMIIEEVLRQRTEGMKNEKGIYVTPAFPKLLYVLEEDNIKEGSKYYYLTKLAAKCTAKRLVPDYISEKKMKEYKIDSNGDGQCYPCMGCRSFLTPYVDPKTKKAKYYGRFNQGVVTINLPDVALSSGKDVEKFWKIMDERLELCHRGLKTRYERLSHATSDVAPILWQNGALARLPKGASIKPLLHGGYSTISLGYAGLYECVKYMTGDSHTDGAKGEEFGLAVMQYLNDKCAQWKKEENMDYSVYGTPIESTTYKFSKCLQKRFGKIEGITDRGYITNSYHVPVFEKIDAFKKLSIESKFQRLSPGGAISYIETPNLQNNLDAVMQVIQYIYDNIVYAELNTKSDYCQKCGFDGEILLGDDLEWHCPNCGNKDHNTLNVARRTCGYIGTNFWNKGRTQEIKERVLHLENTDDENDKTKVTKAEAKVRVANQQQ

SEQ ID NO: 510 - protein, 724 aa, unidentified
  REGION 1..724: note = Description of Unknown: uncultivated organism sequence
  REGION 1..724: note = Category: MG55 effectors
  REGION 1..724: note = Description: MG55-83 effector
MKIIKRSGAENTFDKEKIENAVAKANITVEEKDRLSEGEIGEIAQNIEDKCSEMNRAMDVETIQDWVEADIMRHGKYTVAKHYITYRYERSIVRQANTTDKQILSLLNFENEEVKQENSNKNPTVNSVQRDYMAGEVSKDITRRFLLPDDIVEAHEKGLIHFHDADYFAQHMHNCCLVNLEDMLQNGTVISEVMIEKPHSFSTACNIATQSIAQIASSQYGGQSITLSHLAPFVQISRDKYRREVKKEFAELNIPADEDTINKVAEMRVKAEIVQGVQMIQYQVITLMTTNGQAPFVTVFMYLDEVPEGQTRDDLAAIIEEMLRQRIQGVKNEKGVYITPAFPKLIYVLEEDNIREGSKYWELTKLAAKCTAKRMVPDYISEKKMKELKVDKNGNGQCYPCMGCRSFLTTYLDENGKPKYYGRFNQGVVTINLVDVACSSYKDTDKFWKIFDERLELCRRALMLRHERLKGTPSDVAPILWQNGALARLKKGETIDKLLFGGYSTISLGYAGLCECVRYMTGKSHTDPSATPFALEVMQHLNDACAKWRAETNIDFSLYGTPLESTTYKFARCLQKRFGVIEGVTDRNYITNSYHIHVTENIDAFDKLTFESQFQALSPGGAISYVEVPNMQNNIEAVLAVMQHIYDNIMYAELNTKSDYCQKCGFDGEIKIVEDDGKLVWECPNCGNRDQNTLNVARRTCGYIGTQFWNQGRTQEIKERVLHL

SEQ ID NO: 511 - protein, 724 aa, unidentified
  REGION 1..724: note = Description of Unknown: uncultivated organism sequence
  REGION 1..724: note = Category: MG55 effectors
  REGION 1..724: note = Description: MG55-84 effector
MKIIKRSGAENTFDKEKIENAVAKANITVEEKDRLSEGEIGEIAQNIEDKCSEMNRAMDVETIQDWVEADIMRHGKYTVAKHYITYRYERSIVRQANTTDKQILSLLNFENEEVKQENSNKNPTVNSVQRDYMAGEVSKDITRRFLLPDDIVEAHEKGLIHFHDADYFAQHMHNCCLVNLEDMLQNGTVISEVMIEKPHSFSTACNIATQSIAQIASSQYGGQSITLSHLAPFVQISRDKYRREVKKEFAELNIPADEDTINKVAEMRVKAEIVQGVQMIQYQVITLMTTNGQAPFVTVFMYLDEVPEGQTRDDLAAIIEEMLRQRIQGVKNEKGVYITPAFPKLIYVLEEDNIREGSKYWELTKLAAKCTAKRMVPDYISEKKMKELKVDKNGNGQCYPCMGCRSFLTTYLDENGKPKYYGRFNQGVVTINLVDVACSSYKDMDKFWKIFDERLELCRRALMLRHERLKGTPSDVAPILWQNGALARLKKGETIDKLLFGGYSTISLGYAGLCECVRYMTGKSHTDPSATPFALEVMQHLNDACAKWRAETNIDFSLYGTPLESTTYKFARCLQKRFGVIEGVTDRSEVTNSYHIHVTENIDAFDKLTFESQFQALSPGGAISYVEVPNMQNNIEAVLAVMQHIYDNIMYAELNTKSDYCQKCGFDGEIKIVEDDGKLVWECPNCGNRDQNTLNVARRTCGYIGTQFWNQGRTQEIKERVLHL

SEQ ID NO: 512 - protein, 327 aa, unidentified
  REGION 1..327: note = Description of Unknown: uncultivated organism sequence
  REGION 1..327: note = Category: MG55 effectors
  REGION 1..327: note = Description: MG55-85 effector
MITAIQRLKEENERLNHRAGHDWLTGLYDREGAEEKINRLIRERGCGVMILLDVDRFRRINSRHGHIVGDHVLSSIAAVLDSMVFRHDVVGRVDDDEFVVFMPVDQDEKFLQQRCRQIRDRLKTMELPGGAEISISLSTGGAICGKDDTYRSLFARAYGELDKDKVSAREQTADSEARKGNFMVDLKQVRGELAEQSLIPGAYCQDYETFKHIYRFVERRLRRAEISSYILLITLTDGNGDFPPLTRREEQMAVLKDEIQISLRSGDVFTQYSSCQYLVMISDASAENVEMIADRICTAFYKAIGGACQGVLLHHCYPMWPAGEKEP

SEQ ID NO: 513 - protein, 722 aa, unidentified
  REGION 1..722: note = Description of Unknown: uncultivated organism sequence
  REGION 1..722: note = Category: MG55 effectors
  REGION 1..722: note = Description: MG55-87 effector
MEVIKRDGSKVAFDGSKIENAILKAMRYGSGIVKPEIASKISHEIEDWHKSSGAASISIYRIEGQVFEKLIEKGEVLTAKAYEGYRKVREFQRETNTIDNAIYGIVNQTNKEAMDENSNKDATVLATQRDLIAGEFSRDYCRRLLLPPKIVQAHDDGIIHFHDMDYYIQKMHNCDLVNLKDMFANGTVINDKLIETPKSLQTACTVATQIVQQVANGQYGGQTISISHLAPYVRVSYKKHLKAVRKEGKEVGIDYTEEQIEKIAKSRLHEEIKAGVQTIQYQINTFSTTNGQAPFLSIFMYLREEPDYIEETALLIEEILNQRYIGMKNPVGAYVTPAFPKLLYVLDDNNVPDDSQYRYLTDLAVKCVSKRMMPDFISAKIMRENYEGQVFPCMGCRSFLSPWKNEKGEYQWYGRFNQGVVTLNLTDVGLSANKNMDSFWKILDERLDLCYEALMLRHESLKGTPSDISPIHWQYGAIARLKPGEKIDSLLDTCYSTLSLGYIGLYECVVALIGQSHTTEEGDALALEIMQKLRNTCDKWKKDTGLGFALYGTPAESTTYTLARALKKRFGIVPGVTDKDYITNSYHVNVREHIDAFSKLGFEAKFQKISSGGAISYVEVTNMTNNFDAMKELINYMYETIQYAEINTKSDYCQECGFSGEILLDENNEWYCPNCGNRNHKTLNVCRRTCGYLGDNFWNKGRTQEIKERFVHLDNRVYQENN

SEQ ID NO: 514 - protein, 309 aa, unidentified
  REGION 1..309: note = Description of Unknown: uncultivated organism sequence
  REGION 1..309: note = Category: MG55 effectors
  REGION 1..309: note = Description: MG55-88 effector
MTTIINQFNSGGINPNFHNVNDDIILRIKNGLDFKLLFGKDKSGNKKLLERLMDKNDKSLNINRVFNVTYNKRDKHYYIIFTYETESEDYEKVKGRVCGIDLGVRRFVSIRLNDNIHVQKSIHSDDLIRVKMDINKKRREYQKSMVMAKGGHGRNRKLKYLDTIRKKEINFTNTALHKLSKQVIDFCIKYKVEQINMELLNRNIDKNSFFSRYWPISNFIDKLKYKVDSYGINLKFVDPYHTSQICSICGEIGERNGDTFICQNDKCKIHNENIDSDYNAAYNIAKSKLYVDKYENTQYYKLKNKEKVL

SEQ ID NO: 515 - protein, 724 aa, unidentified
  REGION 1..724: note = Description of Unknown: uncultivated organism sequence
  REGION 1..724: note = Category: MG55 effectors
  REGION 1..724: note = Description: MG55-89 effector
MKIIKRNGAEENFDISKIIMAVTKANAAVEECDRMTPRQIQRIAESVELACQELGRSAAVEEIQDMVEKQIMAHGAFEVAKAYITYRYTRSLVRRANTTDDRILSLIECNNEEAKQENSNKNPIVNSTQRDYMAGEVSRDITSRLLLPKDIVEAHEEGIIHFHDADYYAQHMHNCDLVNLEDMLENGTVITGTLIERPHSFSTACNIATQIIAQVASNQYGGQSISLTHLAPFVQVSRERIRREVEAEMQAIDAHPGEEKLAELVENRVREEIRRGVQTIQYQVVTLLTTNGQAPFVTVFMYLGEAKNEQERHDLAMIIEETLRQRYQGVKNEKGVWVTPAFPKLIYVLEEDNIHEDSPYWYLTELAARCTAKRMVPDYISEKKMLELKVDKNGEGHCYTCMGCRSFLTPYVDENGKPKYYGRFNQGVVTINLPDVALSSGGNMEKFWKIFDERLELCHRALMCRHERLKGTLSDAAPILWQYGALARLKKGEPIDKLLYGGYSTISLGYAGLYECVKYMTGKSHTDPSATPFALEIMQHMNDACAKWKQMHNIDFSLYGTPLESTTYKFAKCLQKRFGIIPGVTDKGYITNSYHIHVTEHIDAFSKLAFESKFQALSPGGAISYVEVPNMQNNIPAVLEVMKFIYDNIMYAELNTKSDYCQVCGYDGEIEIVEHDGKLIWRCPNCGNTDQDKMNVARRTCGYIGTQFWNQGRTQEIKERVLHL

SEQ ID NO: 516 - protein, 99 aa, unidentified
  REGION 1..99: note = Description of Unknown: uncultivated organism sequence
  REGION 1..99: note = Category: MG55 effectors
  REGION 1..99: note = Description: MG55-90 effector
MMSLIKRSYKYRMYPNKTQEELLAKTFGCVRVIWNACVDSFNSYDKETNPNPKFPTKSDLVIEKLWLNEVSAATLQQKQRDFIEFSKQYFNKNRKEKNR

SEQ ID NO: 517 - protein, 405 aa, unidentified
  REGION 1..405: note = Description of Unknown: uncultivated organism sequence
  REGION 1..405: note = Category: MG55 effectors
  REGION 1..405: note = Description: MG55-91 effector
MRLGVRMQRTNVIQLMPNKKQERILRECMLLSSCVYNSANYIVRQQFFNKESVSNFRDLQVKLQKSDDYRLLGRSYALPRLQIYGETNSARFKLIKANVQDKVGLPKYLKNRKTNTTIPSYLVIDGCQYSLSKTKATIPLSRAMRKKYDIKYFKIAYNGILKHKGKQQRGQIHYKNKKFYLYQSVEVTTPIMKSGNIAGLDLGIKNLLTVTTNTNQEKIIGSKRFFKQWQHYTDLIAQEQEKLSKINRKASNNLSRLYYKRSVYQDNLFNNVVAKMFRFLKRNNISTLVIGDIKGIREHNDKGKKLNTMMHNYWSFDKLLHKIENNAEASGIEIVMTTEEYTSRTCPICYDNSKENVKDRIFQCTFCGYIDHRDIIGARNIMIKGMHDQSNQSVHRQEILPLEVL

SEQ ID NO: 518 - protein, 724 aa, unidentified
  REGION 1..724: note = Description of Unknown: uncultivated organism sequence
  REGION 1..724: note = Category: MG55 effectors
  REGION 1..724: note = Description: MG55-92 effector
MKIIKRNGAEATFDISKIIMAVTKANAAVEEGDRMTPRQIQRIAESVELACQELGRSAAVEEIQDMVEKQIMAHGAFEVAKAYITYRYTRSLVRRANTTDDRILSLIECNNEEAKQENSNKNPIVNSTQRDYMAGEVSRDITSRLLLPKDIVEAHEEGIIHFHDADYYAQHMHNCDLVNLEDMLENGTVITGTLIERPHSFSTACNIATQIIAQVASNQYGGQSISLTHLAPFVQVSRERIRREVAAEMQAIDAHPGEEKLAELVENRVREEIRRGVQTIQYQVVTLLTTNGQAPFVTVFMYLGEAKNEQERHDLAMIIEETLRQRYQGVKNEKGVWVTPAFPKLIYVLEEDNIHEDSPYWYLTELAARCTAKRMVPDYISEKKMLELKVDKNGEGHCYTCMGCRSFLTPYVDENGKPKYYGRFNQGVVTINLPDVALSSGGNMEKFWKIFDERLELCHRALMCRHERLKGTLSDAAPILWQYGALARLKKGEPIDKLLYGGYSTISLGYAGLYECVKYMTGKSHTDPSATPFALEVMQHMNDACKQWKQMHNIDFSLYGTPLESTTYKFAKCLQKRFGIIPGVTDKGYITNSYHIHVTENIDAFSKLAFESKFQALSPGGAISYVEVPNMQNNIPAVLEVMKFIYDNIMYAELNTKSDYCQVCGYDGEIEIVEHDGKLIWRCPNCGNTDQDKMNVARRTCGYIGTQFWNQGRTQEIKERVLHL

SEQ ID NO: 519 - protein, 509 aa, unidentified
  REGION 1..509: note = Description of Unknown: uncultivated organism sequence
  REGION 1..509: note = Category: MG55 effectors
  REGION 1..509: note = Description: MG55-93 effector
MGQTITLAHLSPFIEDTRKDIKAHFPNFNDDEIEELVKRDIEVGVQTLQYQILTLLTTNGQTPFITIFANLAEVPEGKERTNLALVIEEVLRQRIQGVKNEKGVYITPAFPKIIYGLDECNINDDSKYFYLTKLAAECTSKRMVPDYQSNKIQRELKDGDIYPCMGCRSFLSKDGTKKNYARALNYSKHKGHKYYGRFNKGVVTINLPDVALSSKKDKDAFWKIFNERLELCHRALQYRYKRLAGTKSDIAPILWQYGAYARLNKDEKIDELLRHGYSTLSLGYAGLYECVKYMTGVSHTDENGKDFALAVMKYMNDCCDKWNKEENLGYSVYGSPIESTTYSFAKCLRKRFGKIKDITDHDYITNSYHVNVREDIDAFSKLKLESEFQKLSQGGAISYIEVPDLHKNIPAVIDILRFIYNNIMYAELNCKFDYCQKCGYSGEIQIKGEPGNLYWECPNCGNTDQKTMNIARRTCGYIGTNFWNQGRTEEIKDRVLHMDTLSKLKDRKK

SEQ ID NO: 520 - protein, 331 aa, unidentified
  REGION 1..331: note = Description of Unknown: uncultivated organism sequence
  REGION 1..331: note = Category: MG55 effectors
  REGION 1..331: note = Description: MG55-94 effector
MCRSFLTPYVDANGEPKYYGRFNQGVVTINLPDIALSSNGDIETFWDIFDERTELCHKALQMRHKRLEGTPSDVAPILWRYGALARLEKGETIDRLLHNGYSTLSLGYAGLYECVKYMTGKSHTDGDNGEKFGLEVMQALNDKCNKWKNEENIDYSLYGSPIESTTYKFAKCLKKRFGVIEGITDRDYITNSYHVPVFEKIDPFTKLSIESKFQKLSPGGAISYIECTDLTYNIDAVLEVMQFIYNNIMYAELNTKSDYCQVCGYDGEIKIVDEDGELIWECPNCGNRDKNKMNVARRTCGYIGSNFWNKGRTEEIAERYVHLDDHEYKEK

SEQ ID NO: 521 - protein, 707 aa, unidentified
  REGION 1..707: note = Description of Unknown: uncultivated organism sequence
  REGION 1..707: note = Category: MG55 effectors
  REGION 1..707: note = Description: MG55-95 effector
MKVIKRDGSTVEFNKSKIRDAITKSMKNGSGILLPDIARLIANDAEKYFAKEEDVATIYKIEKYVYDRLVHYGQAETARAYEGYRAVQEFKRNTNTTDDSILELLSKKNEDVMKENSNKNPVVSATQRDLIAGEVSKDIARRKLIPAHIVQAHDEGAIHWHDMDYTISPMFNCCLINLEDMFTNGTVINEKLVEEPKSFGTACTVATQIIAQVSSNQYGGQSITIKHLSKYLKVTEEKAFNHYMEMFNDESLATKLAKDIKMKELKDGVQTIRYQLSTLQTTNGQAPFSTIYLEIEDGNPYEEEMAMICEEMIRQRLEGMKNYKGQEIGEAFPKLVYLLDEHNCLEGGKYDYITKLAAKCTAKRLVPDYQSAKIMRENYEGNTFPPMGCRSHLSPWKDEKGNYKFYGRFNQGVVSLNLPQIAIMADKDMEMFWEMLDRRLELCKDALMTRHKMLLGVTSDSSPIHWQHGAIARLKKGEKIDKLLKDGYSTISLGYVGIAEMVQAMLGVTHTSKEGEKFALEVMNYMKEKCDKWKAETGLGFGLYGTPAESLIYRFCRIDKARFGEIQNVTDKLYYTNSYHVHVCEEIDAFSKLKFESQFHSISNGGCISYIEVPDMNKNVEAVEDIINFIYHNIQYAEINTKSDVCYKCGFNGEMELDRESLTWHCPSCGNDDESELQVMRRTCGYIGSSYWNKGRTAEIGDRVLHL

SEQ ID NO: 522 - protein, 729 aa, unidentified
  REGION 1..729: note = Description of Unknown: uncultivated organism sequence
  REGION 1..729: note = Category: MG55 effectors
  REGION 1..729: note = Description: MG55-96 effector
MKIVKRDGHIVDYDPEKIRVAIGKANEEVRGREKATKEEIKEIIKYIEDLNKKRILVEDIQDIIEQKLMEFDKYQLAKKYITYRYTRELVRKANTTDKSIKELIEGENEYWNSENSNKNAEVVTTQRDYLAGITSTDITRRFLLPEDIVEAHDAGIIHFHDADYFAQNALHNCELINLDDMLQNGTVINGVMIEKPHRFLTAATIATQIILAVTSSSYGGATVSLTHLAPFVRLSYEKYLKKYQARNFSKKDCEKYAMQDTKKEVEDGVQTFNYQVNSMTNTNGQAPFLSVNMYLGETEEYKDELAMIIEEFLKQRMLGFKNEKGVYITPAFPKLLYVLEEDNIHEGSKYWYLTKLAAECTAKRMVPDYISEKMMLKYKKNILGDGDCYPCMGCRSFLTPDRMLNIGNISKAKNYVEGKGKYYGRFNQGVVTINLPDVALSADGDMDEFWKIFDERLELCHRALQIRHKRLSNVTSDVAPILWQHGALARLEKGESIHELLHHGYSTISLGYAGLYECVKVMTGHSHTDNGPGKEFGIKVMQHLNDATNKWKKEEDIDYSVYGTPIESTTYKFAKCLKERFGTVKGITDRGYITNSYHVPVFEEIDAFSKLKLESEFQVLSPGGAISYVETPNLQGNIDAVIEVIQFIYDNIMYAELNTKSDYCQNCGYTGEILIDDDLEWYCPNCGNRDHNTLNVARRTCGYIGTNFWNKGRTQEIKERVLHIDNKEA

SEQ ID NO: 523 - protein, 707 aa, unidentified
  REGION 1..707: note = Description of Unknown: uncultivated organism sequence
  REGION 1..707: note = Category: MG55 effectors
  REGION 1..707: note = Description: MG55-97 effector
MKVIKRDGSTVEFNKSKIRDAITKSMKNGSGILLPDIARLIANDAEKYFAKEEDVATIYKIEKYVYDRLVHYGQAETARAYEGYRAVQEFKRNTNTTDDSILELLSKKNEDVMKENSNKNPVVSATQRDLIAGEVSKDIARRKLIPAHIVQAHDEGAIHWHDMDYTISPMFNCCLINLEDMFTNGTVINEKLVEEPKSFGTACTVATQIIAQVSSNQYGGQSITIKHLSKYLKVTEEKAFNHYMEMFNDESLATKLAKDIKIKELKDGVQTIRYQLSTLQTTNGQAPFSTIYLEIEDGNPYEEEMAMICEEMIRQRLEGMKNYKGQEIGEAFPKLVYLLDEHNCLEGGKYDYITKLAAKCTAKRLVPDYQSAKIMRENYEGNTFPPMGCRSHLSPWKDEKGNYKFYGRFNQGVVSLNLPQIAIMADKDMEMFWEMLDRRLELCKDALMTRHKMLLGVTSDSSPIHWQHGAIARLKKGEKIDKLLKDGYSTISLGYVGIAEMVQAMLGVTHTSKEGEKFALEVMNYMKEKCDKWKAETGLGFGLYGTPAESLIYRFCRIDKARFGEIQNVTDKLYYTNSYHVHVCEEIDAFSKLKFESQFHSISNGGCISYIEVPDMNKNVEAVEDIINFIYHNIQYAEINTKSDVCYKCGFNGEMELDRESLTWHCPSCGNDDESELQVMRRTCGYIGSSYWNKGRTAEIGDRVLHL

SEQ ID NO: 524 - protein, 318 aa, unidentified
  REGION 1..318: note = Description of Unknown: uncultivated organism sequence
  REGION 1..318: note = Category: MG55 effectors
  REGION 1..318: note = Description: MG55-98 effector
MCRSFLSNWKDPETGKYKWAGRFNCGVVSLNLPQIAILADKDLNKFWSLLDERLEMCHKALKFRHDLLLGTVSDVSPIHWQYGAIARLKPGEVIDKYLKDGYSTLSLGFVGVYEAVLALTGETHTKHQNLALEIVRRMKQKTIDWNIEENLGYGLYGSPAESLISRFAKIDKEKFGNIKGVTDKGYYTNSYHVFVGEEIDAFKKLTFEAPFHQYASGGCLSYIEMPNMEHNLDAVETLIQFIYDNVRYAEFNTKSDYCKACGFEGEIGFDKNHKWTCPKCGNQDQSKMTVTRRSCGYLGSNFWNEGRTKEIQSRVLHI

SEQ ID NO: 525 - protein, 724 aa, unidentified
  REGION 1..724: note = Description of Unknown: uncultivated organism sequence
  REGION 1..724: note = Category: MG55 effectors
  REGION 1..724: note = Description: MG55-99 effector
MKIIKRNGAEATFDISKIIMAITKANAAVEECDRMTPRQIQRIAESVELACQELGRSAAVEEIQDMVEKQIMAHGAFEVAKAYITYRYTRSLVRRANTTDDRILSLIECNNEEAKQENSNKNPIVNSTQRDYMAGEVSRDITSRLLLPKDIVEAHEEGIIHFHDADYYAQHMHNCDLVNLEDMLENGTVITGTLIERPHSFSTACNIATQIIAQVASNQYGGQSISLTHLAPFVQVSRERIRREVEAEMKAIDAHPGEEKLAELVENRVREEIRRGVQTIQYQVVTLLTTNGQAPFVTVFMYLGEAKNEQERHDLAMIIEETLRQRYQGVKNEKGVWVTPAFPKLIYVLEEDNIHEDSPYWYLTELAARCTAKRMVPDYISEKKMLELKVDKNGEGHCYTCMGCRSFLTPYVDENGKPKYYGRFNQGVVTINLPDVALSSGGNMEKFWKIFDERLELCHRALMCRHERLKGTLSDAAPILWQYGALARLKKGEPIDKLLYGGYSTISLGYAGLYECVKYMTGKSHTDPSATPFALEIMQHMNDACAKWKQMHNIDFSLYGTPLESTTYKFAKCLQKRFGIIPGVTDKGYITNSYHIHVTEHIDAFSKLAFESKFQALSPGGAISYVEVPNMQNNIPAVLEVMKFIYDNIMYAELNTKSDYCQVCGYDGEIEIVEHDGKLIWRCPNCGNTDQDKMNVARRTCGYIGTQFWNQGRTQEIKERVLHL

SEQ ID NO: 526 - protein, 722 aa, unidentified
  REGION 1..722: note = Description of Unknown: uncultivated organism sequence
  REGION 1..722: note = Category: MG55 effectors
  REGION 1..722: note = Description: MG55-100 effector
MEVIKRDGSKVAFDGSKIENAILKAMRYGSGIVKPEIASKISHEIEDWHKSSGAASISIYRIEGQVFEKLIEKGEVLTAKAYEGYRKVREFQRETNTIDNAIYGIVNQTNKEAMDENSNKDATVLATQRDLIAGEFSRDYCRRLLLPPKIVQAHDDGIIHFHDMDYYIQKMHNCDLVNLKDMFANGTVINDKLIETPKSLQTACTVATQIVQQVANGQYGGQTISISHLAPYVRVSYKKHLKAVRKEGEEVGIDYTEEQIEKIAKSRLHEEIKAGVQTIQYQINTFSTTNGQAPFLSIFMYLREEPDYIEETALLIEEILKQRYIGMKNPVGAYVTPAFPKLLYVLDDNNVPDDSQYRYLTDLAVKCVSKRMMPDFISAKIMRENYEGQVFPCMGCRSFLSPWKNEKGEYQWYGRFNQGVVTLNLTDVGLSANKNMDSFWKILDERLDLCYEALMLRHESLKGTPSDISPIHWQYGAIARLKPGEKIDSLLDTCYSTLSLGYIGLYECVVALIGQSHTTEEGDALALEIMQKLRNTCDKWKKDTGLGFALYGTPAESTTYTLARALKKRFGVVPGVTDKDYITNSYHVNVREHIDAFSKLGFEAKFQKISSGGAISYVEVTNMTNNFDAMKELINYMYETIQYAEINTKSDYCQECGFSGEILLDENNEWYCPNCGNRNHKTLNVCRRTCGYLGDNFWNKGRTQEIKERFVHLDNRVYQGNN

SEQ ID NO: 527 - protein, 722 aa, unidentified
  REGION 1..722: note = Description of Unknown: uncultivated organism sequence
  REGION 1..722: note = Category: MG55 effectors
  REGION 1..722: note = Description: MG55-101 effector
MEVIKRDGSKVAFDGSKIENAILKAMRYGSGIVKPEIASKISHEIEDWHKSSGAASISIYRIEGQVFEKLIEKGEVLTAKAYEGYRKVREFQRETNTIDNAIYGIVNQTNKEAMDENSNKDATVLATQRDLIAGEFSRDYCRRLLLPPKIVQAHDDGIIHFHDMDYYIQKMHNCDLVNLKDMFANGTVINDKLIETPKSLQTACTVATQIVQQVANGQYGGQTISISHLAPYVRVSYKKHLKAVRKEGKEVGIDYTEEQIEKIAKSRLHEEIKAGVQTIQYQINTFSTTNGQAPFLSIFMYLREEPDYIEETALLIEEILKQRYIGMKNPVGAYVTPAFPKLLYVLDDNNVPDDSQYRYLTDLAVKCVSKRMMPDFISAKIMRENYEGQVFPCMGCRSFLSPWKNEKGEYQWYGRFNQGVVTLNLTDVGLSANKNMDSFWKILDERLDLCYEALMLRHESLKGTPSDISPIHWQYGAIARLKPGEKIDSLLDTCYSTLSLGYIGLYECVVALIGQSHTTEEGDALALEIMQKLRNTCDKWKKDTGLGFALYGTPAESTTYTLARALKKRFGIVPGVTDKDYITNSYHVNVREQIDAFSKLGFEAKFQKISSGGAISYVEVTNMTNNFDAMKELINYMYETIQYAEINTKSDYCQECGFSGEILLDENNEWYCPNCGNRNHKTLNVCRRTCGYLGDNFWNKGRTQEIKERFVHLDNRVYQENN

SEQ ID NO: 528 - protein, 378 aa, unidentified
  REGION 1..378: note = Description of Unknown: uncultivated organism sequence
  REGION 1..378: note = Category: MG55 effectors
  REGION 1..378: note = Description: MG55-102 effector
MIAHKVLLYPNQEAEAFLQKQFEYARRDYNRQLETIVRGIQSGKVDLFNLKKWMDAVCAQAKKAPDFYDGESYHYPDIIGWNKKRVQAAAEDYLANPLNKPKYLKHSRYRKIFRLTSAPLDAQRFSVSEDHHLLLGGMHRIKMAEPLRFQTRPIACEISLRNDRYYASFLFAENLKPYLLTGKTAGVTVGSASLVAVADSDGKKVRFALDAKKRTRIHKRIRHLEKVLSHKEIGSAQYEKTRAKLMRAKRKEEDVIRNFVEQTSHTLVKAYDRIGIDDASTQIRLIQHAYAKPYLQEPFSALSNRLQSKAKSHGKTVVKVKDRRSSAPICSQCGERNRKTKGLSNRRWACPHCGAVHDSDLEGAERLCKEALKQERRI

SEQ ID NO: 529 - protein, 722 aa, unidentified
  REGION 1..722: note = Description of Unknown: uncultivated organism sequence
  REGION 1..722: note = Category: MG55 effectors
  REGION 1..722: note = Description: MG55-103 effector
MEVIKRDGSKVAFDGSKIENAILKAMRYGSGIVKPEIASKISHEIEDWHKSSGAASISIYRIEGQVFEKLIEKGEVLTAKAYEGYRKVREFQRETNTIDNAIYGIVNQTNKEAMDENSNKDATVLATQRDLIAGEFSRDYCRRLLLPPKIVQAHDDGIIHFHDMDYYIQKMHNCDLVNLKDMFANGTVINDKLIETPKSLQTACTVATQIVQQVANGQYGGQTISISHLAPYVRVSYKKHLKAVRKEGKEVGIDYTEEQIEKIAKSRLHEEIKAGVQTIQYQINTFSTTNGQAPFLSIFMYLREEPDYIEETALLIEEILKQRYIGMKNPVGAYVTPAFPKLLYVLDDNNVPDDSQYRYLTDLAVKCVSKRMMPDFISAKIMRENYEGQVFPCMGCRSFLSPWKNEKGEYQWYGRFNQGVVTLNLTDVGLSANKNMDSFWKILDERLDLCYEALMLRHESLKGTPSDISPIHWQYGAIARLKPGEKIDSLLDTCYSTLSLGYIGLYECVVALIGQSHTTEEGDALALEIMQKLRNTCDKWKKDTGLGFALYGTPAESTTYTLARALKKRFGVVPGVTDKDYITNSYHVNVREHIDAFSKLGFEAKFQKISSGGAISYVEVTNMTNNFDAMKELINYMYETIQYAEINTKSDYCQECGFSGEILLDENNEWYCPNCGNRNHKTLNVCRRTCGYLGDNFWNKGRTQEIKERFVHLDNRVYQENN

SEQ ID NO: 530 - protein, 335 aa, unidentified
  REGION 1..335: note = Description of Unknown: uncultivated organism sequence
  REGION 1..335: note = Category: MG55 effectors
  REGION 1..335: note = Description: MG55-104 effector
MNIWGCRSFLTPDRIKGNPARALNYKEGKGKYYGRFNMGVATINLVDVALSSGGDFDKFWELFEERTELCHQGLLVRIKRLEHMTTDVAPILWQHGAFARLEKGEHITDLIYGGYATASLGYAGLYECVRYMTGKSHTDNGEGCDFGIQVMQALNNKCNQWKAEENIDYSVYGTPIESTTYKFAKCLKKRFGEIEEVTNHDYITNSYHVNVREEIDAFTKLTLESKFQKLSPGGAISYVEVANLQNNIDAVLAIMKHIYDNIMYAEINTKSDYCQVCGYEGEIQIVEDENHKLVWECPNCKNRNQDKMNVARRTCGYIGTKFWNRAICSITMLFK

SEQ ID NO: 531 - protein, 724 aa, unidentified
  REGION 1..724: note = Description of Unknown: uncultivated organism sequence
  REGION 1..724: note = Category: MG55 effectors
  REGION 1..724: note = Description: MG55-105 effector
MKIIKRNGAEATFDISKIIMAVTKANAAVEEGDRMTPRQIQRIAESVELACQELGRSAAVEEIQDMVEKQIMAHGAFEVAKAYITYRYTRSLVRRANTTDDRILSLIECNNEEAKQENSNKNPIVNSTQRDYMAGEVSRDITSRLLLPKDIVEAHEEGIIHFHDADYYAQHMHNCDLVNLEDMLENGTVITGTLIERPHSFSTACNIATQIIAQVASNQYGGQSISLTHLAPFVQVSRERIRREVAAEMRAINADPGEEKLAELVENRVREEIRRGVQTIQYQVVTLLTTNGQAPFVTVFMYLGEAKNEQERHDLAMIIEETLRQRYQGVKNEKGVWVTPAFPKLIYVLEEDNIHEDSPYWYLTELAARCTAKRMVPDYISEKKMLELKVDKNGEGHCYTCMGCRSFLTPYVDENGKPKYYGRFNQGVVTINLPDVALSSGGNMEKFWKIFDERLELCHRALMCRHERLKGTLSDAAPILWQYGALARLKKGEPIDKLLYGGYSTISLGYAGLYECVKYMTGKSHTDPSATPFALEVMQHMNDACKQWKQMHNIDFSLYGTPLESTTYKFAKCLQKRFGIIPGVTDKGYITNSYHIHVTENIDAFSKLAFESKFQALSPGGAISYVEVPNMQNNIPAVLEVMKFIYDNIMYAELNTKSDYCQVCGYDGEIEIVEHDGKLIWRCPNCGNTDQDKMNVARRTCGYIGTQFWNQGRTQEIKERVLHL

SEQ ID NO: 532 - protein, 729 aa, unidentified
  REGION 1..729: note = Description of Unknown: uncultivated organism sequence
  REGION 1..729: note = Category: MG55 effectors
  REGION 1..729: note = Description: MG55-106 effector
MKIVKRDGHIVDYDSDKIRVAIGKANNEVKGKEKATKDEIEGIIKYIEDLNKKRILVEDIQDIIEEKLMELDRYQLAKKYITYRYTRELVRKANTTDQTIKELIEGENEYWNSENSNKNARVVTTQRDYLAGITSTDITRRFLLPDDIVKAHDEGIIHFHDADYFAQNALHNCELINLEDMLQNGTILNGVMIEKPHRFLTAATIATQIILAVSSSSYGGATVSLTYLAPFVRDSYNYYYKKYKAMNMSESDCKKYAEIDTKKEVADGVQTFNYQVNSMTSTNGQAPFLSVCMYLGETDEYKEELALIIEEFLNQRILGFKNEAGVYITPAFPKLLYILEEDNIREDSKYWYLTVLAAKCTAKRMVPDYISEKIMKQLKVNEKGVSECYPCMGCRSFLTPDRTMSLGNIAHAKNYVEGKGKYYGRFNQGVVTINLPDIALSSKRDMDKFWKIFDERLELCHRALQIRHKRLSNATSDVAPILWQHGALARLKEGESIHELLHHGYSTISLGYAGLYECVKYMTGHSHTDNGEGKKLGLEVMQHLNDAANKWKVEEDIDYSVYGSPIESTTYKFARCLKERFGVVKGITDRDYITNSYHVPVFEEIDAFEKLKLESEFQRLSPGGAVSYIETPNLQNNIESITEVMKFIYDNIMYAELNTKSDYCQKCGYTGEILVDDDMQWYCPNCGNRDHNSLNVARRTCGYIGTNFWNRGRTQEIKERVLHLDNKEA

SEQ ID NO: 533 - protein, 722 aa, unidentified
  REGION 1..722: note = Description of Unknown: uncultivated organism sequence
  REGION 1..722: note = Category: MG55 effectors
  REGION 1..722: note = Description: MG55-107 effector
MEVIKRDGSKVAFDGSKIENAILKAMRYGSGIVKPEIASKISHEIEDWHKSSGAASISIYRIEGQVFEKLIEKGEVLTAKAYEGYRRVREFQRETNTIDNAIYGIVNQTNKEAMDENSNKDATVLATQRDLIAGEFSRDYCRRLLLPPKIVQAHDDGIIHFHDMDYYIQKMHNCDLVNLKDMFANGTVINDKLIETPKSLQTACTVATQIVQQVANGQYGGQTISISHLAPYVRVSYKKHLKAVRKEGKEVGIDYTEEQIEKIAKSRLHEEIKAGVQTIQYQINTFSTTNGQAPFLSIFMYLREEPDYIEETALLIEEILKQRYIGMKNPVGAYVTPAFPKLLYVLDDNNVPDDSQYRYLTDLAVKCVSKRMMPDFISAKIMRENYEGQVFPCMGCRSFLSPWKNEKGEYQWYGRFNQGVVTLNLTDVGLSANKNMDSFWKILDERLDLCYEALMLRHESLKGTPSDISPIHWQYGAIARLKPGEKIDSLLDTCYSTLSLGYIGLYECVVALIGQSHTTEEGDALALEIMQKLRNACDKWKKDTGLGFALYGTPAESTTYTLARALKKRFGVVPGVTDKDYITNSYHVNVREHIDAFSKLGFEAKFQKISSGGAISYVEVTNMTNNFDAMKELINYMYETIQYAEINTKSDYCQECGFSGEILLDENNEWYCPNCGNRNHKTLNVCRRTCGYLGDNFWNKGRTQEIKERFVHLDNRVYQENN

SEQ ID NO: 534 - protein, 491 aa, unidentified
  REGION 1..491: note = Description of Unknown: uncultivated organism sequence
  REGION 1..491: note = Category: MG55 effectors
  REGION 1..491: note = Description: MG55-108 effector
MQVSRERIRREVEAEMKAIDAHPGEEKLAELVENRVREEIRRGVQTIQYQVVTLLTTNGQAPFVTVFMYLGEAKNEQERHDLAMIIEETLRQRYQGVKNEKGVWVTPAFPKLIYVLEEDNIHEDSPYWYLTELAARCTAKRMVPDYISEKKMLELKVDKNGEGHCYTCMGCRSFLTPYVDENGKPKYYGRFNQGVVTINLPDVALSSGGNMEKFWKIFDERLELCHRALMCRHERLKGTLSDAAPILWQYGALARLKKGEPIDKLLYGGYSTISLGYAGLYECVKYMTGKSHTDPSATPFALEIMQHMNDACAKWKQMHNIDFSLYGTPLESTTYKFAKCLQKRFGIIPGVTDKGYITNSYHIHVTEHIDAFSKLAFESKFQALSPGGAISYVEVPNMQNNIPAVLEVMKFIYDNIMYAELNTKSDYCQVCGYDGEIEIVEHDGKLIWRCPNCGNTDQDKMNVARRTCGYIGTQFWNQGRTQEIKERVLHL

SEQ ID NO: 535 - protein, 729 aa, unidentified
  REGION 1..729: note = Description of Unknown: uncultivated organism sequence
  REGION 1..729: note = Category: MG55 effectors
  REGION 1..729: note = Description: MG55-110 effector
MKIVKRDGHIVDYDSDKIRVAIGKANNEVKGKEKATKDEIEGIIKYIEDLNKKRILVEDIQDIIEEKLMELDRYQLAKKYITYRYTRELVRKANTTDQTIKELIEGENEYWNSENSNKNARVVTTQRDYLAGITSTDITRRFLLPDDIVKAHDEGIIHFHDADYFAQNALHNCELINLEDMLQNGTILNGVMIEKPHRFLTAATIATQIILAVSSSSYGGATVSLTYLAPFVRDSYNYYYKKYKAMNMSESDCKKYAEIDTKKEVADGVQTFNYQVNSMTSTNGQAPFLSVCMYLGETDEYKEELALIIEEFLNQRILGFKNEAGVYITPAFPKLLYILEEDNIREDSKYWYLTVLAAKCTAKRMVPDYISEKIMKQLKVNEKGVSECYPCMGCRSFLTPDRTMSLGNIAHAKNYVEGKGKYYGRFNQGVVTINLPDIALSSKRDMDKFWKIFDERLELCHRALQIRHKRLSNATSDVAPILWQHGALARLKEGESIHELLHHGYSTISLGYAGLYECVKYMTGHSHTDNGEGKKLGLEVMQHLNDAANKWKAEEDIDYSVYGSPIESTTYKFARCLKERFGVVKGITDRDYITNSYHVPVFEEIDAFEKLKLESEFQRLSPGGAVSYIETPNLQNNIESITEVMKFIYDNIMYAELNTKSDYCQKCGYTGEILVDEDMQWYCPNCGNRDHNSLNVARRTCGYIGTNFWNRGRTQEIKERVLHLDNKEA

SEQ ID NO: 536 - protein, 417 aa, unidentified
  REGION 1..417: note = Description of Unknown: uncultivated organism sequence
  REGION 1..417: note = Category: MG55 effectors
  REGION 1..417: note = Description: MG55-111 effector
MIRALVLRHEFDLQKLLSASIEVARKGFEWRQLPGRFSDKPRLGCKEVKNISTGNARTDETILRYYKTANVNMKEFHPSNVKVLINKQSIKVNDNNVITIVPFKLTIKNTDGRYNLAEKLCGDTIYVKKKQAKISIPEGSWQIIQAKLDETNIYLTLEKENCSVLNSNYFLGIDCNASGWAAIAASPKRIDSSGNEIKGIVKKFGSGIDHVHKKYRDLNRSFQQKDLLNKLTDRAADIVLDIQRKEAVVIVQCALDNKLAIKMENLTGILSRANSKIYSKELRARLNSWGYYQMQQLIVLQAEEMGVPVFFVNPAFTSQTCSVCGKLGVRESKSVFKCSDENCRYHKGTDADVNAAYNISKSELIVSPGEKGVKEMQGWWKQYWIDNPPLPKPVKIRKSRKKKDPKVENNQEFEAIN

SEQ ID NO: 537 - protein, 729 aa, unidentified
  REGION 1..729: note = Description of Unknown: uncultivated organism sequence
  REGION 1..729: note = Category: MG55 effectors
  REGION 1..729: note = Description: MG55-112 effector
MKIVKRDGHIVDYDPEKIRVAIGKANEEVRGREKATKEEIKEIIKYIEDLNKKRILVEDIQDIIEQKLMEFDKYQLAKKYITYRYTRELVRKANTTDKSIKELIEGESEYWNSENSNKNAEVVTTQRDYLAGITSTDITRRFLLPEDIVEAHDAGIIHFHDADYFAQNALHNCELINLDDMLQNGTVINGVMIEKPHRFLTAATIATQIILAVTSSSYGGATVSLTHLAPFVRLSYEKYLKKYQARNFSKKDCEKYAMQDTKKEVEDGVQTFNYQVNSMTNTNGQAPFLSVNMYLGETEEYKDELAMIIEEFLKQRMLGFKNEKGVYITPAFPKLLYVLEEDNIHEGSKYWYLTKLAAECTAKRMVPDYISEKMMLKYKKNILGDGDCYPCMGCRSFLTPDRMLNIGNISKAKNYVEGKGKYYGRFNQGVVTINLPDVALSADGDMDEFWKIFDERLEICHRALQIRHKRLSNVTSDVAPILWQHGALARLEKGESIHELLHHGYSTISLGYAGLYECVKVMTGHSHTDNGPGKEFGIKVMQHLNDATNKWKKEEDIDYSVYGTPIESTTYKFAKCLKERFGTVKGITDRGYITNSYHVPVFEEIDAFSKLKLESEFQVLSPGGAISYVETPNLQGNIDAVIEVIQFIYDNIMYAELNTKSDYCQNCGYTGEILIDDDLEWYCPNCGNRDHNTLNVARRTCGYIGTNFWNKGRTQEIKERVLHIDNKEA

SEQ ID NO: 538 - protein, 707 aa, unidentified
  REGION 1..707: note = Description of Unknown: uncultivated organism sequence
  REGION 1..707: note = Category: MG55 effectors
  REGION 1..707: note = Description: MG55-113 effector
MKVIKRDGSTVEFNKSKIRDAITKSMKNGSGILLPDIARLIANDAEKYFAKEEDVATIYKIEKYVYDRLVHYGQAETARAYEGYRAVQEFKRNTNTTDDSILELLSKKNEDVMKENSNKNPVVSATQRDLIAGEVSKDIARRKLIPAHIVQAHDEGAIHWHDMDYTISPMFNCCLINLEDMFTNGTVINEKLVEEPKSFGTACTVATQIIAQVSSNQYGGQSITIKHLSKYLKVTEEKAFNHYMEMFNDESIATKLAKDIKMKELKDGVQTIRYQLSTLQTTNGQAPFSTIYLEIEDGNPYEEEMAMICEEMIRQRLEGMKNYKGQEIGEAFPKLVYLLDEHNCLEGGKYDYITKLAAKCTAKRLVPDYQSAKIMRENYEGNTFPPMGCRSHLSPWKDEKGNYKFYGRFNQGVVSLNLPQIAIMADKDMEMFWEMLDRRLELCKDALMTRHKMLLGVTSDSSPIHWQHGAIARLKKGEKIDKLLKDGYSTISLGYVGIAEMVQAMLGVTHTSKEGEKFALEVMNYMKEKCDKWKAETGLGFGLYGTPAESLIYRFCRIDKARFGEIQNVTDKLYYTNSYHVHVCEEIDAFSKLKFESQFHSISNGGCISYIEVPDMNKNVEAVEDIINFIYHNIQYAEINTKSDVCYKCGFNGEMELDRESLTWHCPSCGNDDESELQVMRRTCGYIGSSYWNKGRTAEIGDRVLHL

SEQ ID NO: 539 - protein, 724 aa, unidentified
  REGION 1..724: note = Description of Unknown: uncultivated organism sequence
  REGION 1..724: note = Category: MG55 effectors
  REGION 1..724: note = Description: MG55-114 effector
MKIIKRNGAEENFDISKIIMAVTKANAAVEECDRMTPRQIQRIAESVELACQELGRSAAVEEIQDMVEKQIMAHGAFEVAKAYITYRYTRSLVRRANTTDDRILSLIECNNEEAKQENSNKNPIVNSTQRDYMAGEVSRDITSRLLLPKDIVEAHEEGIIHFHDADYYAQHMHNCDLVNLEDMLENGTVITGTLIERPHSFSTACNIATQIIAQVASNQYGGQSISLTHLAPFVQVSRERIRREVAAEMQAIDAHPGEEKLAELVENRVREEIRRGVQTIQYQVVTLLTTNGQAPFVTVFMYLGEAKNEQERHDLAMIIEETLRQRYQGVKNEKGVWVTPAFPKLIYVLEEDNIHEDSPYWYLTELAARCTAKRMVPDYISEKKMLELKVDKNGEGHCYTCMGCRSFLTPYVDENGKPKYYGRFNQGVVTINLPDVALSSGGNMEKFWKIFDERLELCHRALMCRHERLKGTLSDAAPILWQYGALARLKKGEPIDKLLYGGYSTISLGYAGLYECVKYMTGKSHTDPSATPFALEVMQHMNDACKHWKQMHNIDFSLYGTPLESTTYKFAKCLQKRFGIIPGVTDKGYITNSYHIHVTEHIDAFSKLAFESKFQALSPGGAISYVEVPNMQNNIPAVLEVMKFIYDNIMYAELNTKSDYCQVCGYDGEIEIVEHDGKLIWRCPNCGNTDQDKMNVARRTCGYIGTQFWNQGRTQEIKERVLHL

SEQ ID NO: 540 - protein, 729 aa, unidentified
  REGION 1..729: note = Description of Unknown: uncultivated organism sequence
  REGION 1..729: note = Category: MG55 effectors
  REGION 1..729: note = Description: MG55-115 effector
MKIVKRDGHIVDYDPQKIRIAIGKANNEVRGKEKVSKEQIDEIIKYIEELNKKRILVEDIQDIIEEKLMSYGKYTLAKKYITYRYTRELVRKANTTDKSIKELIEGENEYWNSENSNKNAEVVTTQRDYLAGITSTDITRRFLLPEDIVEAHDKGIIHFHDADYFAQNALHNCELINLDDMLQNGTVINGVMIEKPHRFITAATIATQIILAVTSSSYGGATVSLTHLAPFVRLSYEKYLKKYQSRNLSKKDCEKFAMQDTRKEVEDGVQTFNYQVNSMTNTNGQAPFLSVCMYLGETDEYKEELAMIIEEFLKQRILGFKNEKGVYITPAFPKLLYVLEEDNIHEDSKYWYLTKLAAECTAKRMVPDYISEKVMKELKKNELGNGECYPCMGCRSFLTPDRTMSLGNIAHAKNYVEGKGKYYGRFNQGVVTINLPDVALSADGDMDKFWKIFDERLELCHRALQIRHKRLSNATSDVAPILWQHGALARLKKGESIHELLHHGYSTISLGYAGLYECVKVMTGHSHTDNGEGKEFGLKVMQHLNDATAKWKAEEDIDYSVYGSPIESTTYKFAKCLKERFGTIKGITDRGYVTNSYHVPVFEEIDAFSKLKLESEFQRLSPGGAISYIETPNLQNNLDAVLEVIQFIYDNIMYAELNTKSDYCQKCGYTGEILIDDNLEWYCPNCGNRDHNTLNVARRTCGYIGTNFWNKGRTQEIKERVLHLDNKNA

SEQ ID NO: 541 - protein, 399 aa, unidentified
  REGION 1..399: note = Description of Unknown: uncultivated organism sequence
  REGION 1..399: note = Category: MG55 effectors
  REGION 1..399: note = Description: MG55-116 effector
MESRAWCNFILVQKKKIDRREAYPPRYLKGYPGFPGSQRYAAAAVLADSLTKLEQAAREQSAKTPVRFANLSSEDWTAIQERFSPATPNEANEKLRPRTARQTVSRRFAALRKANPQWSPAQLSEEILAGIFRCAEKLKTHLVAKGFDDRRAVIKLANLYNVAVALALEPVRAAGDYVSFYQEEAPKRKAFGDVRGGLHQPSDDSAAIQITGFSVGEDGTPNYNGLLVCKQADDRKEDSWVFLYCHQEGQAFQLADPNAKPRGKLLTDWIGFASRGGSRKKAQASVKQLVRGQVWVSEKTPPTVLPLAFGSRQGREYLWHFDRNLRSEGEWVLGNPADGVLLNAEGRKEFFGKWFPFMHEEKRSLPGFVVGLTFREAIFAHTRTFAKWLRGEADNWPPE

SEQ ID NO: 542 - protein, 729 aa, unidentified
  REGION 1..729: note = Description of Unknown: uncultivated organism sequence
  REGION 1..729: note = Category: MG55 effectors
  REGION 1..729: note = Description: MG55-117 effector
MKIVKRDGHIVDYDQQKIRIARGKSNNEVRGKEKVSKEQIDEIIKYIEELNKKRILVEDIQDIIEEKLMSYGKYTLAKKYITYRYTRELVRKANTTDKSIKELIEGENEYWNSENSNKNAEVVTTQRDYLAGITSTDITRRFLLPEDIVEAHDKGIIHFHDADYFAQNALHNCELINLDDMLQNGTVINGVMIEKPHRFITAATIATQIILAVTSSSYGGATVSLTHLAPFVRLSYEKYLKKYQSRNLSKKDCEKFAMQDTRKEVEDGVQTFNYQVNSMTNTNGQAPFLSVCMYLGETDEYKEELAMIIEEFLKQRILGFKNEKGVYITPAFPKLLYVLEEDNIHEDSKYWYLTKLAAECTAKRMVPDYISEKVMKELKKNELGNGECYPCMGCRSFLTPDRTMSLGNIAHAKNYVEGKGKYYGRFNQGVVTINLPDVALSADGDMDKFWKIFDERLELCHRALQIRHKRLSNATSDVAPILWQHGALARLKKGESIHELLHHGYSTISLGYAGLYECVKVMTGHSHTDNGEGKEFGLKVMQHLNDATAKWKAEEDIDYSVYGSPIESTTYKFAKCLKERFGTIKGITDRGYVTNSYHVPVFEEIDAFSKLKLESEFQRLSPGGAISYIETPNLQNNLDAVLEVIQFIYDNIMYAELNTKSDYCQKCGYTGEILIDDNLEWYCPNCGNRDHNTLNVARRTCGYIGTNFWNKGRTQEIKERVLHLDNKNA

SEQ ID NO: 543 - protein, 729 aa, unidentified
  REGION 1..729: note = Description of Unknown: uncultivated organism sequence
  REGION 1..729: note = Category: MG55 effectors
  REGION 1..729: note = Description: MG55-118 effector
MKIVKRDGHIVDYDPEKIRVAIGKANEEVRGREKATKEEIKEIIKYIEDLNKKRILVEDIQDIIEQKLMEFDKYQLAKKYITYRYTRELVRKANTTDKSIKELIEGENEYWNSENSNKNAEVVTTQRDYLAGITSTDITRRFLLPEDIVEAHDAGIIHFHDADYFAQNALHNCELINLDDMLQYGTVINGVMIEKPHRFLTAATIATQIILAVTSSSYGGATVSLTHLAPFVRLSYEKYLKKYQARNFSKKDCEKYAMQDTKKEIEDGVQTFNYQVNSMTNTNGQAPFLSVCMYLGETEEYKDELAMIIEEFLKQRILGFKNEKGVYITPAFPKLLYVLEEDNIREGSKYWYLTKLAAECTAKRMVPDYISEKMMLKYKKNILGDGDCYPCMGCRSFLTPDRMLNIGNIAKAKNYVEGKGKYYGRFNQGVVTINLPDVALSADGDMDEFWKIFDERLELCHRALQIRHKRLSNVTSDVAPILWQHGALARLEKGESIHELLHHGYSTISLGYAGLYECVKVMTGHSHTDNGPGKEFGLKVMQHLNDATSKWKAEEDLDYSVYGTPIESTTYKFAKCLKERFGTVKGITDRNYITNSYHVPVFEEIDAFSKLKLESEFQVLSPGGAISYVETPNLQGNIDAVIEIIQFIYDNIMYAELNTKSDYCQQCGYTGEILIDDNLEWYCPNCGNRDHNTLNVARRTCGYIGTNFWNKGRTQEIKERVLHIDNKEA

SEQ ID NO: 544 - protein, 724 aa, unidentified
  REGION 1..724: note = Description of Unknown: uncultivated organism sequence
  REGION 1..724: note = Category: MG55 effectors
  REGION 1..724: note = Description: MG55-119 effector
MKIIKRNGAEATFDISKIIMAITKANAAVEECDRMTPRQIQRIAESVELACQELGRSAAVEEIQDMVEKQIMAHGAFEVAKAYITYRYTRSLVRRANTTDDRILSLIECNNEEAKQENSNKNPIVNSTQRDYMAGEVSRDITSRLLLPKDIVEAHEEGIIHFHDADYYAQHMHNCDLVNLEDMLENGTVITGTLIERPHSFSTACNIATQIIAQVASNQYGGQSISLTHLAPFVQVSRERIRREVEAEMQAIDAHPGEEKLAELVENRVREEIRRGVQTIQYQVVTLLTTNGQAPFVTVFMYLGEAKNEQERHDLAMIIEETLRQRYQGVKNEKGVWVTPAFPKLIYVLEEDNIHEDSPYWYLTELAARCTAKRMVPDYISEKKMLELKVDKNGEGHCYTCMGCRSFLTPYVDENGKPKYYGRFNQGVVTINLPDVALSSGGNMEKFWKIFDERLELCHRALMCRHERLKGTLSDAAPILWQYGALARLKKGEPIDKLLYGGYSTISLGYAGLYECVKYMTGKSHTDPSATPFALEIMQHMNDACAKWKQMHNIDFSLYGTPLESTTYKFAKCLQKRFGIIPGVTDKGYITNSYHIHVTEKIDAFSKLAFESKFQALSPGGAISYVEVPNMQNNIPAVLEVMKFIYDNIMYAELNTKSDYCQVCGYDGEIEIVEHDGKLIWRCPNCGNTDQDKMNVARRTCGYIGTQFWNQGRTQEIKERVLHL

SEQ ID NO: 545 - protein, 722 aa, unidentified
  REGION 1..722: note = Description of Unknown: uncultivated organism sequence
  REGION 1..722: note = Category: MG55 effectors
  REGION 1..722: note = Description: MG55-120 effector
MRMKIIKRSGSEDTFDARKITAAVTKANYEVPTKERLSKEQIESITADVENICLDMNRALSVEEIQDLVEEQIMDRRAFAVARKYITYRYNRALLRKANSTDKQILSLLECNNEMVKQENSNKNPTVNSVQRDYMAGEVSKDITKRFLLPSEIVRAHEQGIIHFHDSDYFAQHMHNCCLVNLEDMLQNGTVISETMIEKPKSFSTACNIATQSIAQIASSQYGGQSISLTHLAPFVDISRQKYKKQVENELKEAGLSYNSKQVDEIAEIRVRDEIKRGVQMIQYQVITLMTTNGQAPFVSVFMYLDEAPEGRLREDLALIMEEILRQRMQGVKNEKGVYITPAFPKLLYVLEEDNVREGSKYWYLTQLAAKCTAKRMVPDYISEKIMKKMKDGNCYPCMGCRSFLTVYHDEKDRPKFYGRFNQGVVTINLVDVACSSDGDEEAFWKILDKRLELCKKALMYRHNRLKGTPSDVAPILWQYGALARLKKGEVIDKLLYNGYSTISLGYAGLCECTRYMTGKSHTDPSATPFALKVMEKLNDACSRWREEENIDFSLYGTPLESTTYKFAKCLQKRFGIIKGVTDKNYITNSYHVHVTEEINAFDKLKFEAQFQNLSPGGAVSYVEVPNMENNIDAVLQVMQFIYDNIMYAELNTKSDYCQVCDYSGQIEIVNDEHGKLIWKCPNCGNTDQDKMNVARRTCGYIGTQFWNQGRTQEIKERVLHL

SEQ ID NO: 546 - protein, 708 aa, unidentified
  REGION 1..708: note = Description of Unknown: uncultivated organism sequence
  REGION 1..708: note = Category: MG55 effectors
  REGION 1..708: note = Description: MG55-121 effector
MKVIKRDGSTADFDSSKIIVAIQKANQVVEPEDRIDQERIEAIAHYVESKNRMRLLVEDIQDMVEHQLMDEGKFNLAKSYIIYRYTRALVRKANTTDESILSLIRNSNKDVMEENSNKNAVMASTQRDLIAGEVSKDLTRRLILPEKISKAHDEGAIHFHDADYFVQPIFNCCLINVGDMLDNGTVMNGKLIESPKSFQVACTVMTQIIASVASSQYGGQSVDIRHLGKYLRRSYEKFKLTIKAEVGDSVADEVVERLTKRRLQDELRSGVQTIQYQINTLMTTNGQSPFVTIFLNLQADDEYLEENAMIVEEILRQRLEGIKNDKGVFVTPAFPKLVYVLDEHNCLKGGKYDYITKLAVKCSAKRLYPDYISAKKMRENYEGNVFAPMGCRSFLAAWKDDEGNYKFEGRFNQGVVSLNLPQVAILAHGDEEKFWPLLDERLQLCYEALMCRHNSLKGIRSDVSPVHWQYGAIARLEKGEVIDKYLEKGYSTISLGYIGLYEMTKLMKDVSHTTPEGEEFALRVMKYLRAACDKWKKETGLGFALYGTPAESLCYRFARIDKERFGTIADVTDKGYYTNSYHVDVREDIDAFSKFNFESQFQRISSGGAISYVEIPNMRHNLEAMEDVVRFIYDNIQYAEFNTKSDYCHVCGFDGEIIINDDLEWECPNCGNKNQTLMNVTRRTCGYLGENFWNVGKTKEIKSRVLHL

SEQ ID NO: 547 - protein, 708 aa, unidentified
  REGION 1..708: note = Description of Unknown: uncultivated organism sequence
  REGION 1..708: note = Category: MG55 effectors
  REGION 1..708: note = Description: MG55-122 effector
MRVIKRDGRTVEYDRNKILIAIRKANAEVDTFERVNDDMIDGIVAGIENMKRDTMQVEDIQDIIEQKLMAAGKFDLAKKYIIYRYTRELVRKANTTDDSIMSLLQNSNKDVMEENSNKNAYVASTQRDLIAGEVSKDLTKRILLPEKITKAHEDGVLHFHDMDYFIQPIFNCCLINIGDMLDNGTVMNGKLIESPKSFQVACTVMTQIISAVASSQYGGQSVDTRHLGKYLRKSADKYRKHYTERYAGKIAPDVIEEFVKERVNDELRSGVQTIQYQINTLMTTNGQSPFVTLFLNLDPKDEYIKENAMIIEEILRQRLEGIKNEKGVYVTPAFPKLIYVLDEHNALKGGEYDYITKLAVRCSAKRMYPDYISAKKMRENYEGNVFSCMGCRSFLTPWKDENGNYKFEGRFNQGVVSLNLPQIGILAKGDMEYFWQLLEERLSLCFEALMCRHRALEGVTSDVSPIHWQYGAIARLQKGEKIDKLLHGGYSTISLGYIGLYEVTKLMTGESQTTEKGSQFAKALMNRLRRATDTWKEETGIHFGLYGTPAESLCYRFAEIDKKRFGEIEDVTDKGYYTNSYHVDVREKIDAFSKFEFEAQFQVISSGGAISYVEVPNMQNNLPALEEVVKYIYEHIQYAEFNTKSDYCHVCGYDGEIIINDNLEWECPNCGNKDHDKMNVTRRTCGYLGENFWNVGKTKEINARVLHL

SEQ ID NO: 548 - protein, 708 aa, unidentified
  REGION 1..708: note = Description of Unknown: uncultivated organism sequence
  REGION 1..708: note = Category: MG55 effectors
  REGION 1..708: note = Description: MG55-123 effector
MRVIKRDGRTVEYDRNKILIAIRKANAEVDTFERVNDDMIDGIVAGIENMKRDTMQVEDIQDIIEQKLMAAGKFDLAKKYIIYRYTRELVRKANTTDDSIMSLLQNSNKDVMEENSNKNAYVASTQRDLIAGEVSKDLTKRILLPEKITKAHEEGVLHFHDMDYFIQPIFNCCLINIGDMLDNGTVMNGKLIESPKSFQVACTVMTQIISAVASSQYGGQSVDTRHLGKYLRKSADKYRKHYTERYAGKIAPDIIEEFVKERVNDELRSGVQTIQYQINTLMTTNGQSPFVTLFLNLDPKDEYIKENAMIIEEILRQRLEGIKNEKGVYVTPAFPKLIYVLDEHNALKGGEYDYITKLAVRCSAKRMYPDYISAKKMRENYEGNVFSCMGCRSFLTPWKDENGNYKFEGRFNQGVVSLNLPQIGILAKGDMEYFWQLLEERLSLCFEALMCRHRALEGVTSDVSPIHWQYGAIARLQKGEKIDKLLHGGYSTISLGYIGLYEVTKLMTGESQTTEKGSQFAKALMNRLRRATDTWKEETGIHFGLYGTPAESLCYRFAEIDKKRFGEIEDVTDKGYYTNSYHVDVREKIDAFSKFEFEAQFQVISSGGAISYVEVPNMQNNLPALEEVVKYIYEHIQYAEFNTKSDYCHVCGYDGEIIINDNLEWECPNCGNKDHDKMNVTRRTCGYLGENFWNVGKTKEINARVLHL

SEQ ID NO: 549 - protein, 720 aa, unidentified
  REGION 1..720: note = Description of Unknown: uncultivated organism sequence
  REGION 1..720: note = Category: MG55 effectors
  REGION 1..720: note = Description: MG55-124 effector
MKIIKRSGAEAVFDISKIIIAINKANHEVVEAERLTADQIKEIAQYIEDSCKDANHALNVEDIQDLVEDQLMDKRAFSVARKYITYRYKRALVRKSNSTDEQILSLIECNNEEVKQENSNKDSTVNSVQRDYMAGEVSKDITRRFLLPEDIVEAHEQGIIHFHDADYFAQHMHNCDLVNLEDMLQNGTVISGTRIDKPHSFSTACNIATQIIAQVASSQYGGQSISLAHLVPFVQISREKIHAELVQTLKESDVELSEEKINSIVERRLHAEIERGVQVIQYQVVTLMTTNGQSPFVTVFMYLNEAKNEQEKKDLAMIIEEVLDQRYQGVKNEDGVWITPAFPKLIYVLEEDNIHEDSEYYYLTKKAAKCTAKRMVPDYISEKKMKELKDGNCYTCMGCRSFLTVYHDEDGKPKFYGRFNQGVVTLNLVDLACSSGGDFEKFWKLFDERLDLCYRALMARHNRLKGTPSDVAPILWQYGALARLKKGETIDKLLYGGYSTISLGYAGLCECTRYMTGKPHTDPAATPFALKVMQRLNDACKEWKEKENIDFSVYGTPLESTTYKFAKCLQKRFGVIPGVTDKNYITNSYHVHVTENIDAFTKLKFESQFQALSPGGAISYVEVPNMQDNLDAVLSVMKFIYENIMYAELNTKSDYCQVCGYDGEIQIVKDDDGKLVWECPHCHNRDQDKMNVARRTCGYIGSQFWNQGRTQEIKERVLHL

SEQ ID NO: 550 - protein, 720 aa, unidentified
  REGION 1..720: note = Description of Unknown: uncultivated organism sequence
  REGION 1..720: note = Category: MG55 effectors
  REGION 1..720: note = Description: MG55-125 effector
MKIIKRSGTEAVFDISKIIIAINKANHEVVEAERLTADQIKEIAQYIEDSCKDANHALNVEDIQDLVEDQLMDKRAFSVARKYITYRYKRALVRKSNSTDEQILSLIECNNEEVKQENSNKDSTVNSVQRDYMAGEVSKDITRRFLLPEDIVEAHEQGIIHFHDADYFAQHMHNCDLVNLEDMLQNGTVISGTRIDKPHSFSTACNIATQIIAQVASSQYGGQSISLAHLVPFVQISREKIHAELVQTLKESDVELSEEKINSIVERRLHAEIERGVQVIQYQVVTLMTTNGQSPFVTVFMYLNEAKNEQEKKDLAMIIEEVLDQRYQGVKNEDGVWITPAFPKLIYVLEEDNIHEDSEYYYLTKKAAKCTAKRMVPDYISEKKMKELKDGNCYTCMGCRSFLTVYHDEDGKPKFYGRFNQGVVTLNLVDLACSSGGDFEKFWKLFDERLDLCYRALMARHNRLKGTPSDVAPILWQYGALARLKKGETIDKLLYGGYSTISLGYAGLCECTRYMTGKPHTDPAATPFALKVMQRLNDACKEWKEKENIDFSVYGTPLESTTYKFAKCLQKRFGVIPGVTDKNYITNSYHVHVTENIDAFTKLKFESQFQALSPGGAISYVEVPNMQDNLDAVLSVMKFIYENIMYAELNTKSDYCQVCGYDGEIQIVKDDDGKLVWECPHCHNRDQDKMNVARRTCGYIGSQFWNQGRTQEIKERVLHL

SEQ ID NO: 551 - protein, 720 aa, unidentified
  REGION 1..720: note = Description of Unknown: uncultivated organism sequence
  REGION 1..720: note = Category: MG55 effectors
  REGION 1..720: note = Description: MG55-126 effector
MKIIKRSGAEAVFDISKIIIAINKANHEVVEAERLTADQIKEIAQYIEDSCKDANHALNVEDIQDLVEDQLMDKRAFSVARKYITYRYKRALVRKSNSTDEQILSLIECNNEEVKQENSNKDSTVNSVQRDYMAGEVSKDITRRFLLPEDIVAAHEQGIIHFHDADYFAQHMHNCDLVNLEDMLQNGTVISGTRIDKPHSFSTACNIATQIIAQVASSQYGGQSISLAHLVPFVQISREKIHAELVQTLKESDVELSEEKINSIVERRLHAEIERGVQVIQYQVVTLMTTNGQSPFVTVFMYLNEAKNEQEKKDLAMIIEEVLDQRYQGVKNEDGVWITPAFPKLIYVLEEDNIHEDSEYYYLTKKAAKCTAKRMVPDYISEKKMKELKDGNCYTCMGCRSFLTVYHDEDGKPKFYGRFNQGVVTLNLVDLACSSGGDFEKFWKLFDERLDLCYRALMARHNRLKGTPSDVAPILWQYGALARLKKGETIDKLLYGGYSTISLGYAGLCECTRYMTGKPHTDPAATPFALKVMQRLNDACKEWKEKENIDFSVYGTPLESTTYKFAKCLQKRFGVIPGVTDKNYITNSYHVHVTENIDAFTKLKFESQFQALSPGGAISYVEVPNMQDNLDAVLSVMKFIYENIMYAELNTKSDYCQVCGYDGEIQIVKDDDGKLVWECPHCHNRDQDKMNVARRTCGYIGSQFWNQGRTQEIKERVLHL

SEQ ID NO: 552 - protein, 720 aa, unidentified
  REGION 1..720: note = Description of Unknown: uncultivated organism sequence
  REGION 1..720: note = Category: MG55 effectors
  REGION 1..720: note = Description: MG55-127 effector
MKIIKRSGAEAVFDISKIIIAINKANHEVVEAERLTADQIKEIAQYIEDSCKDANHALNVEDIQDLVEDQLMDKRAFSVARKYITYRYKRALVRKSNSTDEQILSLIECNNEEVKQENSNKDSTVNSVQRDYMAGEVSKDITRRFLLPEDIVAAHEQGIIHFHDADYFAQHMHNCDLVNLEDMLQNGTVISGTRIDKPHSFSTACNIATQIIAQVASSQYGGQSISLAHLVPFVQISREKIHAELVQTLKESDVELSEEKINSIVERRLHAEIERGVQVIQYQVVTLMTTNGQSPFVTVFMYLNEAKNEQEKKDLAMIIEEVLDQRYQGVKNEDGVWITPAFPKLIYVLEEDNIHEDSEYYYLTKKAAKCTAKRMVPDYISEKKMKELKEGNCYTCMGCRSFLTVYHDEDGKPKFYGRFNQGVVTLNLVDLACSSGGDFEKFWKLFDERLDLCYRALMARHNRLKGTPSDVAPILWQYGALARLKKGETIDKLLYGGYSTISLGYAGLCECTRYMTGKPHTDPAATPFALKVMQRLNDACKEWKEKENIDFSVYGTPLESTTYKFAKCLQKRFGVIPGVTDKNYITNSYHVHVTENIDAFTKLKFESQFQALSPGGAISYVEVPNMQDNLDAVLSVMKFIYENIMYAELNTKSDYCQVCGYDGEIQIVKDDDGKLVWECPHCHNRDQDKMNVARRTCGYIGSQFWNQGRTQEIKERVLHL

SEQ ID NO: 553 - protein, 720 aa, unidentified
  REGION 1..720: note = Description of Unknown: uncultivated organism sequence
  REGION 1..720: note = Category: MG55 effectors
  REGION 1..720: note = Description: MG55-128 effector
MKIIKRSGAEAVFDISKIIIAINKANHEVVEAERLTADQIKAIAQYIEDSCKDANHALNVEDIQDLVEDQLMDKRAFSVARKYITYRYKRALVRKSNSTDEQILSLIECNNEEVKQENSNKDSTVNSVQRDYMAGEVSKDITRRFLLPEDIVEAHEQGIIHFHDADYFAQHMHNCDLVNLEDMLQNGTVISGTRIDKPHSFSTACNIATQIIAQVASSQYGGQSISLAHLVPFVQISREKIHAELVQTLKESDVELSEEKINSIVERRLHAEIERGVQVIQYQVVTLMTTNGQSPFVTVFMYLNEAKNEQEKKDLAMIIEEVLDQRYQGVKNEDGVWITPAFPKLIYVLEEDNIHEDSEYYYLTKKAAKCTAKRMVPDYISEKKMKELKDGNCYTCMGCRSFLTVYHDEDGKPKFYGRFNQGVVTLNLVDLACSSGGDFEKFWKLFDERLDLCYRALMARHNRLKGTPSDVAPILWQYGALARLKKGETIDKLLYGGYSTISLGYAGLCECTRYMTGKPHTDPAATPFALKVMQRLNDACKEWKEKENIDFSVYGTPLESTTYKFAKCLQKRFGVIPGVTDKNYITNSYHVHVTENIDAFTKLKFESQFQALSPGGAISYVEVPNMQDNLDAVLSVMKFIYENIMYAELNTKSDYCQVCGYDGEIQIVKDDDGKLVWECPHCHNRDQDKMNVARRTCGYIGSQFWNQGRTQEIKERVLHL

SEQ ID NO: 554 - protein, 720 aa, unidentified
  REGION 1..720: note = Description of Unknown: uncultivated organism sequence
  REGION 1..720: note = Category: MG55 effectors
  REGION 1..720: note = Description: MG55-129 effector
MKIIKRSGTEAVFDISKIIIAINKANHEVVEAERLTADQIKEIAQYIEDSCKDANHALNVEDIQDLVEDQLMDKRAFSVARKYITYRYKRALVRKSNSTDEQILSLIECNNEEVKQENSNKDSTVNSVQRDYMAGEVSKDITRRFLLPEDIVEAHEQGIIHFHDADYFAQHMHNCDLVNLEDMLQNGTVISGTRIDKPHSFSTACNIATQIIAQVASSQYGGQSISLAHLVPFVQISREKIHAELVQTLKESDVELSEEKINSIVERRLHAEIERGVQVIQYQVVTLMTTNGQSPFVTVFMYLNEAKNEQEKKDLAMIIEEVLDQRYQGVKNEDGVWITPAFPKLIYVLEEDNIHEDSEYYYLTKKAAKCTAKRMVPDYISEKKMKELKDGNCYTCMGCRSFLTVYHDEDGKPKFYGRFNQGVVTLNLVDLACSSGGDFEKFWKLFDERLDLCYRALMARHNRLKGTPSDVAPILWQYGALARLKKGETIDKLLYGGYSTISLGYAGLCECTRYMTGKPHTDPAAAPFALKVMQRLNDACKEWKEKENIDFSVYGTPLESTTYKFAKCLQKRFGVIPGVTDKNYITNSYHVHVTENIDAFTKLKFESQFQALSPGGAISYVEVPNMQDNLEAVLSVMKFIYENIMYAELNTKSDYCQVCGYDGEIQIVKDDDGKLVWECPHCHNRDQDKMNVARRTCGYIGSQFWNQGRTQEIKERVLHL

SEQ ID NO: 555 - protein, 972 aa, unidentified
  REGION 1..972: note = Description of Unknown: uncultivated organism sequence
  REGION 1..972: note = Category: MG55 effectors
  REGION 1..972: note = Description: MG55-130 effector
MQIGLDIGSTTIKIAVLDDAGQLQFSKYERHYSQIAEKMQQLLAELHIKMPLLKTARLAISGSAGIGIADSCGLQFVQEVFAEKVCTERLNPGTEAVIELGGEDAKLLFLGRHFDARMNDSCAGGTGAFIDQMASLLSVPTEAMNELAQQASTRYTIASRCGVFAKSDIQPLLNQGAAKADLAASIFDAVASQAVTGLAKGRPITGKVLYLGGPLTFMSELRHSFDKILKIEGYCPENSLYYVAMGAAFCAENKVDLTELPAKLAAVGAQRDFDHLEPLFANPAEYDEFMERHSKERIEPGDISAATEAYIGMDAGSTTIKIAVISPSGQLLDSSYQGNKGNPVIAIKEYLQNFYIKYPHCRILGSAVTGYGEDLIRNGFSVDYGIVETMAHFIAAKTLQPDVDFILDIGGQDIKCLKIHNGCIDNIFLNEACSSGCGSFLQTFAEILGYSAEEFARIGLFADKPVDLGSRCTVFMNSSVKQAQKDGATVANISAGLSLSIVKNALYKVIRPGSKESIGKHIVVQGGTFLNDCVLRAFEKEMGLKVVRPNIAGLMGAYGAAIYARSRHQETGHVSTLADAAALENFVHEVKAVTCGLCSNHCHLTVNTFASGKRFISGNRCERPVTHCAPDDTFNLYRQKLQLLESLKGVPGKRGKIGLPMGLNMYELLPFWHAFFTRLGFEVITSPIYDKTIFQKGQNTIPSDTVCYPAKLMHGHIKWLLENGINTIFYPCMTYNVDENSAENCYNCPVVAYYPEVLHANMHDLDNATYIFDYLGLGHKKVLLKKLQQICKEHFPDIGSSELKAALQEAYAAYNKFEAQVKELGQTIINTARSQHKPIVVLAGRPYHIDPKVNHSIDRLITTMGAALVSEDAVSSHISMQELNEDLQVLNQWTYHSRLYAAAKYVSRSSDMYMVHLVSFGCGCDAITADECRRILEEHGQIYTQIKIDDIDNLGAAKIRLRSLFAAAGLES

SEQ ID NO: 556 - protein, 708 aa, unidentified
  REGION 1..708: note = Description of Unknown: uncultivated organism sequence
  REGION 1..708: note = Category: MG55 effectors
  REGION 1..708: note = Description: MG55-131 effector
MRVIKRDGRTVEYDRNKILIAIRKANAEVDTFERVNDDMIDGIVAGIENMKRDTMQVEDIQDIIEQKLMAAGKFDLAKKYIIYRYTRELVRKANTTDDSIMSLLQNSNKDVMEENSNKNAYVASTQRDLIAGEVSKDLTKRILLPEKITKAHEEGVLHFHDMDYFIQPIFNCCLINIGDMLDNGTVMNGKLIESPKSFQVACTVMTQIISAVASSQYGGQSVDTRHLGKYLRKSADKYRKHYTERYAGKIAPDVIEEFVKERVNDELRSGVQTIQYQINTLMTTNGQSPFVTLFLNLDPKDEYIKENAMIIEEILRQRLEGIKNEKGVYVTPAFPKLIYVLDEHNALKGGEYDYITKLAVRCSAKRMYPDYISAKKMRENYEGNVFSCMGCRSFLTPWKDENGNYKFEGRFNQGVVSLNLPQIGILAKGDMEYFWQLLEERLSLCFEALMCRHRALEGVTSDVSPIHWQYGAIARLQKGEKIDKLLHGGYSTISLGYIGLYEVTKLMTGESQTTEKGSQFAKALMNRLRRATDTWKEETGIHFGLYGTPAESLCYRFAEIDKKRFGEIEDVTDKGYYTNSYHVDVREKIDAFSKFEFEAQFQVISSGGAISYVEVPNMQNNLPALEEVVKYIYEHIQYAEFNTKSDYCHVCGYDGEIIINDNLEWECPNCGNKDHDKMNVTRRTCGYLGENFWNVGKTKEINARVLHL

SEQ ID NO: 557 - protein, 723 aa, unidentified
  REGION 1..723: note = Description of Unknown: uncultivated organism sequence
  REGION 1..723: note = Category: MG55 effectors
  REGION 1..723: note = Description: MG55-132 effector
MRIIKRNGSEEDFNIEKIINAVKKANGSGEHKFLTDEQIEDVADYVEYKCNKIRRAVSVEEIQDMVEDQLMAKGAFELARRYVRYRYNRSLVRKANTTDNRILSLIECNNEEVKQENSNKNPTVNSVQRDYMAGEVSRDLTRRMLLPADIVEADKEGIIHFHDSDYFAQHMHNCDLVNLEDMLQNGTVISDTLIERPHSFSTACNIATQIIAQVASNQYGGQSISLAHLAPFVQVSREKIRRETLAEIEELGVHPTEEKINDIVEQRLRKEVNRGVQTIQYQVVTLLTTNGQAPFVTVFMYLNEAKNEQEKHDLAMIIEETLKQRHKGVKNEKGVWITPAFPKLIYVLEEDNITEDSKYWYLTELAAKCTAKRMVPDYISEKVMLQSKIDKNGEGHCFTCMGCRSFLTPYVDENGKPKYYGRFNQGVVTVNLIDIGLSAGKDLDKFWKIFDERMELCHRALQCRHERLTGTLSDAAPILWQYGALARLKKGEKIDKLLHGGYSTLSLGYAGLWECVYSLIGKKLTEKEGKELGLEIMQKLNDYCAKWKKEEDIDYSIYGTPLESTTYKFAKCLQKRFGIIKGVTDKNYITNSYHVHVTENIDAFSKLKLESEFQALSPGGAISYVEVPNMQDNIPAVLQVIKFIYDNIMYAELNTKSDYCQVCGYDGEIKIVHDDGKLVWECPNCGNRDQDKMNVARRTCGYIGTQFWNQGRTQEIEERVLHL

SEQ ID NO: 558 - protein, 708 aa, unidentified
  REGION 1..708: note = Description of Unknown: uncultivated organism sequence
  REGION 1..708: note = Category: MG55 effectors
  REGION 1..708: note = Description: MG55-133 effector
MKVIKRDGSTADFDSSKIIVAIQKANQVVEPEDRIDQERIEAIAHYVESKNRMRLLVEDIQDMVEHQLMDEGKFNLAKSYIIYRYTRALVRKANTTDESILSLIRNSNKDVMEENSNKNAVMASTQRDLIAGEVSKDLTRRLILPEKISKAHDEGAIHFHDADYFVQPIFNCCLINVSDMLDNGTVMNGKLIESPKSFQVACTVMTQIIASVASSQYGGQSVDIRHLGKYLRRSYEKFKLTIKAEVGDSVADEVVERLTKRRLQDELRSGVQTIQYQINTLMTTNGQSPFVTIFLNLQADDEYLEENAMIVEEILRQRLEGIKNDKGVFVTPAFPKLVYVLDEHNCLKGGKYDYITKLAVKCSAKRLYPDYISAKKMRENYEGNVFAPMGCRSFLAAWKDDEGNYKFEGRFNQGVVSLNLPQVAILAHGDEEKFWPLLDERLQLCYEALMCRHNSLKGIRSDVSPVHWQYGAIARLEKGEVIDKYLEKGYSTISLGYIGLYEMTKLMKDVSHTTPEGEEFALRVMKYLRAACDKWKKETGLGFALYGTPAESLCYRFARIDKERFGTIADVTDKGYYTNSYHVDVREDIDAFSKFNFESQFQRISSGGAISYVEIPNMRHNLEAMEDVVRFIYDNIQYAEFNTKSDYCHVCGFDGEIIINDDLEWECPNCGNKNQTLMNVTRRTCGYLGENFWNVGKTKEIKSRVLHL

SEQ ID NO: 559 - protein, 1416 aa, unidentified
  REGION 1..1416: note = Description of Unknown: uncultivated organism sequence
  REGION 1..1416: note = Category: MG55 effectors
  REGION 1..1416: note = Description: MG55-134 effector
MKLDFNTLGIDIGSTTVKIAILNKDGEIIFSDYQRHYANIQETLAKIIDEAYEEFGDIPVSPMITGSGGLTLSKHMEIPFVQEVVAVATSLKDYAPRTDVAIELGGEDAKIIYFTGGIDQRMNGICAGGTGSFIDQMATLLKTDAAGLNEYAKNYKAIYPIAARCGVFAKTDIQPLINEGATKEDLSASIFQAVVNQTISGLACGKPIKGNVAFLGGPLHFLTELKQAFIRTLGLEGDAIIAPEHSHLFAASGAAMNAHADVQSSLGELKEKLSHKIELEFEVTRMEPLFASEKEYEDFTERHNKHNVRKGDFASYKGDLFLGIDAGSTTTKVAVIGDDGSLLYSFYSSNNGSPLKTALKAMKDIYSKMPEGARIVRSCSTGYGEALLKSALLLDEGEVETVAHYTAAAFFDPNVDCILDIGGQDMKCIKIKNNSVDKVQLNEACSSGCGSFIETFAKSLNYEVADFAKIALFAENPIDLGSRCTVFMNSKVKQAQKEGASVADISAGLAYSVIKNALLKVIKLTDPKDLGKQVVVQGGTFYNDAVLRSFERISGCEAIRPDIAGIMGAFGAALIAKDRYTGQKSTMLSFKEINELRFKTSMTRCQGCINHCLLTVNEFTGDRKFISGNRCEKGLGLEKNKEQIPNLFEYKNERVFRHYKPLKKADAPRGVVGIPRVLNMYENYPFWFTFFTKLGYSVKLSPVSSRKIYELGIESIPSESECYPAKLAHGHVTWLIRQGLEYIFYPCIPYERVEVPDAGNHYNCPIVTSYGENIKNNIEELRDDKIKYQNPFISLESEEILTKRLVDFFRKENGIPAAEIKAAAHEGWLEMQAVREDMTKKGKEVLQYLKETGRHGIVLAGRPYHSDPEINHGIPDLITSYGVAVLTEDSISELSEVDRPTIVMDQWMYHSRLYKAASFVAKNDNLDLIQLNSFGCGLDAVTTDQVNDILTKQNKIYTVLKIDEVNNLGAARIRIRSLLAAVKDRERKKIEAKRVDTAHHRVIFTEQMRKDYTILVPDMSPIHFEILESALASCGYNVEVLKADSKCIDYGLKYVNNDACYPSLIVVGQFMQALLSGKYDLHKVALIITQTGGGCRATNYIGFIRRALEKAGMGYIPVISMSAGIEKNPGLKVNLEMANKALQALIYGDVFMRVLYKTRPYEKVKGSANALHEKWKKIAIESVKKANKKQFKKNIQNIVKEFDELELVDIKKPKVGIVGEILVKFMPLANNFIVELLEEEGAEAVCPDLIDFFMYSLYNANFKAEYLGKKKSSAKINNFLIWFIERYRKCANDALAASKRFHPTVPIQKLAEYASPIVSCGNQTGEGWFLTGEMIELIKSGVPNIVCTQPFGCLPNHVVGKGVIKELRHQYPDSNIVAVDYDPGASEVNQLNRIKLMLSTAGKNLIAESKDNEETA

SEQ ID NO: 560 - protein, 972 aa, unidentified
  REGION 1..972: note = Description of Unknown: uncultivated organism sequence
  REGION 1..972: note = Category: MG55 effectors
  REGION 1..972: note = Description: MG55-135 effector
MQIGLDIGSTTIKIAVLDDAGQLQFSKYERHYSQIAEKMQQLLAELHVKMPLLKTARLAISGSAGIGIADSCGLQFVQEVFAEKVCTERLNPGTEAVIELGGEDAKLLFLGRHFDARMNDSCAGGTGAFIDQMASLLSVPTEAMNELAQQASTRYTIASRCGVFAKSDIQPLLNQGAAKADLAASIFDAVASQAVTGLAKGRPITGKVLYLGGPLTFMSELRHSFDKILKIEGYCPENSLYYVAMGAAFCAENKVDLTELPAKLAAVGAQRDFDHLEPLFASTAEYDEFMERHSKERIEPGDISAATEAYIGMDAGSTTIKIAVISPSGQLLDSSYQSNKGNPVIAIKEYLQNFYIKYPHCRILGSAVTGYGEDLIRNGFSVDYGIVETMAHFIAAKTLQPDVDFILDIGGQDIKCLKIHNGCIDNIFLNEACSSGCGSFLQTFAEILGYSAEEFARIGLFADKPVDLGSRCTVFMNSSVKQAQKDGATVANISAGLSLSIVKNALYKVIRPGSKESIGKHIVVQGGTFLNDCVLRAFEKEMGLKVVRPNIAGLMGAYGAAIYARSRHQETGHASTLADAAALENFVHEVKAVTCGLCSNHCHLTVNTFASGKRFISGNRCERPVTHCAPDDTFNLYRQKLQLLESLKGVPGKRGKIGLPMGLNMYELLPFWHAFFTRLGFEVITSPIYDKTIFQKGQNTIPSDTVCYPAKLMHGHIKWLLENGINTIFYPCMTYNVDENSAENCYNCPVVAYYPEVLHANMHDLDNATYIFDYLGLGHKKVLLKKLQQICKEHFPDIGSSELKAALQEAYAAYNKFEAQVKELGQTIINTARSQHKPIVVLAGRPYHIDPKVNHSIDRLITTMGAALVSEDAVSSHISMQELNDDLQVLNQWTYHSRLYAAAKYVSRSSDMYMVHLVSFGCGCDAITADECRRILEDHGQIYTQIKIDDIDNLGAAKIRLRSLFAAAGLES

SEQ ID NO: 561 - protein, 978 aa, unidentified
  REGION 1..978: note = Description of Unknown: uncultivated organism sequence
  REGION 1..978: note = Category: MG55 effectors
  REGION 1..978: note = Description: MG55-136 effector
MRVGLDIGSTTIKCVVLDDADKIVYSTYERHYSHILEKGQELLRRVAEQYLPGGRALLAISGSAGMGLADSCQVPFVQEVFATRVAANRLAPGTDCIIELGGEDAKILFLTHGTEVRMNGSCAGGTGAFIDQMATLLKMSADEMDKAAQGAQRTYTIASRCGVFAKSDIQPLINQGAQAGDIAASIYQAVVNQTIAGLAQGRPIEGKVLYLGGPLTFSSVLRQSFDNTLHLKGTCPENSLLYVALGAAFYADQECDLNAVIDRLGRYSATATYVSLPPLFATKQEYEEFHARHMKAAVPCVPFGAECGPVHIGIDSGSTTIKLAVIDQNDNILFTSYQPNLGNPIPLVRKVLTDLYKNHPNLEIASVTTTGYGEELVKNAFHCDRGLVETVAHFTAAKHFMPNVDFIIDIGGQDMKCFKIEDGAISNIFLNEACSSGCGSFLQTFAQALGYDVKKFAALGLFADRPVDLGSRCTVFMNSSVKQAQKDGATIENISAGLSISVVKNALYKVIRASSPEELGRNIVVQGGTFYNEAVLRAFEKEMGVEVIRPDIAGLMGAYGAALFGKAHARPGARSTVLTLPELEAFTQKVNTVQCQGCGNHCQLTVNIFADGKRFISGNRCDKPVTGKATDEDLDLYAYKLGLLLDYKPQNLENSRGTIGLPLCLNMYELLPFWHTLFTRLGFTVKTSPVSSRALYQEGQATIPSDTACFPAKLAHGHIAELVKMGVDAVFYPCMSYNVDEHLGDNHYNCPVVAYYPEVLAGNCHELANTTFIYDYLNLARRKDFTRRFPAVLDKYFPGLPRKAVAAAIDAAYAEYARHMEQVRAKGAEIIARARAEGRHIIVLAGRPYHVDPEVNHGIDKLIVRQGAAVVTEDAVSHLVERFPTSVLNQWTYHSRLYAAAKYCTTQPDMDLVQLVSFGCGLDAITTDETREILQEGGKLYTQLKIDEITNLGAVNIRLRSLFAALEERREEAEKRRN

SEQ ID NO: 562 - protein, 723 aa, unidentified
  REGION 1..723: note = Description of Unknown: uncultivated organism sequence
  REGION 1..723: note = Category: MG55 effectors
  REGION 1..723: note = Description: MG55-137 effector
MRIIKRNGSEEDFNIEKIINAVKKANGSGEHKFLTDEQIEDVADYVEYKCNKIRRAVSVEEIQDMVEDQLMAKGAFELARRYVRYRYNRSLVRKANTTDNRILSLIECNNEEVKQENSNKNPTVNSVQRDYMAGEVSRDLTRRMLLPADIVEADKEGIIHFHDSDYFAQHMHNCDLVNLEDMLQNGTVISDTLIERPHSFSTACNIATQIIAQVASNQYGGQSISLAHLAPFVQVSREKIRRETLAEIEELGVHPTEEKINDIVEQRLRKEVNRGVQTIQYQVVTLLTTNGQAPFVTVFMYLNEAKNEQEKHDLAMIIEETLKQRHKGVKNEKGVWITPAFPKLIYVLEEDNITEDSKYWYLTELAAKCTAKRMVPDYISEKVMLQSKIDKNGEGHCFTCMGCRSFLTPYVDENGKPKYYGRFNQGVVTVNLIDIGLSAGKDLDKFWKIFDERMELCHRALQCRHERLTGTLSDAAPILWQYGALARLKKGEKIDKLLHGGYSTLSLGYAGLWECVYSLIGKKLTEKEGKELGLEIMQKLNDYCAKWKKAENIDYSLYGTPLESTTYKFAKCLQKRFGIIKGVTDKNYITNSYHVHVTENIDAFSKLKLESEFQALSPGGAISYVEVPNMQDNIPAVLQVIKFIYDNIMYAELNTKSDYCQVCGYDGEIKIVHDDGKLVWECPNCGNRDQDKMNVARRTCGYIGTQFWNQGRTQEIEERVLHL

SEQ ID NO: 563 - protein, 720 aa, unidentified
  REGION 1..720: note = Description of Unknown: uncultivated organism sequence
  REGION 1..720: note = Category: MG55 effectors
  REGION 1..720: note = Description: MG55-138 effector
MKIIKRSGTEAVFDISKIIIAINKANHEVVEAERLTADQIKEIAQYIEDSCKDANHALNVEDIQDLVEDQLMDKRAFSVARKYITYRYKRALVRKSNSTDEQILSLIECNNEEVKQENSNKDSTVNSVQRDYMAGEVSKDITRRFLLPEDIVAAHEQGIIHFHDADYFAQHMHNCDLVNLEDMLQNGTVISGTRIDKPHSFSTACNIATQIIAQVASSQYGGQSISLAHLVPFVQISREKIHAELVQTLKESDVELSEEKINSIVERRLHAEIERGVQVIQYQVVTLMTTNGQSPFVTVFMYLNEAKNEQEKKDLAMIIEEVLDQRYQGVKNEDGVWITPAFPKLIYVLEEDNIHEDSEYYYLTKKAAKCTAKRMVPDYISEKKMKELKDGNCYTCMGCRSFLTVYHDEDGKPKFYGRFNQGVVTLNLVDLACSSGGDFEKFWKLFDERLDLCYRALMARHNRLKGTPSDVAPILWQYGALARLKKGETIDKLLYGGYSTISLGYAGLCECTRYMTGKPHTDPAATPFALKVMQRLNDACKEWKEKENIDFSVYGTPLESTTYKFAKCLQKRFGVIPGVTDKNYITNSYHVHVTENIDAFTKLKFESQFQALSPGGAISYVEVPNMQDNLDAVLSVMKFIYENIMYAELNTKSDYCQVCGYDGEIQIVKDDDGKLVWECPHCHNRDQDKMNVARRTCGYIGSQFWNQGRTQEIKERVLHL

SEQ ID NO: 564 - protein, 1438 aa, unidentified
  REGION 1..1438: note = Description of Unknown: uncultivated organism sequence
  REGION 1..1438: note = Category: MG55 effectors
  REGION 1..1438: note = Description: MG55-139 effector
MNKILHVGLDVGSTTVKIIVMDDNQNLIYENYQRHFSDTKNTVCQVLSDFANKYPDYVYTIALTGSGAMSATKFLDLPFIQEVVACKRAVEKYIPQTDVVIELGGEDAKIIYFGKSIEQRMNGTCAGGTGAFIDQMASLLNTDAAGLNELAKNYKMIYPIASRCGVFAKTDVQPLINEGANKEDIAASIFQAVVNQTISGLACGRPIRGNIAFLGGPLNYLSELRNRFIETLNLDDNSAIIPQDAHLLVAKGAALDSVNNSAISNEKLKAKIEVLKASHDTTSTPLAPLFVTNAEYEAFKERHDKDTVPKKDLKTYKGDCFIGIDAGSTTTKLVVTDCDDNLLYSLYQSNEGNPLKSVINMLKELYEIIPQTATIRYSGVTGYGEQLIQSALNVDLNEIETIAHYTAAKRFMPNVTSIVDIGGQDMKYIKIKNGTINNIMLNEACSSGCGSFIETFAKSLNISINDFVESALDSRSPVDLGSRCTVFMNSKIKQAQKEGATVGDISAGLSYSVIKNAIQKVMKVRDISTLGDHIVVQGGTFYNDAVLRAFELIVGKDVVRPDIAGLMGAYGVAILARKQYEANLDMEYISKLSTLDEIENLQIETSHVRCGGCENHCLLTINKFNNGQKHISGNRCEKGAGITSKSKDLPNIYKYKNERLFSYKPLSEKSAIRGTIGIPRVLNMYEDYPFWFTFLTNLGFRVIISEKSTRKTYEKGMESMPSESVCYPAKLAHGHIMSLINQGIKTIFYPCIPYSRKEYKQADNHYNCPIVISYSEVLKNNVEELKNVKFLNPFLPFEPKKLAEAILSLPEFDEYHFTKKELIKAAQEAEKEYQNFKTDIRNKGQEALNYMKENNLRGIVLAGRPYHVDPEINHGIDTLITSLGLCVLSEDSISNQVTLDKKLRVVNQWVYHSRLYAAADFVGRHANLELVQLNSFGCGVDAVTTDQVEEILSSYDKMYTLIKIDEVNNLGAVRIRIRSLLASMNKRIEKNSNNSDSLGNYELQRKIFTKEMRNDYTILIPQMAPIHFELLESAVQACGYNVHLLRECTPHTVEVGLKYVNNDACYPSILTTGQMIEALESGKYDLNKTALIMSQTGGGCRATNYIGFIRKALKDAGYSDIPVISFNVVGMEKMPGFKLSPKMAEGLLKSVVYGDLLQKMLTKNRAYEKNKGETQKKYEYWLEKCKKLVSKSSLKEFNQSIYDMVNDFEKIELDTTVEKPKVGIVGEVLIKYHPFGNNFVADKLEQEGAEVILPDFMGFIKFIATHKITFNQLIKTDSGKAKIFKFAIKLIDLLEKNEINALKNSKKGYLLPCNIFELEENVKDILSIGNQTGEGWFLTAEMVEYMQHDIPNIVCVQPFACLPNHVVGKGVIKTIRDKYPEANIAAIDYDPGASEANQTNRIKLLMAVAKDNLKIKNSKNKLLLKENNKINSKNKIYQ

SEQ ID NO: 565 - protein, 708 aa, unidentified
  REGION 1..708: note = Description of Unknown: uncultivated organism sequence
  REGION 1..708: note = Category: MG55 effectors
  REGION 1..708: note = Description: MG55-140 effector
MKVIKRDGSTADFDSSKIIVAIQKANQVVEPEDRIDQERIEAIAHYVESKNRMRLLVEDIQDMVEHQLMDEGKFNLAKSYIIYRYTRALVRKANTTDESILSLIRNSNKDVMEENSNKNAVMASTQRDLIAGEVSKDLTRRLILPEKISKAHDEGAIHFHDADYFVQPIFNCCLINVGDMLDNGTVMNGKLIESPKSFQVACTVMTQIIASVASSQYGGQSVDIRHLGKYLRRSYEKFKLTIKAEVGDSVADEVVERLTKRRLQDELRSGVQTIQYQINTLMTTNGQSPFVTIFLNLQADDEYLEENAMIVEEILRQRLEGIKNDKGVFVTPAFPKLVYVLDEHNCLKGGKYDYITKLAVKCSAKRLYPDYISAKKMRENYEGNVFAPMGCRSFLAAWKDDEGNYKFEGRFNQGVVSLNLPQVAILAHGDEEKFWPLLDERLHLCYEALMCRHNSLKGIRSDVSPVHWQYGAIARLEKGEVIDKYLEKGYSTISLGYIGLYEMTKLMKDVSHTTPEGEEFALRVMKYLRAACDKWKKETGLGFALYGTPAESLCYRFARIDKERFGTIADVTDKGYYTNSYHVDVREDIDAFSKFNFESQFQRISSGGAISYVEIPNMRHNLEAMEDVVRFIYDNIQYAEFNTKSDYCHVCGFDGEIIINDDLEWECPNCGNKNQTLMNVTRRTCGYLGENFWNVGKTKEIKSRVLHL

SEQ ID NO: 566 - protein, 724 aa, unidentified
  REGION 1..724: note = Description of Unknown: uncultivated organism sequence
  REGION 1..724: note = Category: MG55 effectors
  REGION 1..724: note = Description: MG55-141 effector
MKIIKRNGAEENFDISKIIMAVTKANAAVEESARMTPRQIQRIAESVELACQELGRSAAVEEIQDMVEKQIMAHGAFEVAKAYITYRYTRSLVRRANTTDDRILSLIECNNEEAKQENSNKNPIVNSTQRDYMAGEVSRDITNRILLPKDIVEAHEEGIIHFHDADYYAQHMHNCDLVNLEDMLQNGTVITGTLIERPHSFSTACNIATQIIAQVASNQYGGQSISLTHLAPFVQVSRERIRREVAAEMQAIDAHPGEEKLAELVENRVREEIRRGVQTIQYQVVTLLTTNGQAPFVTVFMYLGEAKNEQERHDLAMIIEETLRQRYQGVKNEKGVWVTPAFPKLIYVLEEDNIHEDSPYWYLTELAARCTAKRMVPDYISEKKMLELKVDKNGEGHCYTCMGCRSFLTPYVDENGKPKYYGRFNQGVVTINLPDVALSSGGNMEKFWQIFDERLELCHRALMCRHERLKGTLSDAAPILWQYGALARLKKGEPIDKLLYGGYSTISLGYAGLYECVKYMTGKSHTDPSATPFALEVMQHMNDACKHWKQMHNIDFSLYGTPLESTTYKFAKCLQQRFGIIPGVTDKGYITNSYHIHVTENIDAFSKLAFESKFQALSPGGAISYVEVPNMQNNIPAVLEVMKFIYDNIMYAELNTKSDYCQVCGFDGEIEIVEHDGKLIWRCPNCGNTDQDKMNVARRTCGYIGTQFWNQGRTQEIKERVLHL

SEQ ID NO: 567 - protein, 1005 aa, unidentified
  REGION 1..1005: note = Description of Unknown: uncultivated organism sequence
  REGION 1..1005: note = Category: MG55 effectors
  REGION 1..1005: note = Description: MG55-142 effector
MSEIKLQQKAAYTLGIDVGSTTVKTVILDADHHVLHSTYQRHFSKVKEAVSEQLQAIIKEHPATLFSVHMTGSAGLGLATAAKIPFVQEVHAAFLAVKERYPEADAVIELGGEDAKIIFLTGGVEQRMNGSCAGGTGAFIDQMATLLDVTVDELDQMALQADRTYPIAARCGVFAKSDIQPLLNQGAKRENVAASIYQAVVDQTVSGLAQGRKIQGYVLFLGGPLSFLQGLRNAFMQTLHLDAEHAIFPVDGRTFVAYGCALAAENSADKPVTGEALLKQIESAETNHTVIADKPLFGYQEEYDRFRERHAQNDVVHGDLHTYQGNAYLGVDAGSTTTKVALIGEDNSLLYSFYETNKGQPLECVKRALETLYQKKNPNLKICGSAVTGYGEEMLKAGLGIDFGIVETVAHFRAAAFFCPDVDFIIDIGGQDIKCFQIKNGAIDSIMLNEACSSGCGSFIQAFANALGYDVAEFAKLGLFAERPVDLGSRCTVFMNSSVKQAQKDGATVADISAGLSGSIVKNAIYKVIRAKSPEDLGKHIVVQGGTFLNDAVLRCFEREMGRDVIRPAISGLMGAFGAAIYAKEHTSGSSTLLSLMDLHTLTYRTQNTTCNGCTAHCNLQILRFSNGKRFIAGNRCERGAGVSKKDQIPNLVDWKYETLRSLTDRQPEQPKATVGLPMALHYYDQLPLWHTFFTDLGFAVKLSEESTRKTYYKGQSTIPSDTVCYPAKLAHGHIESLLEQNVDFIFYPCMTYNLDEGDSDNHYNCPVVAYYPELLLANNEKLNEQNFLHPFLDLNRRKHLITVLYACLSDYATKKEIAAALEHGFAALEQYHNQIAQTAQEIVRQARAAGKTILVLAGRPYHIDPEINHGIHKLISSLGMAVITEDSIAGLAHTPELQALNQWTYHSRMYRAAQYVTTQPDFQLVQLVSFGCGIDAITTDEVRRILEQSGKLYTQLKIDEISNLGAAKIRLRSLKAAIGADVPPKPTAAPSEVAPKNEKEPVSV

SEQ ID NO: 568 - protein, 972 aa, unidentified
  REGION 1..972: note = Description of Unknown: uncultivated organism sequence
  REGION 1..972: note = Category: MG55 effectors
  REGION 1..972: note = Description: MG55-143 effector
MQIGLDIGSTTIKIAVLDDAGQLQFSKYERHYSQIAEKMQQLLAELHVKMPLLKTARLAISGSAGIGIADSCGLQFVQEVFAEKVCTERLNPGTEAVIELGGEDAKLLFLGRHFDARMNDSCAGGTGAFIDQMASLLSVPTEAMNELAQQASTRYTIASRCGVFAKSDIQPLLNQGAAKADLAASIFDAVASQAVTGLAKGRPITGKVLYLGGPLTFMSELRHSFDKILKIEGYCPENSLYYVAMGAAFCAENKVDLTELPAKLAAVGAQRDFDHLEPLFASTAEYDEFMERHSKERIEPGDISAATEAYIGMDAGSTTIKIAVISPSGQLLDSSYQSNKGNPVIAIKEYLQNFYIKYPHCRILGSAVTGYGEDLIRNGFSVDYGIVETMAHFIAAKTLQPDVDFILDIGGQDIKCLKIHNGCIDNIFLNEACSSGCGSFLQTFAEILGYSAEEFARIGLFADKPVDLGSRCTVFMNSSVKQAQKDGATVANISAGLSLSIVKNALYKVIRPGSKESIGKHIVVQGGTFLNDCVLRAFEKEMGLKVVRPNIAGLMGAYGAAIYARSRHQETGHASTLADAAALENFVHEVKAVTCGLCSNHCHLTVNTFASGKRFISGNRCERPVTHCAPDDTFNLYRQKLQLLENLKGVPGKRGKIGLPMGLNMYELLPFWHAFFTRLGFEVITSPIYDKTIFQKGQNTIPSDTVCYPAKLMHGHIKWLLENGINTIFYPCMTYNVDENSAENCYNCPVVAYYPEVLHANMHDLDNATYIFDYLGLGHKKVLLKKLQQICKEHFPDIGSSELKAALQEAYAAYNKFEAQVKELGQTIINTARSQHKPIVVLAGRPYHIDPKVNHSIDRLITTMGAALVSEDAVSSHVSMQELNDDLQVLNQWTYHSRLYAAAKYVSRSSDMYMVHLVSFGCGCDAITADECRRILEEHGQIYTQIKIDDIDNLGAAKIRLRSLFAAAGLES

SEQ ID NO: 569 - protein, 720 aa, unidentified
  REGION 1..720: note = Description of Unknown: uncultivated organism sequence
  REGION 1..720: note = Category: MG55 effectors
  REGION 1..720: note = Description: MG55-144 effector
MKIIKRSGTEAVFDISKIIIAINKANHEVVEAERLTADQIKEIAQYIEDSCKDANHALNVEDIQDLVEDQLMDKRAFSVARKYITYRYKRALVRKSNSTDEQILSLIECNNEEVKQENSNKDSTVNSVQRDYMAGEVSKDITRRFLLPEDIVEAHEQGIIHFHDADYFAQHMHNCDLVNLEDMLQNGTVISGTRIDKPHSFSTACNIATQIIAQVASSQYGGQSISLAHLVPFVQISREKIHAELVQTLKESDVELSEEKINSIVERRLHAEIERGVQVIQYQVVTLMTTNGQSPFVTVFMYLNEAKNEQEKKDLAMIIEEVLDQRYQGVKNEDGVWITPAFPKLIYVLEEDNIHEDSEYYYLTKKAAKCTAKRMVPDYISEKKMKELKDGNCYTCMGCRSFLTVYHDEDGKPKFYGRFNQGVVTLNLVDLACSSGGDFEKFWKLFDERLDLCYRALMARHNRLKGTPSDVAPILWQYGALARLKKGETIDKLLYGGYSTISLGYAGLCECTRYMTGKPHTDPAATPFALKVMQRLNDACKEWKEKENIDFSVYGTPLESTTYKFAKCLQKRFGVIPGVTDKNYITNSYHVHVTENIDAFTKLKFESQFQALSPGGAISYVEVPNMQDNLEAVLSVMKFIYENIMYAELNTKSDYCQVCGYDGEIQIVKDDDGKLVWECPHCHNRDQDKMNVARRTCGYIGSQFWNQGRTQEIKERVLHL

SEQ ID NO: 570 - protein, 1416 aa, unidentified
  REGION 1..1416: note = Description of Unknown: uncultivated organism sequence
  REGION 1..1416: note = Category: MG55 effectors
  REGION 1..1416: note = Description: MG55-145 effector
MKLDFNTLGIDIGSTTVKIAILNKDGEIIFSDYQRHYANIQETLAKIIDEAYEEFGDIPVSPMITGSGGLTLSKHMEIPFVQEVVAVATSLKDYAPRTDVAIELGGEDAKIIYFTGGIDQRMNGICAGGTGSFIDQMATLLKTDAAGLNEYAKNYKAIYPIAARCGVFAKTDIQPLINEGATKEDLSASIFQAVVNQTISGLACGKPIKGNVAFLGGPLHFLTELKQAFIRTLGLEGDAIIAPEHSHLFAASGAAMNAHADVQSSLGELKEKLSHKIELEFEVTRMEPLFASEKEYEDFTERHNKHNVRKGDFASYKGDLFLGIDAGSTTTKVAVIGDDGSLLYSFYSSNNGSPLKTALKAMKDIYSKMPEGARIVRSCSTGYGEALLKSALLLDEGEVETVAHYTAAAFFDPNVDCILDIGGQDMKCIKIKNNSVDKVQLNEACSSGCGSFIETFAKSLNYEVADFAKIALFAENPIDLGSRCTVFMNSKVKQAQKEGASVADISAGLAYSVIKNALLKVIKLTDPKDLGKQVVVQGGTFYNDAVLRSFERISGCEAIRPDIAGIMGAFGAALIAKDRYTGQKSTMLSFKEINELRFKTSMTRCQGCINHCLLTVNEFTGDRKFISGNRCEKGLGLEKNKEQIPNLFEYKNERVFRHYKPLKKADAPRGVVGIPRVLNMYENYPFWFTFFTKLGYSVKLSPVSSRKIYELGIESIPSESECYPAKLAHGHVTWLIRQGLEYIFYPCIPYERVEVPDAGNHYNCPIVTSYGENIKNNIEELRDDKIKYQNPFISLESEEILTKRLVDFFRKENGIPAAEIKAAAHEGWLEMQAVREDMTKKGKEVLQYLKETGRHGIVLAGRPYHSDPEINHGIPDLITSYGVAVLTEDSISELSEVDRPTIVMDQWMYHSRLYKAASFVAKNDNLDLIQLNSFGCGLDAVTTDQVNDILTKQNKIYTVLKIDEVNNLGAARIRIRSLLAAVKDRERKKIEAKRVDTAHHRVIFTEQMRKDYTILVPDMSPIHFEILESALASCGYKVEVLKADSKCIDYGLKYVNNDACYPSLIVVGQFMQALLSGKYDLHKVALIITQTGGGCRATNYIGFIRRALEKAGMGYIPVISMSAGIEKNPGLKVNLEMANKALQALIYGDVFMRVLYKTRPYEKVKGSANALHEKWKKIAIESVKKANKKQFKKNIQNIVKEFDELELVDIKKPKVGIVGEILVKFMPLANNFIVELLEEEGAEAVCPDLIDFFMYSLYNANFKAEYLGKKKSSAKINNFLIWFIERYRKCANDALAASKRFHPTVPIQKLAEYASPIVSCGNQTGEGWFLTGEMIELIKSGVPNIVCTQPFGCLPNHVVGKGVIKELRHQYPDSNIVAVDYDPGASEVNQLNRIKLMLSTAGKNLIAESKDNEETA

SEQ ID NO: 571 - protein, 1439 aa, unidentified
  REGION 1..1439: note = Description of Unknown: uncultivated organism sequence
  REGION 1..1439: note = Category: MG55 effectors
  REGION 1..1439: note = Description: MG55-146 effector
MIKTLHVGLDVGSTTVKIIVMDENLNTIYTDYKRHFSDTKNTICNVLENLIIMYPDTEFTIALTGSGAISAAKFLDLPFIQEVVSCKRAVEKYIPETDVVIELGGEDAKIIYFDKFIEQRMNGTCAGGTGAFIDQMASLLNTDPTGLNELAKSHKLIYPIASRCGVFAKTDIQPLLNEGAAKEDIAASIFQAVVNQTISGLACGRPIRGNVAFLGGPLNYLSELRNRFIETLNLKDNEIIVPNEAHLLVAKGAALDSLNSHTITIEKLKSKIEVLKSSHDDTSNPLNPLFSIDAEYDEFKKRHEKDKVKRADFKTFKGNCFLGIDAGSTTTKLVVISEDGTLLYSLYGSNEGNPLQSVINMLKKLYAEKPSEAIIRFSGVTGYGEKLIQTALNVDLNEIETIAHYTAAKEFMPNVTSIVDIGGQDMKYIKMKNGAIDNIMLNEACSSGCGSFIETFAKSLGLSIQDFVQSALEARRPVDLGSRCTVFMNSKIKQAQKEGYSVGDISAGLSYSVIKNAIQKVMKVRDVKKLGAHIVVQGGTFYNDAVLRAFELIVGRNVVRPDIAGLMGAYGVALLAKEQYENNLDMDYVSSISNINELDKLEINITHIRCQGCENHCLLTINKFSNGTKYISGNRCEKGAGIVDKTLDRPNLIKYKFERTFNYTPLEEKNAPRGTIGIPRVLNMYEDYPFWFTFLTNLGFRVILSEKSNRKTYEKGMESMPSESVCFPAKLSHGHIIGLINSGIKTIFYPCIPYSRKEYQKADNHYNCPIVISYSEVLKNNVEELKDKNIKFLNPFLPFEPDKLAEIIMNLPEFKEYNFTKKELLSAAKKAETEYQNYKSDIHNKGQETLKFMEENNLKGIVLAGRPYHVDPEVNHGIDTLITSLGLCVLTEDSISNLTEAKRPLRVVDQWVFHARLYAAADFVGKHDNLELVQLNSFGCGVDAVTTDQVEEILTSYEKMYTLIKIDEINNLGAIRIRIRSLLASMNKRIKDNNSSMCNGNYEVNKKIFTKEMRKDYTILMPQMAPIHFEFLESAMKNSGYKMELLKDCTQHTVETGLKYVNNDACYPSILVTGQMIEALESGKYDLNKTALIMSQTGGGCRATNYIGFIRKALKDAGFENVPVISFNVVGMEKMPGFKLTIPLIERLIKSCIYADLLQKMLTKNRAYEINKGKTKELFDYWMEKCKKLVNKSSIKEFKQSIFDIVSDFEKIEIDTSVIKPKVGIVGEVLIKYHPFGNNFVADKLEQEGAEVILPDFMGFIKFIATHKITFNKLIKTDAIKAKLFKTAIKLIDLLEKPVISALNNSKKGYLLPCNIWDLEEKVNDILSIGNQTGEGWFLTAEMIEYIEHDIPNIVCVQPFACLPNHVVGKGVIKTIRSKFPEANIAPIDYDPGASEANQTNRIKLMMTVAKDNLKNKNNINKAIKKENYIIDEKNKISN

SEQ ID NO: 572 - protein, 727 aa, unidentified
  REGION 1..727: note = Description of Unknown: uncultivated organism sequence
  REGION 1..727: note = Category: MG55 effectors
  REGION 1..727: note = Description: MG55-147 effector
MKVIKRDGHMVDYCPEKIEQAIMKANNEVEEEDQASSTQIKNIIKYIEKLGKKRILVEDIQDIIEMKLMSQGKYELAKHYITYRYTRELVRRSNTTDQSIKELIDGESEYWNTENSNKNAKVVTTQRDYLAGITSTDITRRFLLPEDIVEAHDAGIIHFHDADYFAQNALHNCDLVNLEDMLQNGTSINGVMIEKPHRFLTAMTIATQIITAVSSSQYGGVTITLTHLAPFVRESYNRYLDKYKKRKLSKEQCEKFAMEDTKKEIVDGVQTFQYQVNSMTTTNGQAPFLSVCMYLGETTEYKEELSWIIEEFLKQRILGMKNEQGVYITPAFPKLLYVLEEDNINKNGKYYYLTKLAAECTAKRMVPDYISEKIMKELKIDKNGNGNCYPCMGCRSFLTPYVDENGKPKYYGRFNQGVVTINLVDAALSSDKDMDTFWQIFEERLELCHKALQIRHKRLSKATSDVAPILWQHGALARLKKGESIHELLHNGYSTISLGYAGLYECVKYMTGHSHTDNGKGKEFALEVMEKMNAKCKEWKEVENIDYSVYGTPIESTTYKFAKCLKDRFGVVKGITDRDYITNSYHVPVFEEIDAFTKLKLESEFQKLSPGGAISYIETPNLCNNLDAVMEVITFIYNNIMYAELNTKSDYCQECGYTGEILIDDNMEWYCPNCGNRDHNKLNVARRTCGYIGTNFWNKGRTQEIKERVLHIDNKEEKDTKKDKEEK

SEQ ID NO: 573 - protein, 720 aa, unidentified
  REGION 1..720: note = Description of Unknown: uncultivated organism sequence
  REGION 1..720: note = Category: MG55 effectors
  REGION 1..720: note = Description: MG55-148 effector
MFFVKENGTIVVFDKNKIKKAIVSAMKDGGIYLPDIARLISIDTEKYFLKEGGDQNVVTREQVDKYIFDRLIHYGQSLTAKSYEDFKVLRKYQKQTMDSDESILSLIGGNNEELQMENSNKAPSLAPTQRDLIAGEISKSIARRKMIPAHLIHAHDEGLIHIHDLDYFIQSINNCCLINLKDMLDNGTVINETLIETPHSFRTAATITTQIVAQVASCQYGGQTFSTSHLAPYVRKSYDNYIKEVASELYDCSFGNIDSEIFKENVEKIARKRLKKEIADGVQTIQYQLNTLMTTNGQSPFLSIAMWINEDPEYEKENAMIIEEILKQRITGVKDKEGHYISPAFPKLLYFLDDNNAYEGSKYFYLTELAAKCSAKRLVPDYISVKAMKENIGEVFPCMGCRSFLSPWYDENGKNKAYGRFNMGVVSLNLVDVGLSANGDLDLFWDILDERLNLCYEALMLRINKLKGTTTETAPILWEHGAFARLPKGSKIDSLLENGYATVSLGYHGLYECVYSLIEESHTSEAGQELALEIMKKLKDTCDKWKKETGYGFGLYGTPAESLTYRFARTTKNRFGVIPHVTDKLYLTNSYHVHVTEPIDAFSKLKFESQFQKLSSGGCISYVEVPNMNDNIPAVIQLIQFIYENIQYAEINTKSDLCENCGYEGEILINPDTLDWYCPNCGCTDHSKLHVTRRVCGYIGSNFFNRGKTQEINERVVHLD

SEQ ID NO: 574 - protein, 727 aa, unidentified
  REGION 1..727: note = Description of Unknown: uncultivated organism sequence
  REGION 1..727: note = Category: MG55 effectors
  REGION 1..727: note = Description: MG55-149 effector
MKVIKRDGHMVDYCPEKIEQAIMKANNEVEEEDQASSTQIKNIIKYIEKLGKKRILVEDIQDIIEMKLMSQGKYELAKHYITYRYTRELVRRSNTTDQSIKELIDGESEYWNTENSNKNAKVVTTQRDYLAGITSTDITRRFLLPEDIVEAHDAGIIHFHDADYFAQNALHNCDLVNLEDMLQNGTSINGVMIEKPHRFLTAMTIATQIITAVSSSQYGGVTITLTHLAPFVRESYNRYLDKYKNRKLSKEQCEKFAMEDTKKEIVDGVQTFQYQVNSMTTTNGQAPFLSVCMYLGETTEYKEELSWIIEEFLKQRILGMKNEQGVYITPAFPKLLYVLEEDNINKNGKYYYLTKLAAECTAKRMVPDYISEKIMKELKIDKNGNGNCYPCMGCRSFLTPYVDENGKPKYYGRFNQGVVTINLVDAALSSDKDMDTFWQIFEERLELCHKALQIRHKRLSKATSDVAPILWQHGALARLKKGESIHELLHNGYSTISLGYAGLYECVKYMTGHSHTDNGKGKEFALEVMEKMNAKCKEWKEVENIDYSVYGTPIESTTYKFAKCLKDRFGVVKGITDRDYITNSYHVPVFEEIDAFTKLKLESEFQKLSPGGAISYIETPNLSNNLDAVLEVITFIYNNIMYAELNTKSDYCQECGYTGEILIDDNMEWYCPNCGNRDHNKLNVARRTCGYIGTNFWNKGRTQEIKERVLHIDNKEEKDTKKDKEEK

SEQ ID NO: 575 - protein, 983 aa, unidentified
  REGION 1..983: note = Description of Unknown: uncultivated organism sequence
  REGION 1..983: note = Category: MG55 effectors
  REGION 1..983: note = Description: MG55-150 effector
MALRIGIDIGSTTVKVVVLDAQNKLLFRSYERHYSKTRERTCETLRGLRGLLGGQQVQLLITGSAGLGVAKAAGLDFVQEVYATAAAVREFIPGTDAVIELGGEDAKIIFFGNTLEERMNGSCAGGTGAFIDQMATLLNVSVDELDELSLRHEKIYPIASRCGVFAKSDIQPILNQGGRKEDVAASIFQAVVDQTVAGLTQGRELKGTIVFLGGPLHFLAGLRQRFVETLHLDQDHAIFPEDGDCFAAIGAALCTEDSQPRPFEELLDLLEHAATVSTPVDTMDPLFTSQADYEAFSARHQAMAVPTVDLATYTGPAYLGIDAGSTTTKMVLIDPDCNLLYSFYHSNQGNPVSIVLPQLREIYAQCGDRVTIQGAAVTGYGEDLIKNAFSCDLGLVETVAHLNAARHFTPDVDFIIDIGGQDMKCFKIRNGAVDSILLNEACSSGCGSFIETFAKALGYTIADFSKMGLFARHPVNLGSRCTVFMNSSVKQAQKDGASVEDISAGLSISVVKNAIYKVIRAASADDLGQHIVVQGGTFLNDAVLRSFELEIGREVTRPTISGMMGAYGAALAAKDAGLTRSALLSAEALAAFTHEARPATCKLCTNHCSLTINRFDGGRKFISGNRCSRPLGQEKVDIPDLLKFKYQYLRSLQGKGEGDGSRGKIGIPFGLNMYENLPFWFTLFTTLNFEVVLSPESTRSLYLKGQQTIPSDTVCYPAKLLHGHIMALLEEGIDTIFYPCMSYNFDEHLSDNHYNCPVVAYYPDLLGVNIPALEDIKYLHPNLGLHRPKDFEKKGAQLLETEFGIPKRASVKAIRKAYAAYEDFRRLVQKKGEEYISFARETGRKILVVAGRPYHMDPEINHGINDLITSFGFVLITEDAVFQHMDKQPRRVLNQWTYHARMYNAARYVCTQPDMAFIQLVSFGCGVDAITTDELRSILEEAGELYTQLKIDDISNLGAVKIRIRSLMAALDARDARNQKGGQ

SEQ ID NO: 576 - protein, 972 aa, unidentified
  REGION 1..972: note = Description of Unknown: uncultivated organism sequence
  REGION 1..972: note = Category: MG55 effectors
  REGION 1..972: note = Description: MG55-151 effector
MQIGLDIGSTTIKIAVLDDAGKLQFAKYERHYSQIAEKMQQLLAELHAKMPLLRTARLAISGSAGIGIAENCGLQFVQEVFAEKICTERLNPGTEAVIELGGEDAKLLFLGRHFDARMNDSCAGGTGAFIDQMASLLNVATEDMNELARQASTRYTIASRCGVFAKSDIQPLLNQGAAKADLAASIFDAVASQAVTGLAKGRPITGSILYLGGPLTFMSELRHSFDKILKITGVCPENSLYYVAMGAAFCAENKVDLTELPAKLAAAGAHRDFDHLEPLFKNKAEYEEFIARHSRERIEPGDIAAAAEAYIGIDAGSTTIKIAVISPDGQLLDSFYQSNKGNPVIAVKEYLQSFYQKYPGCRLLGSAVTGYGEDLIRNGFGVDYGIVETMAHFIAAKTLQPDVDFILDIGGQDIKCLKIHNGCIDNIFLNEACSSGCGSFLQTFAEILGYSAEEFAHIGLSADKPVNLGSRCTVFMNSSVKQAQKDGASVANISAGLSLSIVKNALYKVIRPGSKEAIGKHIVVQGGTFLNDCVLRAFEKEMGLEVVRPNIAGLMGAYGAALYARQRQQETGRVSSLADAKALKDFFHEVKAVTCGLCSNHCHLTVNTFASGKRFISGNRCERPVTHCAPDDTFNLYRQKLQLLEKLRGVPGKRGKIGLPMGLNMYELLPFWHAFFTSLGFEVVTSPINDKTIYQKGQNTIPSDTVCYPAKLMHGHIKWLLEHDITTIFYPCMTYNVDENSAENCYNCPVVAYYPEVLHANMHDLDNATYIFDYLGLTHKKVLLKKLQQIFRDKFPDVRGSEIKSALEEAFTAYHQFENKVKELGQTIINSARAEHKPIVVLAGRPYHIDPKVNHSIDRLITTMGAALVSEDAVSSHISMKELNEDLQVLNQWTYHSRLYAAAKYVSQSSDLYMVQLVSFGCGCDAITADECRRILEENGHIYTQIKIDDIDNLGAAKIRLRSLFAAEGLES

SEQ ID NO: 577 - protein, 708 aa, unidentified
  REGION 1..708: note = Description of Unknown: uncultivated organism sequence
  REGION 1..708: note = Category: MG55 effectors
  REGION 1..708: note = Description: MG55-152 effector
MQVIKRDGRAVTYDRNKIMVAIRKANAEVEPCEKISDEKIEEIVEGIEAKHRKRMLVEDIQDIIEQKLMEDGKFVLAKTYIIYRYSRELIRKANTTDDSILSLIQNRNKDVMEENSNKNATVASTQRDLIAGEVSKDLTKRMLLPEKISKAHEEGAIHFHDADYFLQPIFNCCLINIGDMLDNGTVMNGKLIESPKSFQVACTIVTQIIASVASSQYGGQSVDIRHLGKYLRKSHDKYQKKISAAVGDTIDQETIDTLVRERVNDELRSGVQTIQYQINTLMTTNGQSPFVTLFLNLDENDEYVEENAMIIEEILRQRIEGIKNEVGVYVTPAFPKLIYVLDEHNCLKGGKYDYLTKLAIKCSAKRMYPDYISAKKMRENYEGNVFSCMGCRSFLSPWKDENGNYKWEGRFNQGVVSLNLPQIAILSKGNEDKFWSLLDERLQLCYDALMCRHRALEGVTSDVSPVHWQYGAIARLKKGEVIDPLLHNGYSTISLGYIGVYEMTKLMTGVSHTDPKGEEFALKVMKHLRAACDKWKADTGLGFGLYGTPAESLCYRFARIDKERFGTIKDVTDKGYYTNSYHVDVREKIDAFSKFRFESQFQNISSGGAISYVEIPNMRNNLDALAEVVRYIYDNIQYAEFNTKSDYCHVCGYDGEIIINNEGEWECPQCGNKDHAKMNVTRRTCGYLGENFWNVGKTKELGARVLHL

SEQ ID NO: 578 - protein, 803 aa, unidentified
  REGION 1..803: note = Description of Unknown: uncultivated organism sequence
  REGION 1..803: note = Category: MG55 effectors
  REGION 1..803: note = Description: MG55-153 effector
MENNNQQTEKNNMEETKMHEEEIVTIAFIPEEEGRHVIKRNGQEVDFSIEKPIACIQKANATVPAVKQLSEVQILAIAESVKNKVFAHKHATSVEEIQDWIELGLMEMRGYEVAQSYTHYRAAKAEKRKTNTIDDKVIALIGNQNEEDKQENANKDPEINSTQRDYIAGHVSKDLTFRTILPDFNSFKELSPKGKEIIKKGDGEKIVTANAEGLIHFHDADYFIQPMTNCCLINADDMLQNGTMISGVKIDKPRSFLTAANVLTQIIAQVASSQYGGQTFTLSHLAPFVDVSRKKLTKEVIAEREELGESLDEDIIKKIVERRLRKEIKQGIQTIQYQLITLMTTNGQSPFVTMFLYINEVPDGQIKDDLIMLIEEVFEQRIKGVKNSSGVYVSPTFPKLIYVLDEDNIEEGSKYYHVTELAAKTSAKRLVPDYISAKIMKEQRNGDVYPCMGCRSFLTVDDGTTNAGNKAKALNYEEGAHQYYGRFNQGVVTINLVDVACTSGGNLEEFWKVFDERLELCHKALRLRHERLLGTKSDVAPILWQHGAYARLERGEVIDPLLYGNYSTLSLGYAGLYECVFRMLEKSHTTEEGRELGLKIMQYMSDKCTAWKKDEDISYSLYGTPLESTTYKFAKALQKRFGIIPEVTDRNYITNSYHINVRENIDAFSKIEQESSFQHLSPGGSISYVEVPNMQNNISAVVAILQCIYDNITYAEINTKSDYCHVCHYEGEAVLVDNGSGKLVWECPNCKNQDARKMTVVRRVCGYLGEAARGMNQGRLGDIHDRVLHVSQRIDPMSKKTIS

SEQ ID NO: 579 - protein, 724 aa, unidentified
  REGION 1..724: note = Description of Unknown: uncultivated organism sequence
  REGION 1..724: note = Category: MG55 effectors
  REGION 1..724: note = Description: MG55-154 effector
MKIIKRNGAEVAFDIEKIINAIKKANDEVTESSNRLTDEQIVDIAEKVSALAGDLKRAVSVEEIQDFVENQLMDQKAFVVARKYITYRYTRALVRQSNTTDAQILTLIECNNEEVKQENSNKNPTVNSVQRDYMAGEVSKDLTRRVLLPHDIVEAHDEGIIHFHDADYFAQHMHNCDLVNLEDMLQNGTVISGTFIEKPHSFSTACNIATQIIAQVASNQYGGQSISLTHLAPFVDISRQKIRSEVAEELSQVGISDEEHIARIAEKRLRDEIKKGIQTIQYQVVTLLTTNGQAPFVTVFMYLGEARNERERDDLAMIIEETLNQRIQGVKNEAGVWVTPAFPKLIYVLEEDNIREGSRYWYLTELSARCTAKRMVPDYISEKKMLEFKVDKNGEGHCYTCMGCRSFLTPYVDENGKPKYYGRFNQGVVTINLVDVALSSHGDMEAFWKIFDERLELCHRALMERHKRLKGTLSDAAPILWQYGALARLKKGETIDKLLYGGYSTISLGYAGLYECTKYMTGKSHTDAQAKPFALSVMQHMNDMCKKWKQEHNIDFSLYGTPLESTTYKFAKCLQKRFGIIEGVTDKNYITNSYHVHVSEPIDAFTKLKFESEFQQLSPGGAISYVEVPNMQGNIPAVLAVMQYIYDNIMYAELNTKSDYCQVCGYDGEIAIVEEDGKLLWECPHCHNRDQSKMNVARRTCGYIGTQYWNQGRTQEIRDRVLHL

SEQ ID NO: 580 - protein, 971 aa, unidentified
  REGION 1..971: note = Description of Unknown: uncultivated organism sequence
  REGION 1..971: note = Category: MG55 effectors
  REGION 1..971: note = Description: MG55-155 effector
MRIGLDIGSTTVKCVVLDEKNELVYKTYERHYSQITQKIADILNTVRKEVPGSDSALVALSGSAGMGVADSCGLDFIQEVYATRVAANTFIPGTDVIIELGGEDAKILFLSGGMEVRMNGSCAGGTGAFIDQMATLLNVPLEEMNDLAAQHEKTYTIASRCGVFAKTDIQPLLNQGARKSDVAESIFAAVVNQTVAGLAQGREITGKVVYLGGPLTFMPRLRLRFDKVLHTEGVCPENSLYYVAAGAALCAEKVIDFNAVVKKVEHYSGSGNFAFNPPLFESKADYEQFKERHEMAYVPKKEIKDYKGRVYIGMDAGSTTVKSVVMGENGELLYSKYLPNSGNPVPIIKQFLEELYELCPEIDIASSAVTGYGEEIIKNAFCADFGIVETVAHFTAAKSFMPQVEFVIDIGGQDIKCFKIHNGTIDNIFLNEACSSGCGSFLQTFANALGYSIEDFSKLGLLAKQPVDLGSRCTVFMNSSVKQAQKDGATIEDISAGLSISVVKNALYKVIRASSPKELGSHIVVQGGTFLNDAVLRAFEREMGVEVVRPTIAGLMGAYGAALYAKSRCKGGKSTLLDREALKTFTHEIQVVNCGLCSNNCRLTVNKFSDGRRFIGGNRCERPITKKTPDKTLDIYDYKLELLQSYKPKPGPRGKIGIPMGLNMYELLPFWHSFFTALGFEVVYSPVSDKKLYARGQQTIPSDTVCYPAKLMHGHVQALIDDGVQTVFYPCLSYNLDEGLGDNHYNCPVVAYYPEVISANMKDVKNITFIKDYLGIHRHKDFPVKAHEMLCKYFDGITLKEVKAAAKAAYSEYGEYFKKVRARGETIMEQAEKEGREIIVLSGRPYHVDPEINKGIDKLITSFHCAIISEDVVSCRVKKFRTSVLNQWTYHSRLYAAAKYIAGRDDMNLVQLVSFGCGVDAITTDEVREILESEGKIYTQIKIDEITNLGAVKIRIRSLLAAIAEQREDRK

SEQ ID NO: 581 - protein, 716 aa, unidentified
  REGION 1..716: note = Description of Unknown: uncultivated organism sequence
  REGION 1..716: note = Category: MG55 effectors
  REGION 1..716: note = Description: MG55-156 effector
MICTVIKRDGSLVPYDRSKISNAIYMANREVVESNRATDIEISQIIEEVEEKYRKEGIVQVEEIQDIIERNLISMHYELGKRFMVYRHTHSMMRRATQTNESVLAICRNENEEVGRENSNKNAVLCSTQRDLIAGEISKELTFDLLLPGKIAKAHREGAIHFHDADYFIQSMFNCCLVDIGDMLRNGTVMNGKLIEPPKSFQVACTVTTQIIASVSSNQYGGQSINLRHLAPFVEVSRKKITEKLSSFGLNGKQLKDAVDYELKKEIAAGCQTIQYQVNTLMTTNGQSPFVTLFMELHEDIENGETIADEAMIYEEILSQRLQGIKNENGVYITPPFPKLIYVLDDCNCLKGGDYDYLTELAIKCTAKRMYPDYISAKKMRENYDGNVFSCMGCRSFLSPWKDENGKYKWEGRFNQGVVSLNLPQIAILSCQTGKPDFNTFWSILDERCSIAFEALLCRHKHLIGTNADVSPIHFRHGAIARLASGEKIDKLLKDGYSTLSLGYIGIYETVKLMTGFSHTKEGVPKEFAIQIMEYLRSKCDSWKKITGLGFGLYGTPAESLCYRFAKIDKERFGNIKDVTDKGYYTNSYHVDVREHISAFEKLSFESEFQKISSGGAISYVEIPNMEHNLDALAEVVKFGYENIQYFEFNTKSDNCLVCGYSGEILLDDKCEWYCPNCGNRDHNKMSVVRRTCGYLGERFWNRGKTAEIKDRVTHL

SEQ ID NO: 582 - protein, 971 aa, unidentified
  REGION 1..971: note = Description of Unknown: uncultivated organism sequence
  REGION 1..971: note = Category: MG55 effectors
  REGION 1..971: note = Description: MG55-157 effector
MRIGLDIGSTTVKCVVLDEKNELVYKTYERHYSQITQKIADILNTVRKEVPGSDSALVALSGSAGMGVADSCGLDFIQEVYATRVAANTFIPGTDVIIELGGEDAKILFLSGGMEVRMNGSCAGGTGAFIDQMATLLNVPLEEMNDLAAQHEKTYTIASRCGVFAKTDIQPLLNQGARKSDVAESIFAAVVNQTVAGLAQGREITGKVVYLGGPLTFMPRLRLRFDKVLHTEGVCPENSLYYVAAGAALCAEKVIDFNAVVKKVEHYSGSGNFAFNPPLFESKADYEQFKERHEMAYVPKKEIKDYKGRVYIGMDAGSTTVKSVVMGENGELLYSKYLPNSGNPVPIIKQFLEELYELCPEIDIASSAVTGYGEEIIKNAFCADFGIVETVAHFTAAKSFMPQVEFVIDIGGQDIKCFKIHNGTIDNIFLNEACSSGCGSFLQTFANALGYSIEDFSKLGLLAKQPVDLGSRCTVFMNSSVKQAQKDGATIEDISAGLSISVVKNALYKVIRASSPKELGSHIVVQGGTFLNDAVLRAFEREMGVEVVRPTIAGLMGAYGAALYAKSRCKGGKSTLLDREALKTFTHEIQVVNCGLCSNNCRLTVNKFSDGRRFIGGNRCERPITKKTPDKTLDIYDYKLELLQSYKPKPGPRGKIGIPMGLNMYELLPFWHSFFTALGFEVVYSPVSDKKLYARGQQTIPSDTVCYPAKLMHGHVQALIDDGVQTVFYPCLSYNLDEGLGDNHYNCPVVAYYPEVISANMKDVKNITFIKDYLGIHRHKDFPVKAHEMLCKYFDGITLKEVKAAAKAAYSEYGEYFKKVRTRGETIMEQAEKEGREIIVLSGRPYHVDPEINKGIDKLITSFHCAIISEDVVSCRVKKFRTSVLNQWTYHSRLYAAAKYIAGRDDMNLVQLVSFGCGVDAITTDEVREILESEGKIYTQIKIDEITNLGAVKIRIRSLLAAIAEQREDRK

SEQ ID NO: 583 - protein, 983 aa, unidentified
  REGION 1..983: note = Description of Unknown: uncultivated organism sequence
  REGION 1..983: note = Category: MG55 effectors
  REGION 1..983: note = Description: MG55-158 effector
MALRIGIDIGSTTVKVVVLDAQNKLLFRSYERHYSKTRERTCETLRGLRGLLGGQQVQLLITGSAGLGVAKAAGLDFVQEVYATAAAVREFIPGTDAVIELGGEDAKIIFFGNTLEERMNGSCAGGTGAFIDQMATLLNVSVDELDELSLRHEKIYPIASRCGVFAKSDIQPILNQGGRKEDVAASIFQAVVDQTVAGLTQGRELKGTIVFLGGPLHFLAGLRQRFVETLHLDQDHAIFPEDGDCFAAIGAALCTEDSQPRPFEELLDLLEHAATVSTPVDTMDPLFTSQADYEAFSARHQAMAVPTVDLATYTGPAYLGIDAGSTTTKMVLIDPDCNLLYSFYHSNQGNPVSIVLPQLREIYAQCGGRVTIQGAAVTGYGEDLIKNAFSCDLGLVETVAHLNAARHFTPDVDFIIDIGGQDMKCFKIRNGAVDSILLNEACSSGCGSFIETFAKALGYTIADFSKMGLFARHPVNLGSRCTVFMNSSVKQAQKDGASVEDISAGLSISVVKNAIYKVIRAASADDLGQHIVVQGGTFLNDAVLRSFELEIGREVTRPTISGMMGAYGAALAAKDAGLTQSTLLSAEALASFTHEARPATCKLCTNHCSLTINRFDGGRKFISGNRCSRPLGQEKVDIPDLLKFKYQYLRSLQGKGEGDGSRGKIGIPFGLNMYENLPFWFTLFTTLNFEVVLSPESTRSLYLKGQQTIPSDTVCYPAKLLHGHIMALLEEGIDTIFYPCMSYNFDEHLSDNHYNCPVVAYYPDLLGVNIPALEDIKYLHPNLGLHRPKDFEKKGAQLLETEFGIPKRASVKAIRKAYAAYEDFRRLVQKKGEEYISFARETGRKILVVAGRPYHMDPEINHGINDLITSFGFVLITEDAVFQHMDKQPRRVLNQWTYHARMYNAARYVCTQPDMAFIQLVSFGCGVDAITTDELRSILEEAGELYTQLKIDDISNLGAVKIRIRSLMAALDARDAQNQKGGQ

SEQ ID NO: 584 - protein, 1409 aa, unidentified
  REGION 1..1409: note = Description of Unknown: uncultivated organism sequence
  REGION 1..1409: note = Category: MG55 effectors
  REGION 1..1409: note = Description: MG55-159 effector
MREFHIGMDVGSTTIKIVCLDEKDNIIYSIYQRHLSNVRETTKKMFDDFLEHMKNNFGEDIKYKISITGSSGMGISSWIGIDFVQEVIACIKSIETLIPETDVAIELGGEDAKITFLKNDMDQRMNGSCAGGTGAFIDQIATLLDTDASGLNELAKGFDSIYPIAARCGVFAKTDIQPLINEGVRKENIAVSVFQAVVNQTITGLACGKKITGKVAFLGGPLFFLSELRNRFIDTLKLAPEDVVFPENSQLFVAQGAAFLSKENDAVFSYEDLKTKVERLNEKDTSDTSRLQPLFETEDELNEFLERHEKEKIETRDLNTYEGNAYLGIDAGSTTIKVVLISEEKEILFSHYSHNKGNPLDNIIATLKELYSKMNKNIIIKGSCVTGYGETLIKAALRVDIGIVETMAHYKGSQFFQPDVDFILDIGGQDMKCLKIQDGIITSILLNEACSSGCGSFLETFAHSLGMDILEFSRLGMESKSPADLGTRCTVFMNSKVKQAQKDGVEVADISAGLSYSVVKNTLFKVIKIKNKDELGKNIVVQGGTFLNNSVLRAFELVSERSVIRPNVAGLMGAFGAALIAMEQAGESSSIMTLDELNNFSCTTNLTRCKLCNNHCLLTIHKFKNGENFISGNRCDNPLGKMKKNTAPNMFDYKYNRLFNYTPLEPSKAVRGEIGIPRVLNFYDSYPFWFTLLTNLGFRVIISDDSSKKLYEKGIDTISSDSICYPAKLVHGHIVDLIEKGVKRIFYPCVIFEEKEDEKSSNQFNCPIVMSYPEVINNNMDILKEKHIDLILPFFSFESKEILYKTVFEEFERFGISKSEAKIAVDAAWEEKYNFRKDMRNKALEIIADLEKTGKTGVVLCGRPYHCDKEIHHGIPNIINSFGIAVLTGDAVASLASLDEELRVIDQWTYHSRLYRAAAYVGKSKCLELIELNSFSCGIDAVTTDQVEEILANYGKVHTLLKIDEISNLGAVKIRIRSLLAALDYKKNALRSSIKKKIEYKRAQFTKKMKKEYTILAPQMAPMHFKLLKTAFKAEGYNLEVLDETQEALDCGLQYVNNDACYPSILVIGELIAALKSGKYDLDKTAVMISQTGGSCRATNYLGFLKKAIKDSGFEKIPILSLNASGFEKQEGFSITLPFAHKCLIAVSYGDILMKLLYHVRPYEKIKGSAFELYEKWNEKVKENIYNGKFSQFKNNINAIVNDFSKIEVSDEKKIRVGIVGEILVKFSPFANNNLADFIEAEGGEVYTSSLMSFVKYCIYSDIFITERFKGKIAAMKLKAALWIIDQYTKVLNNALQKNPRFGHEDSIQDLAKKTSQYISIGNQSGEGWFLMGEMIEFIEKDVPNIVCVQPFGCLPNHITGKGMIKKLRSEYSNVNIAPIDYDPAYSEVNQLNRIKLMLSVARKNLKNS

SEQ ID NO: 585 - protein, 983 aa, unidentified
  REGION 1..983: note = Description of Unknown: uncultivated organism sequence
  REGION 1..983: note = Category: MG55 effectors
  REGION 1..983: note = Description: MG55-160 effector
MALRIGIDIGSTTVKVVVLDAQNKLLFRSYERHYSKTRERTCETLRGLRGLLGGQQVQLLITGSAGLGVAKAAGLDFVQEVYATAAAVREFIPGTDAVIELGGEDAKIIFFGNTLEERMNGSCAGGTGAFIDQMATLLNVSVDELDELSLRHEKIYPIASRCGVFAKSDIQPILNQGGRKEDVAASIFQAVVDQTVAGLTQGRELKGTIVFLGGPLHFLAGLRQRFVETLHLDQDHAIFPEDGDCFAAIGAALCTEDSQPRPFEELLDLLEHAATVSTPVDTMDPLFTSQADYEAFSARHQAMAVPTVDLATYTGPAYLGIDAGSTTTKMVLIDPDCNLLYSFYHSNQGNPVSIVLPQLREIYAQCGGRVTIQGAAVTGYGEDLIKNAFSCDLGLVETVAHLNAARHFTPDVDFIIDIGGQDMKCFKIRNGAVDSILLNEACSSGCGSFIETFAKALGYTIADFSKMGLFARHPVNLGSRCTVFMNSSVKQAQKDGASVEDISAGLSISVVKNAIYKVIRAASADDLGQHIVVQGGTFLNDAVLRSFELEIGREVTRPTISGMMGAYGAALAAKDAGLTQSTLLSAEALASFTHEARPATCKLCTNHCSLTINRFDGGRKFISGNRCSRPLGQEKVDIPDLLKFKYQYLRSLQGKGEGDGSRGKIGIPFGLNMYENLPFWFTLFTTLNFEVVLSPESTRSLYLKGQQTIPSDTVCYPAKLLHGHIMALLEEGIDTIFYPCMSYNFDEHLSDNHYNCPVVAYYPDLLGVNIPALEDIKYLHPNLGLHRPKDFEKKGAQLLETEFGIPKRASVKAIRKAYAAYEDFRRLVQKKGEEYISFARETGRKILVVAGRPYHMDPEINHGINDLITSFGFVLITEDAVFQHMDKQPRRVLNQWTYHARMYNAARYVCTQPDMAFIQLVSFGCGVDAITTDELRSILEEAGELYTQLKIDDISNLGAVKIRIRSLMAALDARDARNQKGGQ

SEQ ID NO: 586 - protein, 731 aa, unidentified
  REGION 1..731: note = Description of Unknown: uncultivated organism sequence
  REGION 1..731: note = Category: MG55 effectors
  REGION 1..731: note = Description: MG55-161 effector
MAAAIEVNTRVIKRNGQEVTFDITKIINAIKKANVEVSGIYQLNEYQINAIADKIARKVSDAPHAVNVEDIQDMVEKGIMEMRGYEVAQKYVRYRYKRELSRKSNTTDNGILALINQENEEVKQENSNKNPVINSTQRDYMAGEVSKDLTKRILLPEDIVKAHEEGIIHFHDSDYYAQKEHNCDLINLEDMLQNGTVISQTMIEKPHSFFTACNVTTQIVAQVASNQYGGQSFTLSHLAPFVDVSRQKIRKSVIEERKECGEALDDAIIDKIVASRLQEEIRSGIQTIQYQLITLMTCNGQAPFVTMFMYLDEVPEGRTRDDLAMVIEEALKQRMQGVKNEKGVWITPAFPKIIYVLDEDNIYPDSKYYYLTELAAKCTAKRMVPDYISAKKMKEYKNGDVYPCMGCRSFLTPDTEGLGPNGQHKYYGRFNQGVVTINLVDVACSAHGDMDQFWKIFDERLELCHRALRCRHERLLGTPSDVAPILWQYGALARLKKGEKIDKLLYNNYSTISLGYAGLYEMCMRMLGVSHTDPKGKEFALKVMQHMDDKCAEWRKAENISYSLYGTPMESTTYKFAKCLQKRFGIIKNVTDHNYITNSYHVNVREKIDAFTKLKFEADFQKLSPGGAISYVEVPNMQQNIPAVLAVMRYIYDNIMYAELNTKSDYCEVCGYDGEIKIVEDKSGKLVWECPNCGNRDQSKMSVARRTCGYIGTQFWNQGRTQEIKDRVLHL

SEQ ID NO: 587 - protein, 1416 aa, unidentified
  REGION 1..1416: note = Description of Unknown: uncultivated organism sequence
  REGION 1..1416: note = Category: MG55 effectors
  REGION 1..1416: note = Description: MG55-162 effector
MKLDFNTLGIDIGSTTVKIAILNKDGEIIFSDYQRHYANIQETLAKIIDEAYEEFGDIPVSPMITGSGGLTLSKHMEIPFVQEVVAVATSLKDYAPRTDVAIELGGEDAKIIYFTGGIDQRMNGICAGGTGSFIDQMATLLKTDAAGLNEYAKNYKAIYPIAARCGVFAKTDIQPLINEGATKEDLSASIFQAVVNQTISGLACGKPIKGNVAFLGGPLHFLTELKQAFIRTLGLEGDAIIAPEHSHLFAASGAAMNAHADVQSSLGELKEKLSHKIELEFEVTRMEPLFASEKEYEDFTERHNKHNVRKGDFASYKGDLFLGIDAGSTTTKVAVIGDDGSLLYSFYSSNNGSPLKTALKAMKDIYSKMPEGARIVRSCSTGYGEALLKSALLLDEGEVETVAHYTAAAFFDPNVDCILDIGGQDMKCIKIKNNSVDKVQLNEACSSGCGSFIETFAKSLNYEVADFAKIALFAENPIDLGSRCTVFMNSKVKQAQKEGASVADISAGLAYSVIKNALLKVIKLTDPKDLGKQVVVQGGTFYNDAVLRSFERISGCEAIRPDIAGIMGAFGAALIAKDRYTGQKSTMLSFKEINELRFKTSMTRCQGCINHCLLTVNEFTGDRRFISGNRCEKGLGLEKNKEQIPNLFEYKNERVFRHYKPLKKADAPRGVVGIPRVLNMYENYPFWFTFFTKLGYSVKLSPVSSRKIYELGIESIPSESECYPAKLAHGHVTWLIRQGLEYIFYPCIPYERVEVPDAGNHYNCPIVTSYGENIKNNIEELRDDKIKYQNPFISLESEEILTKRLVDFFRKENGIPAAEIKAAAHEGWLEMQAVREDMNKKGKEVLQYLKETGRHGIVLAGRPYHSDPEINHGIPDLITSYGVAVLTEDSISELSEVDRPTIVMDQWMYHSRLYKAASFVAKNDNLDLIQLNSFGCGLDAVTTDQVSDILTKQNKIYTVLKIDEVNNLGAARIRIRSLLAAVKDRERKKIEAKRVDTAHHRVIFTEQMRKDYTILVPDMSPIHFEILESALASCGYNVEVLKADSKCIDYGLKYVNNDACYPSLIVVGQFMQALLSGKYDLHKVALIITQTGGGCRATNYIGFIRRALEKAGMGYIPVISMSAGIEKNPGLKVNLEMANKALQALIYGDVFMRVLYKTRPYEKVKGSANALHEKWKKIAIESVKKANKKQFKKNIQNIVKEFDELELVDIKKPKVGIVGEILVKFMPLANNFIVELLEEEGAEAVCPDLIDFFMYSLYNANFKAEYLGKKKSSAKINNFLIWFIERYRKCANDALAASKRFHPTVPIQKLAEYASPIVSCGNQTGEGWFLTGEMIELIKSGVPNIVCTQPFGCLPNHVVGKGVIKELRHQYPDSNIVAVDYDPGASEVNQLNRIKLMLSTAGKNLIAESKDNEETA

SEQ ID NO: 588 - protein, 1416 aa, unidentified
  REGION 1..1416: note = Description of Unknown: uncultivated organism sequence
  REGION 1..1416: note = Category: MG55 effectors
  REGION 1..1416: note = Description: MG55-163 effector
MKLDFNTLGIDIGSTTVKIAILNKDGEIIFSDYQRHYANIQETLAKIIDEAYEEFGDIPVSPMITGSGGLTLSKHMEIPFVQEVVAVATSLKDYAPRTDVAIELGGEDAKIIYFTGGIDQRMNGICAGGTGSFIDQMATLLKTDAAGLNEYAKNYKAIYPIAARCGVFAKTDIQPLINEGATKEDLSASIFQAVVNQTISGLACGKPIKGNVAFLGGPLHFLTELKQAFIRTLGLEGDAIIAPEHSHLFAASGAAMNAHADVQSSLGELKEKLSHKIELEFEVTRMEPLFASEKEYEDFTERHNKHNVKKGDFASYKGDLFLGIDAGSTTTKVAVIGDDGSLLYSFYSSNNGSPLKTALKAMKDIYSKMPEGARIVRSCSTGYGEALLKSALLLDEGEVETVAHYTAAAFFDPNVDCILDIGGQDMKCIKIKNNSVDKVQLNEACSSGCGSFIETFAKSLNYEVADFAKIALFAENPIDLGSRCTVFMNSKVKQAQKEGASVADISAGLAYSVIKNALLKVIKLTDPKDLGKQVVVQGGTFYNDAVLRSFERISGCEAIRPDIAGIMGAFGAALIAKDRYTGQKSTMLSFKEINELRFKTSMTRCQGCINHCLLTVNEFTGDRKFISGNRCEKGLGLEKNKEHIPNLFEYKNERVFKHYKPLKKADAPRGVVGIPRVLNMYENYPFWFTFFTKLGYSVKLSPVSSRKIYELGIESIPSESECYPAKLAHGHVTWLIRQGLEYIFYPCIPYERVEVPDAGNHYNCPIVTSYGENIKNNIEELRDDKIKYQNPFISLESEEILTKRLVDFFRKENGIPAAEIKAAAHEGWLEMQAVREDMNKKGKEVLQYLKETGRHGIVLAGRPYHSDPEINHGIPDLITSYGVAVLTEDSISELSEVDRPTIVMDQWMYHSRLYKAASFVAKNDNLDLIQLNSFGCGLDAVTTDQVSDILTKQNKIYTVLKIDEVNNLGAARIRIRSLLAAVKDRERKKIEAKRVDTAHHRVIFTEQMRKDYTILVPDMSPIHFEILESALASCGYNVEVLKADSKCIDYGLKYVNNDACYPSLIVVGQFMQALLSGKYDLHKVALIITQTGGGCRATNYIGFIRRALEKAGMGYIPVISMSAGIEKNPGLKVNLEMANKALQALIYGDVFMRVLYKTRPYEKVKGSANALHEKWKKIAIESVKKANKKQFKKNIQNIVKEFDELELVDIKKPKVGIVGEILVKFMPLANNFIVELLEEEGAEAVCPDLIDFFMYSLYNANFKAEYLGKKKSSAKINNFLIWFIERYRKCANDALAASKRFHPTVPIQKLAEYASPIVSCGNQTGEGWFLTGEMIELIKSGVPNIVCTQPFGCLPNHVVGKGVIKELRHQYPDSNIVAVDYDPGASEVNQLNRIKLMLSTAGKNLIAESKDNEETA

SEQ ID NO: 589 - protein, 979 aa, unidentified
  REGION 1..979: note = Description of Unknown: uncultivated organism sequence
  REGION 1..979: note = Category: MG55 effectors
  REGION 1..979: note = Description: MG55-164 effector
MSLRIGIDIGSTTVKVVVLDEQNKLLFRSYERHYSKTRERACETLRSISDMLAGRQVKMVITGSAGLGVANASGIDFVQEVYATAAAVNTYIPGTDAVIELGGEDAKIIFFGGALEERMNGSCAGGTGAFIDQMATLMNVSVDELDALSLKHEKIYPIASRCGVFAKSDIQPILNQGGRKEDVAASIFQAVVDQTVAGLTQGRELKGKIVFLGGPLHFLMGLRERFVETLKLDEEHAIFPEDGDCFAAMGAALCSSDYDTILFEDALKKLEESVDTTTLVDTMPPLFQDVAEYGAFCARHNAKRPPEVDIKTYEGPAWLGIDAGSTTTKLALITGDGGLLYTYYHSNLGNPVAIVLEQLREIYAQCGDRIEIRGVAVTGYGEDLIKNAFSCDLGLVETMAHYKAAAHFEPDVDFIIDIGGQDMKCFKIRNGAVDSIMLNEACSSGCGSFIETFAKALGYTIADFAKLGLFAQKPVNLGSRCTVFMNSSVKQAQKDGASVEEISAGLSISIVKNAIYKVIRAASADDLGKHIVVQGGTFLNDAVLRAFEQELGRDVTRPTISGIMGAFGAALAARDLHLEKSAVLTAQALEKFTHTAKPATCGLCTNHCALTVNTFDGGRRFVSGNRCSRPLGEEPTHLPDLMRYKYAKLRALQGKGQGDGSRGRIGIPFGLNMYENLPFWFELFTRLNFEVVLSPESSRKLYVKGQRTIPSDTVCYPAKLLHGHMEALVEQGVDAIFYPCMPYNFNEGVSDNNYNCPVVAYYPELLAANVPELKKTRYLYPYFGLHRPKDFEKHAAKWFEEEFGVPRKETVAAARAAYGAYDAYKNDLRATAQQYIAQARAEGRPILVVAGRPYHMDPEINHGINDLITNYGFILITEDAVAYLEDKAPRHVLNQWTYHARMYNAARYVCTQPDMELIQLVSFGCGIDAITGDEMRSILEEGGKLYTQLKIDDISNLGAVKIRIRSLMAAIEARKQSEE

SEQ ID NO: 590 - protein, 1439 aa, unidentified
  REGION 1..1439: note = Description of Unknown: uncultivated organism sequence
  REGION 1..1439: note = Category: MG55 effectors
  REGION 1..1439: note = Description: MG55-165 effector
MIKTLHVGLDVGSTTVKIIVMDENLNTIYTDYKRHFSDTKNTICNVLENLIIMYPNTEFTIALTGSGAISAAKFLDLPFIQEVVSCKRAVEKYIPETDVVIELGGEDAKIIYFDKFIEQRMNGTCAGGTGAFIDQMASLLNTDPTGLNELAKSHKLIYPIASRCGVFAKTDIQPLLNEGAAKEDIAASIFQAVVNQTISGLACGRPIRGNVAFLGGPLNYLSELRNRFIETLNLKDNEIIVPNEAHLLVAKGAALDSLNSHTITIEKLKSKIEVLKSSHDDTSNPLNPLFSIDAEYDEFKKRHEKDKVKRADFKTFKGNCFLGIDAGSTTTKLVVISEDGTLLYSLYGSNEGNPLQSVINMLKKLYAEKPSEAVIRFSGVTGYGEKLIQTALNVDLNEIETIAHYTAAKEFMPNVTSIVDIGGQDMKYIKMKNGAIDNIMLNEACSSGCGSFIETFAKSLGLSIQDFVQSALEARRPVDLGSRCTVFMNSKIKQAQKEGYSVGDISAGLSYSVIKNAIQKVMKVRDVKKLGAHIVVQGGTFYNDAVLRAFELIVGRNVVRPDIAGLMGAYGVALLAKEQYENNLDMDYVSSISNINELDKLEINITHIRCQGCENHCLLTINKFSNGAKYISGNRCEKGAGIVDKTLDRPNLIKYKFERTFNYTPLEEKNAPRGTIGIPRVLNMYEDYPFWFTFLTNLGFRVILSEKSNRKTYEKGMESMPSESVCFPAKLSHGHIIGLINSGIKTIFYPCIPYSRKEYQKADNHYNCPIVISYSEVLKNNVEELKDKNIKFLNPFLPFEPDKLAEIIMNLPEFKEYNFTKKELLSAAKKAETEYQNYKSDIHNKGQETLKFMEENNLKGIVLAGRPYHVDPEVNHGIDTLITSLGLCVLTEDSISNLTEAKRPLRVVDQWVFHARLYAAADFVGKHDNLELVQLNSFGCGVDAVTTDQVEEILTSYEKMYTLIKIDEINNLGAIRIRIRSLLASMNKRIKDNNSSMCNGNYEVNKKIFTKEMRKDYTILMPQMAPIHFEFLESAMKNSGYKMELLKDCTQHTVETGLKYVNNDACYPSILVTGQMIEALESGKYDLNKTALIMSQTGGGCRATNYIGFIRKALKDAGFENVPVISFNVVGMEKMPGFKLTIPLIERLIKSCIYADLLQKMLTKNRAYEINKGKTKELFDYWMEKCKKLVNKSSIKEFKQSIFDIVSDFEKIEIDTSVIKPKVGIVGEVLIKYHPFGNNFVADKLEQEGAEVILPDFMGFIKFIATHKITFNKLIKTDAIKAKLFKTAIKLIDLLEKPVISALNNSKKGYLLPCNIWDLEEKVNDILSIGNQTGEGWFLTAEMIEYIEHDIPNIVCVQPFACLPNHVVGKGVIKTIRSKFPEANIAPIDYDPGASEANQTNRIKLMMTVAKDNLKNKNNINKAIKKENYIIDEKNKISN

SEQ ID NO: 591 - protein, 983 aa, unidentified
  REGION 1..983: note = Description of Unknown: uncultivated organism sequence
  REGION 1..983: note = Category: MG55 effectors
  REGION 1..983: note = Description: MG55-166 effector
MALRIGIDIGSTTVKVVVLDAQNKLLFRSYERHYSKTRERTCETLRGLRGLLGGQQVQLLITGSAGLGVAKAAGLDFVQEVYATAAAVREFIPGTDAVIELGGEDAKIIFFGNTLEERMNGSCAGGTGSFIDQMATLLNVSVDELDELSLRHEKIYPIASRCGVFAKSDIQPILNQGGRKEDVAASIFQAVVDQTVAGLTQGRELKGTIVFLGGPLHFLAGLRQRFVETLHLDQDHAIFPEDGDCFAAIGAALCTEDSQPRPFEELLDLLEHAATVSTPVDTMDPLFTSQADYEAFSARHQAMAVPTVDLATYTGPAYLGIDAGSTTTKMVLIDPDCNLLYSFYHSNQGNPVSIVLPQLREIYAQCGGRVTIQGAAVTGYGEDLIKNAFSCDLGLVETVAHLNAARHFTPDVDFIIDIGGQDMKCFKIRNGAVDSILLNEACSSGCGSFIETFAKALGYTIADFSKMGLFARHPVNLGSRCTVFMNSSVKQAQKDGASVEDISAGLSISVVKNAIYKVIRAASADDLGQHIVVQGGTFLNDAVLRSFELEIGREVTRPTISGMMGAYGAALAAKDAGLTQSTLLSAEALASFTHEARPATCKLCTNHCSLTINRFDGGRKFISGNRCSRPLGQEKVDIPDLLKFKYQYLRSLQGKGEGDGSRGKIGIPFGLNMYENLPFWFTLFTTLNFEVVLSPESTRSLYLKGQQTIPSDTVCYPAKLLHGHIMALLEEGIDTIFYPCMSYNFDEHLSDNHYNCPVVAYYPDLLGVNIPALEDIKYLHPNLGLHRPKDFEKKGAQLLETEFGIPKRASVKAIRKAYAAYEDFRRLVQKKGEEYISFARETGRKILVVAGRPYHMDPEINHGINDLITSFGFVLITEDAVFQHMDKQPRRVLNQWTYHARMYNAARYVCTQPDMAFIQLVSFGCGVDAITTDELRSILEEAGELYTQLKIDDISNLGAVKIRIRSLMAALDARDARNQKGGQ

SEQ ID NO: 592 - protein, 747 aa, unidentified
  REGION 1..747: note = Description of Unknown: uncultivated organism sequence
  REGION 1..747: note = Category: MG55 effectors
  REGION 1..747: note = Description: MG55-167 effector
MEEKENVSVKINVIKRNGQEVDFDISKIVNAIRKANAEVSGIYQMNDYQINAVADNIAKKVQNSSHAVNVEDIQDMVETGIMEMRGYEVAQKYVRYRYKREISRKSNTTDNGILALINQQNEEVKQENSNKNPVINSTQRDYMAGEVSKDLTKRVLLPEDIVKAHEEGIIHFHDSDYYAQKEHNCDLINLEDMLQNGTVISETLIEKPHSFFTACNVTTQIVAQVASNQYGGQSFTLSHLAPFVDVSRKKLTKQVLEERRLTGETQDADIISKIVENRLDEEIKSGIQTIQYQLITLMTCNGQAPFVTMFMYLDEVPEGQTRDDLARIIREVLLQRMQGVKNEKGVWITPAFPKLIYVLDEDNIRPDSKYYSLTELAAKCTSRRMVPDYISAKKMKEYKNGDVYPCMGCRSFLTPDTEGLDPNGKHKYYGRFNQGVVTINLVDVACSSYGDMEAFWKIFDERLELCHRALRCRHERLLGTISDVAPILWQYGALARLGKGEKIDRLLYNNYSTISLGYAGLYEMCMRMLGVSHTDPKGKEFALQVMQHLNDKCAEWRKAENISYSLYGTPMESTTYKFAKCLQKRFGIIKDVTDHNYITNSYHVNVRENIDAFTKLRFEADFQKLSPGGAISYVEVPNMQNNIPAVLSVMQYIYDNIMYAELNTKSDYCEVCGYDGEIRIVEDENGKLVWECPNCGNRDQSKMSVARRTCGYIGTQFWNQGRTQEIKDRVLHLSNKSFGSEVSGVQS

SEQ ID NO: 593 - protein, 720 aa, unidentified
  REGION 1..720: note = Description of Unknown: uncultivated organism sequence
  REGION 1..720: note = Category: MG55 effectors
  REGION 1..720: note = Description: MG55-168 effector
MKIIKRSGAEAVFDISKIIIAINKANHEVVEAERLTADQIKEIAQYIEDSCKDANHALNVEDIQDLVEDQLMDKRAFSVARKYITYRYKRALVRKSNSTDEQILSLIECNNEEVKQENSNKDSTVNSVQRDYMAGEVSKDITRRFLLPEDIVEAHEQGIIHFHDADYFAQHMHNCDLVNLEDMLQNGTVISGTRIDKPHSFSTACNIATQIIAQVASSQYGGQSISLAHLVPFVQISREKIHAELVQTLKESDVELSEEKINSIVERRLHAEIERGVQVIQYQVVTLMTTNGQSPFVTVFMYLNEAKNEQEKKDLAMIIEEVLDQRYQGVKNEDGVWITPAFPKLIYVLEEDNIHEDSEYYYLTKKAAKCTAKRMVPDYISEKKMKELKDGNCYTCMGCRSFLTVYHDEAGKPKFYGRFNQGVVTLNLVDLACSSGGDFEKFWKLFDERLDLCYRALMARHNRLKGTPSDVAPILWQYGALARLKKGETIDKLLYGGYSTISLGYAGLCECTRYMTGKPHTDPAATPFALKVMQRLNDACKEWKEKENIDFSVYGTPLESTTYKFAKCLQKRFGVIPGVTDKNYITNSYHVHVTENIDAFTKLKFESQFQALSPGGAISYVEVPNMQDNLDAVLSVMKFIYENIMYAELNTKSDYCQVCGYDGEIQIVKDDDGKLVWECPHCHNRDQDKMNVARRTCGYIGSQFWNQGRTQEIKERVLHL

SEQ ID NO: 594 - protein, 1416 aa, unidentified
  REGION 1..1416: note = Description of Unknown: uncultivated organism sequence
  REGION 1..1416: note = Category: MG55 effectors
  REGION 1..1416: note = Description: MG55-169 effector
MKLDFNTLGIDIGSTTVKIAILNKDGEIIFSDYQRHYANIQETLAKIIDEAYEEFGDIPVSPMITGSGGLTLSKHMEIPFVQEVVAVATSLKDYAPRTDVAIELGGEDAKIIYFTGGIDQRMNGICAGGTGSFIDQMATLLKTDAAGLNEYAKNYKAIYPIAARCGVFAKTDIQPLINEGATKEDLSASIFQAVVNQTISGLACGKPIKGNVAFLGGPLHFLTELKQAFIRTLGLEGDAIIAPEHSHLFAASGAAMNAHADVQSSLGELKEKLSHKIELEFEVTRMEPLFASEKEYEDFTERHNKHNVRKGDFSSYKGDLFLGIDAGSTTTKVAVIGDDGSLLYSFYSSNNGSPLKTALKAMKDIYSKMPEGARIVRSCSTGYGEALLKSALLLDEGEVETVAHYTAAAFFDPNVDCILDIGGQDMKCIKIKNNSVDKVQLNEACSSGCGSFIETFAKSLNYEVADFAKIALFAENPIDLGSRCTVFMNSKVKQAQKEGASVADISAGLAYSVIKNALLKVIKLTDPKDLGKQVVVQGGTFYNDAVLRSFERISGCEAIRPDIAGIMGAFGAALIAKDRYTGQKSTMLSFKEINELRFKTSMTRCQGCINHCLLTVNEFTGDRKFISGNRCEKGLGLEKNKEQIPNLFEYKNERVFRHYKPLKKADAPRGVVGIPRVLNMYENYPFWFTFFTKLGYSVKLSPVSSRKIYELGIESIPSESECYPAKLAHGHVTWLIRQGLEYIFYPCIPYERVEVPDAGNHYNCPIVTSYGENIKNNIEELRDDKIKYQNPFISLESEEILTKRLVDFFRKENGIPAAEIKAAAHEGWLEMQAVREDMTKKGKEVLQYLKETGRHGIVLAGRPYHSDPEINHGIPDLITSYGVAVLTEDSISELSEVDRPTIVMDQWMYHSRLYKAASFVAKNDNLDLIQLNSFGCGLDAVTTDQVSDILTKQNKIYTVLKIDEVNNLGAARIRIRSLLAAVKDRERKKIEAKRVDTAHHRVIFTEQMRKDYTILVPDMSPIHFEILESALASCGYNVEVLKADSKCIDYGLKYVNNDACYPSLIVVGQFMQALLSGKYDLHKVALIITQTGGGCRATNYIGFIRRALEKAGMGYIPVISMSAGIEKNPGLKVNLEMANKALQALIYGDVFMRVLYKTRPYEKVKGSANALHEKWKKIAIESVKKANKKQFKKNIQNIVKEFDELELVDIKKPKVGIVGEILVKFMPLANNFIVELLEEEGAEAVCPDLIDFFMYSLYNANFKAEYLGKKKSSAKINNFLIWFIERYRKCANDALAASKRFHPTVPIQKLAEYASPIVSCGNQTGEGWFLTGEMIELIKSGVPNIVCTQPFGCLPNHVVGKGVIKELRHQYPDSNIVAVDYDPGASEVNQLNRIKLMLSTAGKNLIAESKDNEETA

SEQ ID NO: 595 - protein, 708 aa, unidentified
  REGION 1..708: note = Description of Unknown: uncultivated organism sequence
  REGION 1..708: note = Category: MG55 effectors
  REGION 1..708: note = Description: MG55-170 effector
MKVIKRDGSTADFDSSKIIVAIQKANQVVEPEDRIDQERIEAIAHYVESKNRMRLLVEDIQDMVEHQLMDEGKFNLAKSYIIYRYTRALVRKANTTDESILSLIRNSNKDVMEENSNKNAVMASTQRDLIAGEVSKDLTRRLILPEKISKAHDEGAIHFHDADYFVQPIFNCCLINVGDMLDNGTVMNGKLIESPKSFQVACTVMTQIIASVASSQYGGQSVDIRHLGKYLRRSYEKFKLTIKAEVGDSVADEVVERLTKRRLQDELRSGVQTIQYQINTLMTTNGQSPFVTIFLNLQADDEYLEENAMIVEEVLRQRLEGIKNDKGVFVTPAFPKLVYVLDEHNCLKGGKYDYITKLAVKCSAKRLYPDYISAKKMRENYEGNVFAPMGCRSFLAAWKDDEGNYKFEGRFNQGVVSLNLPQVAILAHGDEEKFWPLLDERLQLCYEALMCRHNSLKGIRSDVSPVHWQYGAIARLEKGEVIDKYLEKGYSTISLGYIGLYEMTKLMKDVSHTTPEGEEFALRVMKYLRAACDKWKKETGLGFALYGTPAESLCYRFARIDKERFGTIADVTDKGYYTNSYHVDVREDIDAFSKFNFESQFQRISSGGAISYVEIPNMRHNLEAMEDVVRFIYDNIQYAEFNTKSDYCHVCGFDGEIIINDDLEWECPNCGNKNQTLMNVTRRTCGYLGENFWNVGKTKEIKSRVLHL

SEQ ID NO: 596 - protein, 722 aa, unidentified
  REGION 1..722: note = Description of Unknown: uncultivated organism sequence
  REGION 1..722: note = Category: MG55 effectors
  REGION 1..722: note = Description: MG55-171 effector
MKIIKRNGAEVSFDVEKILNAVRKANNEVSEDNRLSEEQIEEIAKRVTALAGDLNRAVNVEEVQDFVENQIMDQKAFAVARKYITYRYTRALIRRANTTDAQILTLIECNNEEVKQENSNKNPTVNSVQRDYMAGEVSKDLTRRLLLPRDIVEAHDEGLIHFHDADYFAQHMHNCDLVNLEDMLQNGTVISGTFIEKPHSFSTACKIATQIIAQVASNQYGGQSISLTHLAPFVDISRQKIRAEVKEELADVGVMEDTIARIAEKRLREEIKKGIQTIQYQVVTLLTTNGQAPFVTVFMYLGEARNERERADLAMIIEETLNQRIQGVKNESGVWVTPAFPKLIYVLEEDNIREGSKYWYLTELAARCTAKRMVPDYISEKKMLEYKIDKNGEGHCYTCMGCRSFLTPYVDAEGKPKYYGRFNQGVVTINLVDVALSSGGDMDEFWKIFDERLELCHRALLERHNRLKGTLSDAAPILWQYGALARLKKGETIDKLLYGGYSTISLGYAGLYECTKYMTGKSHTDAAAKPFALSVMQHMNDKCKEWKGMHNIDFSLYGTPLESTTYKFAKALQKRFGINEGVTDKNYITNSYHGHVTEPIDAFTKLKFESEFQQLSPGGAISYVEVPNMQDNIPAVLSVMQYIYDNIMYAELNTKSDYCQVCGYDGEIGIVEEDGKLLWECPYCHNRDQSKMNVARRTCGYIGTQFWNQGRTQEIKDRVLHL

SEQ ID NO: 597 - protein, 1410 aa, unidentified
  REGION 1..1410: note = Description of Unknown: uncultivated organism sequence
  REGION 1..1410: note = Category: MG55 effectors
  REGION 1..1410: note = Description: MG55-172 effector
MKLDFNTLGIDIGSTTVKIAILNKDGEIIFSDYQRHYANIQETLAKIIDEAYEEFGDIPVSPMITGSGGLTLSKHMEIPFVQEVVAVATSLKDYAPRTDVAIELGGEDAKIIYFTGGIDQRMNGICAGGTGSFIDQMATLLKTDAAGLNEYAKNYKAIYPIAARCGVFAKTDIQPLINEGATKEDLSASIFQAVVNQTISGLACGKPIKGNVAFLGGPLHFLTELKQAFIRTLGLEGDAIIAPEHSHLFAASGAAMNAHADVQSSLGELKEKLSHKIELEFEVTRMEPLFASEKEYEDFTERHNKHNVRKGDFSSYKGDLFLGIDAGSTTTKVAVIGDDGSLLYSFYSSNNGSPLKTALKAMKDIYSKMPEGARIVRSCSTGYGEALLKSALLLDEGEVETVAHYTAAAFFDPNVDCILDIGGQDMKCIKIKNNSVDKVQLNEACSSGCGSFIETFAKSLNYEVADFAKIALFAENPIDLGSRCTVFMNSKVKQAQKEGASVADISAGLAYSVIKNALLKVIKLTDPKDLGKQVVVQGGTFYNDAVLRSFERISGCEAIRPDIAGIMGAFGAALIAKDRYTGQKSTMLSFKEINELRFKTSMTRCQGCINHCLLTVNEFTGDRKFISGNRCEKGLGLEKNKEQIPNLFEYKNERVFRHYKPLKKADAPRGVVGIPRVLNMYENYPFWFTFFTKLGYSVKLSPVSSRKIYELGIESIPSESECYPAKLAHGHVTWLIRQGLEYIFYPCIPYERVEVPDAGNHYNCPIVTSYGENIKNNIEELRDDKIKYQNPFISLESEEILTKRLVDFFRKENGIPAAEIKAAAHEGWLEMQAVREDMTKKGKEVLQYLKETGRHGIVLAGRPYHSDPEINHGIPDLITSYGVAVLTEDSISELSEVDRPTIVMDQWMYHSRLYKAASFVAKNDNLDLIQLNSFGCGLDAVTTDQVSDILTKQNKIYTVLKIDEVNNLGAARIRIRSLLAAVKDRERKKIEAKRVDTAHHRVIFTEQMRKDYTILVPDMSPIHFEILESALASCGYNVEVLKADSKCIDYGLKYVNNDACYPSLIVVGQFMQALLSGKYDLHKVALIITQTGGGCRATNYIGFIRRALEKAGMGYIPVISMSAGIEKNPGLKVNLEMANKALQALIYGDVFMRVLYKTRPYEKVKGSANALHEKWKKIAIESVKKANKKQFKKNIQNIVKEFDELELVDIKKPKVGIVGEILVKFMPLANNFIVELLEEEGAEAVCPDLIDFFMYSLYNANFKAEYLGKKKSSAKINNFLIWFIERYRKCANDALAASKRFHPTVPIQKLAEYASPIVSCGNQTGEGWFLTGEMIELIKSGVPNIVCTQPFGCLPNHVVGKGVIKELRHQYPDSNIVAVDYDPGASEVNQLNRIKLMLSTAGKNLQIENL

SEQ ID NO: 598 - protein, 708 aa, unidentified
  REGION 1..708: note = Description of Unknown: uncultivated organism sequence
  REGION 1..708: note = Category: MG55 effectors
  REGION 1..708: note = Description: MG55-173 effector
MKIQKRDGRIVPYEEEKIIDAIHKANQEVEEKDRADDTLIEQILEAVKAEGKKQQTVEHVQDVIEQHLVEANKYVLSKKYMVYRYQRSLLRKSNTTDESILKLIRNENKELAEENSNKNTRLASTQRDYIAGEVSRDVTRRMLLPEHISMAHDNGVLHFHDADYFIQPIFNCCLINIQDMLDNGTSINGKMIESPKSFQVACTVTTQIIAAVASNQYGGQSVNIKHLGKYLRKSKEKFTKQLEDEFGDSLDAAMKEKIVQMRLKDELKSGVQTIQYQINTLMTTNGQSPFVTLFLHIDENDEYVEETVQIIGEILRQRIEGTKNEKGVYVTPAFPKLVYVLDENNCLKGGKYDYVTRLAAKCSAKRMYPDYISAKKMRENYEGNVFSCMGCRSFLSPWKDENGNYKWEGRFNQGVVSLNLPQIGIIADGNEEVFWKLLDERLELCYEALMCRHKALLGTVSDVSPIHWQYGAIARLKKGEKIDRLLLNGYSTMSLGYIGLYELTYLMKGCSHTAPKGKEFALRVMDHLREAAARWKEETGIGFSLYGTPAETLCYRFARIDREKYGDIPNVTDKGYYTNSYHVDVREKMDAFTKFTFESEFQNKSLGGAISYVEIPNLNNNLEAIEELIRFIYDNIQYGEFNTKSDYCHVCGYDGEIIVNDDNEWECPQCHNKDHAKMNVTRRTCGYLGENFWNTGKTKEIKARVLHL

SEQ ID NO: 599 - protein, 973 aa, unidentified
  REGION 1..973: note = Description of Unknown: uncultivated organism sequence
  REGION 1..973: note = Category: MG55 effectors
  REGION 1..973: note = Description: MG55-174 effector
MRIGMDIGSTTIKCVVLDENDQIIYSAYERHYSHILEKTRELLTSLNDTYLKGKKAYFAISGSAGMGLADSCGVSFVQEVFADRVAANRLNPGTDCIIELGGEDAKILFLTNGTEVRMNGSCAGGTGAFIDQMATLLKMSADEMDKTAQQATRKYTIAARCGVFAKSDVQPLINQGALSSDIAASIYQAVVNQTIAGLAQGRPISGKILYLGGPLTFSKCLRDSFNETLKIEGICPENSLLYVALGAAYYADKEVVFDDVVKGLANYGKTATYASLPPLFNNVEEYNEFKKRHAKASVPRVDFDENTGPVHIGIDSGSTTIKVAVIDDHANLLFTDYQSNSGNPLPIVIDVLKGLYEQHPNLKIQSVTTTGYGEALMTHALHTDFGLVETVAHFTAAKHFMPDVDFIIDIGGQDMKCFKIENGAISDIFLNEACSSGCGSFLQTFSAALGYSVKNFAQEALFAKQPVDLGSRCTVFMNSSVKQAQKDGADFDCISAGLSISVVKNALYKVIRTSSPEQLGKKIVVQGGTFYNEAVLRAFEKEMGVDVVRPDIAGLMGAYGAALHGKEHSKPGTISSILTLEELNNFTQKVQNVQCGLCGNHCQMTVSVFQDGKRFITGNRCDRPITGKSNDDTLNLYAYKQQQLSQLMKNPGNGTRGKIGIPMVLNMYELLPFWHAFFTSLGFQVIVSPFSNRKLYQAGQGSIPSDTVCFPAKLTHGHIMALLKKDVDAIFYPCMSYNIDEGLGDNHYNCPVVAYYPEVLAGNIRELEDTKFIYEYLNLEQRKDFVRLMPKIMQKYFPDLKTADIHNAIEVAYTAYRKHMEDTRNEAQRMMTEARNEGKRIIVLAGRPYHVDPEVNHGIDKLIVQHGACVITEDSISNLVQKFDTSVLNQWSYHSRLYAAAKYCVNHADMDLVQLVSFGCGLDAVTSDETKEILQEGNKLYTQLKIDEITNLGAINIRIRSLFAALDERKEQA

SEQ ID NO: 600 - protein, 708 aa, unidentified
  REGION 1..708: note = Description of Unknown: uncultivated organism sequence
  REGION 1..708: note = Category: MG55 effectors
  REGION 1..708: note = Description: MG55-175 effector
MKVIKRDGSTADFDSSKIIVAIQKANQVVEPEDRIDQERIEAIAHYVESKNRMRLLVEDIQDMVEHQLMDEGKFNLAKSYIIYRYTRALVRKANTTDESILSLIRNSNKDVMEENSNKNAVMASTQRDLIAGEVSKDLTRRLILPEKISKAHDEGAIHFHDADYFVQPIFNCCLINVGDMLDNGTVMNGKLIESPKSFQVACTVMTQIIASVASSQYGGQSVDIRHLGKYLRRSYEKFKLTIKAEVGDSVADEVVERLTKRRLQDELRSGVQTIQYQINTLMTTNGQSPFVTIFLNLQADDEYLEENAMIVEEILRQRLEGIKNDKGVFVTPAFPKLVYVLDEHNCLKGGKYDYITKLAVKCSAKRLYPDYISAKKMRENYEGNVFAPMGCRSFLAAWKDDEGNYKFEGRFNQGVVSLNLPQVAILAHGDEEKFWPLLDERLQLCYEALMCRHNSLKGIRSDVSPVHWQYGAIARLEKGEVIDKYLEKGYSTISLGYIGLYEMTKLMKDVSHTTPEGEEFALRVMKYLRAACDKWKKETGLGFALYGTPAESLCYRFARIDKERFGTIANVTDKGYYTNSYHVDVREDIDAFSKFNFESQFQRISSGGAISYVEIPNMRHNLEAMEDVVRFIYDNIQYAEFNTKSDYCHVCGFDGEIIINDDLEWECPNCGNKNQTLMNVTRRTCGYLGENFWNVGKTKEIKSRVLHL

SEQ ID NO: 601 - protein, 1410 aa, unidentified
  REGION 1..1410: note = Description of Unknown: uncultivated organism sequence
  REGION 1..1410: note = Category: MG55 effectors
  REGION 1..1410: note = Description: MG55-176 effector
MKKFLVGIDVGSTTVKIVCLDDKFNIVYSIYQRHLSNVRETTKLLFNNFLKYMEEHYGKNVSIKLNITGSSGMGIASCIEIDFIQEVIACIKAIETVIPQTDVAIELGGEDAKITFLKNDMDQRMNGSCAGGTGAFIDQIAALLNTDATGLNEMAKNYDTIYPIAARCGVFAKTDIQPLINEGAKKGNIAVSVFQAVVNQTITGLACGKKISGKIAFLGGPLFFLSELRKRFIETLNIKDEDVIFPDNSQIFVAQGAAFAAQENKTSYILEELATKFENLTKKGNDETSRLDSLFKDKIEYDEFINRHANEKIDTVDINEYEGDAFLGIDAGSTTIKLVLISDDNKILYSFYSHNKGNPLDNIIENLKTLYKKMGDKIKIKGSCVTGYGENLIKAALQVDNGIVETIAHYKGALFFQPKVDFILDIGGQDMKCLKINDGVISSILLNEACSSGCGSFLETFANSLGMDIKEFAKLGLNSKSPADLGTRCTVFMNSKVKQAQKDGVDVGDISAGLSYSVVKNTLFKVIKIKNKEELGKYIVVQGGTFLNDCVLRAFEKIANRNVIRPNIAGLMGAFGAAIVAKERSGAKSTLLSLKELEDFSCSTNLTRCGMCTNRCLLTIHKFKSGENFISGNRCDNPINKVKKEQAPNMFEYKYNRLFNYTPLELSKAYRGEIGIPRVLNFYDSYPFWFTLLTNLGFRVVISDDSSKKLYESGIDTITSDSICYPAKLVHGHITNLVNKGIKRIFYPCVIFEEKEDKNSQNQYNCPIVMSYPEVIKNNMDILKDNNIDMMIPVFSFENTEVLYKRVSEIFARFGVSKNEAKIAVDKALEEKYRFRKDMQNKAKEIITNLETTGNIGVVLCGRPYHCDKEIHHGIPNIINSFGIAVLTGDAVASLGSLDDELRVIDQWTYHSRLYRAATVVGKHPNLELVELNSFSCGIDAVTTDQVNEILTNYGKVHTLLKIDEISNLGAIKIRIRSLLAALEYKKSSITNKIKHTIKYKKAEFTKSMKSEYTILAPQMAPMHFDLIKHAFRAQGYNLVVLPETKEALDCGLKYVNNDACYPSILVIGELISALQSGKYDLDKTAVIISQTGGSCRATNYLGFLRKAIRDAGFEKIPIISLNTAGFEKQPGFSLSLPFIHKALIAVSYGDLLMKLLYRTRPYEVNYGESDKIYKKWNQLVIPNIYNGKISQFKKNIKSIINDFSNIEITNEEKIKVGIVGEILVKFSPFANNNLAAFIEQEGGEVYTSSLMNFIKYCIYSDIYLNEKFKGKLSSIFLRSALWVLDKYTNIVNSALSENSRFSKETSIQKTAEKTSRFISIGHQSGEGWFLMGEMIEFIEEGIPNIVCVQPFGCLPNHITGKGMIKRLKEEYENVNITPIDYDPAYSEVNQLNRIKLMLSVAKKNLKKSS

SEQ ID NO: 602 - protein, 708 aa, unidentified
  REGION 1..708: note = Description of Unknown: uncultivated organism sequence
  REGION 1..708: note = Category: MG55 effectors
  REGION 1..708: note = Description: MG55-177 effector
MKVTKRDGRVVDYDRNKIIVAIQKANAEVDRYEQVSEEKIDAIVAGIENKHVDNLQVEDIQDMIEQKLMSEHKYALAKKYIIYRYTREMVRRANTTDDSIMSLIQNSNKDVMEENSNKNAYIASTQRDLIAGEVSKDLTKRVLLPEKIVKAHEDGVLHFHDMDYYLQSIFNCCLINIGDMFEHGTVMNGKLIESPKSFQVACTVMTQIISAVASSQYGGQSVDVRHLGKYLRMTREKYERHYEEKYGDKVPAEVRKAFADDRIADELRSGVQTIQYQINTLMTTNGQSPFVTLFLNLDKDDPYIEENAMIIEEILNQRIEGIKNEKGVYVTPAFPKLIYVLDEHNCLRGGKYDYLTRLAVKCSAKRMYPDYISAKKMRENYEGNVFSCMGCRSFLTPWKDENGNYKFEGRFNQGVVSLNLPQIGILAEGDEEKFWSLLEERLALCFEALMCRHHALEGTMSNVSPIHWQYGAIARLKPGETIDKLLHNGYSTISLGYIGLYEVTKLMTGVSHTDPKGTDFALRLMKRLRLACDTWKLETGIGFGLYGTPAESLCYRFAEIDKKRFGVIPDVTDKGYYTNSYHVDVREKIDAFEKFTFESQFQNISSGGAISYVEIPNMRHNLEALEDVVRFIYDNIQYAEFNTKSDYCHVCGFDGEIIINDDLEWECPQCHNKDRNRMNVTRRTCGYLGENFWNVGKTKEINARVLHL

SEQ ID NO: 603 - protein, 731 aa, unidentified
  REGION 1..731: note = Description of Unknown: uncultivated organism sequence
  REGION 1..731: note = Category: MG55 effectors
  REGION 1..731: note = Description: MG55-178 effector
MDKELLIMTNVIKRNGKEVKFDIYKIIHAMEKANKEVAPVYQMNEYQIQAAAETVAKKIQASSHAVNVEDIQDMVETAIMEMRAYEVAQKYVRYRYKREMARKANSTDEDILALIDQANEELKQENSNKNPVINSTQRDYMAGEVSKDLTRRLLLPEDIVKAHEEGVIHFHDSDYYAQKEHNCDLINLEDMLQNGTVISETMIEKPHSFFTACNVTTQIVAQVASNQYGGQSFTLSHLAPFVDISRQKIREAVIAERKETGESMDEDIIAKIVNRRLKEEIKSGIQTIQYQLITLMTCNGQAPFVTMFMYLDEVPEGKTREDLALIIEEVLHQRMQGVKNEKGVWITPAFPKLIYVLDEDNITEDAPYYHLTKLAAQCTAKRMVPDYISAKIMREYKGGDVYPCMGCRSFLTEDKEGLGENGAHKYYGRFNQGVVTINLVDVACSSEGNMDSFWQILEERLELCHKALRLRHERLLGTVSDVAPILWQHGALARLKKGEKIDKLLYNNYSTISLGYAGLYEMCVRMLGKSHTTEEGRAFSLKVMEKLNDSCKKWREEEKISYSVYGTPMESTTYKFAKALKKRFGTIPGVTDKNYITNSYHVHVSEKIDAFSKLAFEADFQKLSPGGAISYVEVPNMQNNIPAVLSLMHFIYENIMYAELNTKSDYCCACGYDGEIQIVEDSYGKLQWRCPNCGNENQDQLSVARRTCGYIGTQFWNQGRTQEIKDRVLHL

SEQ ID NO: 604 - protein, 977 aa, unidentified
  REGION 1..977: note = Description of Unknown: uncultivated organism sequence
  REGION 1..977: note = Category: MG55 effectors
  REGION 1..977: note = Description: MG55-179 effector
MSLRIGIDIGSTTVKVVVLDEQNKLLFRSYERHYSKTRERACETLRSISDMLAGRQVKMVITGSAGLGVANASGIDFVQEVYATAAAVNTYIPGTDAVIELGGEDAKIIFFGGALEERMNGSCAGGTGAFIDQMATLMNVSVNELDALSLKHEKIYPIASRCGVFAKSDIQPILNQGGRKEDVAASIFQAVVDQTVAGLTQGRELKGKIVFLGGPLHFLMGLRERFVETLKLDEEHAIFPEDGDCFAAMGAALCSSDYDTILFEDALKKLEESVDTTTLVDTMPPLFQDVAEYGAFCARHNAKRPPQVDIKTYEGPAWLGIDAGSTTTKLALITEDGGLLYTYYHSNLGNPVAIVLEQLREIYAQCGDRIEIRGVAVTGYGEDLIKNAFSCDLGLVETMAHYKAAAHFEPDVDFIIDIGGQDMKCFKIRNGAVDSIMLNEACSSGCGSFIETFAKALGYTIADFAKLGLFAQKPVNLGSRCTVFMNSSVKQAQKDGASVEEISAGLSISIVKNAIYKVIRAASADDLGKHIVVQGGTFLNDAVLRAFEQELGRDVTRPTISGIMGAFGAALAARDLHLEKSSLLSAQALEKFTHTAKPATCGLCTNHCALTVNTFDGGRRFVSGNRCSRPLGEEPTHLPDLMRYKYAKLRALQGKGQGDGSRGRIGIPFGLNMYENLPFWFELFTRLNFEVVLSPESSRKLYVKGQRTIPSDTVCYPAKLLHGHMEALVEQGVDAIFYPCMPYNFNEGVSDNNYNCPVVAYYPELLAANVPELKKTRYLYPYFGLHRPKDFEKHAAKWFEEEFNVPKKETVAAARAAYGAYDAYKEDLRATAQQYIAQARAEGRPILVVAGRPYHMDPEINHGINDLITNYGFILITEDAVAYLEDRAPRHVLNQWTYHARMYNAARYVCTQPDMELIQLVSFGCGIDAITGDEMRSILEEGGKLYTQLKIDDISNLGAVKIRIRSLMAAIEARKAN

SEQ ID NO: 605 - protein, 1008 aa, unidentified
  REGION 1..1008: note = Description of Unknown: uncultivated organism sequence
  REGION 1..1008: note = Category: MG55 effectors
  REGION 1..1008: note = Description: MG55-180 effector
MHNEIILFAPQNNIAAGCGRRARALNTAGTMAKLMGIDVGSTTVKVTVVDGGEVLYKSYERHYAQVRETVLSELEKIKEQFGGDFCASITGSAGLGLSQRSGINFVQEVQAAFVAIRNFYPDADAAVELGGEDAKIIFITGGTEQRMNGSCAGGTGAFIDQMATLLNISVQEMDELALKAEKIYPIASRCGVFAKSDIQPLINQGAKKEDISASIFQAVVDQTVSGLAQGRRIKGKVLFLGGPLYFLKGLRRAFVRTLKLSEENAVFPENAPCFMSIGAALHSAGVKPMPIDDIISAIEHAEGTDEVVTGEPLFKDRDEYAAFVKRHRATDLTFADIATYEGDAYLGIDSGSTTTKLILITPDCRIIYSHYQSNNGQPVDIIVEKLKEIYKLAGGRIHIRGSAVTGYGEDLIKAAIKADFGIVETVAHFKAALHFNPNVDFIIDIGGQDIKCFKIKNRAIDSIMLNEACSSGCGSFIQTFARAMGMEIDKFSQLGLFAPHPVELGSRCTVFMNSAVKQAQKEGSSVEDISAGLSISIVKNAIYKVIRAASADELGDNIVVQGGTFLNDAVLRAFERETGKNVIRPGIAGLMGAFGAALYAKEMSTGESTTMGGEELKNFSYKSASTVCRGCTSKCNVNIVTFADGSRYISGNKCERGAGRKPASADLDIYSYKQERLPQVITGANAGKVRVGLPLQLGMYEQLPIWAGFFESLGFEVVLSDKSSRELYFLGQHTVASDTACYPAKLIHGHIESLLDKGVDFIFMPCESYNLDEHDSVNHYNCPIVAYYPELLKANNERLNDDNFIMPYIDLNERENAVKRLCAALKKYNIKKKVAAAALKEGFARFDKYHADVRAKGAEIIKKAREQGKQIIILAGRPYHVDNEINHGINKLLTSLNLAVLSEDAVFDEADLVKVNVLNQWTYHARLYRAAEYACRHSDVNLVQLVSFGCGLDAITTDEVRSIMEKNGRLYTQIKIDEINNLGVVKIRLRSMLAAIEESKKNKPQSAN

SEQ ID NO: 606 - protein, 739 aa, unidentified
  REGION 1..739: note = Description of Unknown: uncultivated organism sequence
  REGION 1..739: note = Category: MG55 effectors
  REGION 1..739: note = Description: MG55-181 effector
MNIIKRDGSVVEYDADKIRTAIGKANAEVHKNEKASKEEIEEIIKYIQELNKKRMLVEDIQDIIEEKLMAYNHYQLAKAYITYRYTRSLVRQANTTDQSIKELIDGTSEYWNTENSNKNARVVTTQRDYLAGITSTDISRRFLIPKDVIEAHDEGLIHFHDMDYFAQNALHNCDLIDLEDMLQNGTCINGVMIEKPHRFITAMTIATQIITAVNSSQYGGVTITLTHLAPFVRDSYLRYVKKYEDRGFSKEDVEKYAKEDLQKEVVDGVQTFQYQINSMTTTNGQAPFLSVCMYLGETEEYKPELAMIIEEVLKQRTEGMKNEKGIYVTPAFPKLLYVLEEDNAKEGSKYFYLTKLAAKCTAKRLVPDYISEKKMKEYKIDSNGNGQCFPCMGCRSFLTPYVDPKTKKPKYYGRFNQGVVTINLPDVALSSGKDEEKFWKILDERLELCHKGLQTRYERLSHATSDVAPILWQNGALARLPKGASIKPLLHGGYSTISLGYAGLYECVKYMTGDSHTDEGKGEEFGLKVMKYLNDKCNQWKEAEDIDYSVYGTPLESTTYKFSKCLQKRFGKIEGITDRGYITNSYHVPVFEKIDAFKKLSIESKFQRLSPGGAISYIETPNLQNNLDAVMQVIQYIYDNIVYAELNTKSDYCQKCGFDGEILLDENLEWYCPNCGNKDHNTLNVARRTCGYIGTNFWNKGRTQEIKERVLHLENTDDENDKTKITKEEKKVRIANQQQ

SEQ ID NO: 607 - protein, 341 aa, unidentified
  REGION 1..341: note = Description of Unknown: uncultivated organism sequence
  REGION 1..341: note = Category: MG55 effectors
  REGION 1..341: note = Description: MG55-182 effector
MAATMKDIARRTGLGLATISSYFNGGNVREKNRIKIEEAIQELHYEVNEVARGLKTNATKTIGVVIPELNNTFCAEIITGMEDVLRSHGYATIVCDCRTDKRLERDAVEFLSRKRVDGIISMPVDAEGNHLKKFQKTGKPIVLIDRRIRELSCDSVLVDNEKAAEDAMRVFFQAGHRKIGIIGGPEEISTAQERLQGYRNAYEKENIPVRESLIYHGDYTIQGGVQGIEKLVADNPDMTAVFVTNYEMTMGAVIGMNELGLKIPEKLSMIGFDNLQFARACNPKLTIVAQPTQGIAGEVAGIMLKRLEGAASEETEPITEKLGAEIIMGKSVRVLDEKENL

SEQ ID NO: 608 - protein, 990 aa, unidentified
  REGION 1..990: note = Description of Unknown: uncultivated organism sequence
  REGION 1..990: note = Category: MG55 effectors
  REGION 1..990: note = Description: MG55-183 effector
MNVNVGIDIGSTTVKIVVVRDGEIIHKHYERHFSKVREKAVELVQNAREAIGPDATIRCAITGSAGLGVAKAADIDFVQEVFATRKAVGVHVPQADVVIELGGEDAKIVFLSGQLEERMNGSCAGGTGAFIDQMAVLLDVTPGELDELAQHAEQIYTIASRCGVFAKSDIQPLLNDGARKEDVAASIFQAVVNQTVAGLAQGREIKGDVLFLGGPLFFFKGLQKRFQETLKLDDMHAHFPALAPYAIAAGAAEYAKDTQKTYSVDSLLDALEHAAGAPVVANYLPPLFESEQQYEEFKRRHGVHDVMTQNVTMYEGDAYLGIDCGSTTTKLVLIGEDHQILFHHYQSNKGNPADVIREQLTKLYELCGDRVHIVSSAVTGYGEALIQHAFGVDFGLVETVAHFRAARHFCPDVDFIIDIGGQDIKCFKIRNKCIDNISLNEACSSGCGSFIETFARSMGYSIEEFCKLGLFAKHPIDLGSRCTVFMNSSVKQAQKDGAGIDAISAGLSVSVVKNALYKVIRAHSPDDLGQHIVVQGGTFLNDAILRSFEQEIGRDVTRPAIAGLMGAYGAALHAKDNRPAQTSLVGMDVLASFRHTVKSARCGLCENHCSLTINDFGGGRRFISGNRCERPLGGTKKADLPNLYQWKLEKLRSYGESSGKPMPNGRIGLPFGLNYYELLPFWTTFLRSLGFETVLSDVSTRDIYMQGQHSIPSDTVCYPAKLMHGHIENLLEKGVDAIFYPCMTYNLDEGRATNCYNCPVVAYYPELLHANVAALADFDFMMPYFELTDHKRFIQQAAKYFCGKYPQIKKKQVAAAAEAAFQELDNYYAEIRLEGQKAIAYADTHGLDIAVIAGRPYHVDPEINHGIDQLIASFGLVIVSEDAVWQLAEEPKVHVLNQWTYHSRMYGAAKYVTRKENAQLIQLVSFGCGIDAITTDEVRAICENGGKIYTQLKIDEISNLGAAKIRIRSMLAAVEEGRKLAEQQSNQHVG

SEQ ID NO: 609 - protein, 730 aa, unidentified
  REGION 1..730: note = Description of Unknown: uncultivated organism sequence
  REGION 1..730: note = Category: MG55 effectors
  REGION 1..730: note = Description: MG55-184 effector
MQVVKRDGRIVDFDKQKILAAIEKANAEVKPRERANKENIKEIVEYITGLDKKRILVEDIQDIIEEKLMEYGKYFLAKKYITYRYTRELVRKANTTDQSIKELIDGESEYWNNENSNKNARVVTTQRDYLAGITSTDITRRFLLPKDVVEAHDEGIIHFHDADYFAQNALTNCELINLDDMLQNGTIMNGVMIEKPHRFLTAMTIATQIILAVTSSTYGGATVSLTHLAPFVKSSYDRYYKKYQDRGLSEKQCKEYAEQDTKKEVSDGVQTFNYQVNSMTNTNGQAPFLSVCMYLGETKEYKKELAMIIEEFLKQRIEGFKNEKGVYITPAFPKLLYVLEEDNIVEGRPYYYLTELAAKCTAKRMVPDYISEKKMLELKIDKNGNGNCYPCMGCRSFLTPYVDEKTNKPKYYGRFNQGVVTINLVDVALSSEKDMDKFWKIFDERLELCHKALQVRHERLSKVTSDVAPILWQNGALARLKKGESIHSLLHGGYSTISLGYAGLYECVKYMTDHSHTDNGEGKDFGVQVMQKLNDKCKEWKAVEDIDYSVYGTPIESTTYKFSKCLKKRFGVIEGITDRDYITNSYHIPVFEEIDAFSKLSIESQFQQLSPGGAISYVETPNLQNNIEAVLQIIRFIYDNIMYAELNTKSDYCQECGFDGEILIDDNLEWYCPNCGNRNHDTLNVARRTCGYIGSQFWNKGRTQEIKERVLHIDNKDAEMPKREKTKAAV

SEQ ID NO: 610 - protein, 736 aa, unidentified
  REGION 1..736: note = Description of Unknown: uncultivated organism sequence
  REGION 1..736: note = Category: MG55 effectors
  REGION 1..736: note = Description: MG55-185 effector
MEVRTKVIKRNGSEVEFHIDKIVNAISKANHEVDEIHQMNSHQIAAIADNIAKEVSTAPHAVNVEDIQDMVETGIMEMRCYEVAQKYVRYRYKREISRKSNTTDDGILSLIDQANEEVKQENSNKNPVINSTQRDYMAGEVSKDLTKRVLLPEDIVRAHEEGIIHFHDSDYFAQREHNCDLINLEDMLQNGTVISETMIEAPHSFFTACNVTTQIVAQVASNQYGGQSFTLSHLAPFVDVSRQKIREQVIEERKECGESVDDEIVAKLVETRLDREIQNGIQTIQYQLITLMTCNGQAPFVTMFMYLDEVPEGQTRNDLAKIIREVLKQRIKGVKNEKGVWITPAFPKIIYVLDEDNVTPDSPFYDLTVLAAECTAKRMVPDYISAKIMKRDKGDVYPCMGCRSFLTPDDGTCNKENIANVGGYVAGKHKYYGRFNQGVVTINLVDVACSSDGNMERFWEILEERLELCHRALRCRHERLMGTSSDVAPILWQYGALARLKKGEPIDKLLFGNYSTISLGYAGLYEMTMRMLGVSHTDPNGEEFALKVMQKLNDKCAEWRAAENISYSLYGTPMESTTYKFAKCLQKRFGIIPNVTDHNYITNSYHINVREKIDAFSKLKFESKFQKLSPGGAISYVEVPNMQQNIPAVISVMKFIYDNIMYAELNTKSDYCEVCGYDGEIKIVEEESGKLVWECPKCGNRDQDKMSVARRTCGYIGTQFWNQGRTQEIRDRVLHL

SEQ ID NO: 611 - protein, 983 aa, unidentified
  REGION 1..983: note = Description of Unknown: uncultivated organism sequence
  REGION 1..983: note = Category: MG55 effectors
  REGION 1..983: note = Description: MG55-186 effector
MALRIGIDIGSTTVKVVVLDAQNKLLFRSYERHYSKTRERTCETLRGLRGLLGGQQVQLLITGSAGLGVAKAAGLDFVQEVYATAAAVREFIPGTDAVIELGGEDAKIIFFGNTLEERMNGSCAGGTGAFIDQMATLLNVSVDELDELSLRHEKIYPIASRCGVFAKSDIQPILNQGGRKEDVAASIFQAVVDQTVAGLTQGRELKGTIVFLGGPLHFLAGLRQRFVETLHLDQDHAIFPEDGDCFAAIGAALCTEDSQPRPFEELLDLLEHAATVSTPVDTMDPLFTSQADYEAFSARHQAMAVPTVDLATYTGPAYLGIDAGSTTTKMVLIDPDCNLLYSFYHSNQGNPVSIVLPQLREIYAQCGDRVTIQGAAVTGYGEDLIKNAFSCDLGLVETVAHLNAARHFTPDVDFIIDIGGQDMKCFKIRNGAVDSILLNEACSSGCGSFIETFAKALGYTIADFSKMGLFARHPVNLGSRCTVFMNSSVKQAQKDGASVEDISAGLSISVVKNAIYKVIRAASADDLGQHIVVQGGTFLNDAVLRSFELEIGREVTRPTISGMMGAYGAALAAKDAGLTQSTLLSAEALASFTHEARPATCKLCTNHCSLTINRFDGGRKFISGNRCSRPLGQEKVDIPDLLKFKYQYLRSLQGKGEGDGSRGKIGIPFGLNMYENLPFWFTLFTTLNFEVVLSPESTRSLYLKGQQTIPSDTVCYPAKLLHGHIMALLEEGVDTIFYPCMSYNFDEHLSDNHYNCPVVAYYPDLLGVNIPALEDIKYLHPNLGLHRPKDFEKKGAQLLETEFGIPKRASVKAIRKAYAAYEDFRRLVQKKGEEYISFARETGRKILVVAGRPYHMDPEINHGINDLITSFGFVLITEDAVFQHMDKQPRRVLNQWTYHARMYNAARYVCTQPDMAFIQLVSFGCGVDAITTDELRSILEEAGELYTQLKIDDISNLGAVKIRIRSLMAALDARDAQNQKGGQ

SEQ ID NO: 612 - protein, 730 aa, unidentified
  REGION 1..730: note = Description of Unknown: uncultivated organism sequence
  REGION 1..730: note = Category: MG55 effectors
  REGION 1..730: note = Description: MG55-187 effector
MQVVKRDGRIVDFDKQKILAAIEKANAEVKPRERANKENIKEIVEYITGLDKKRILVEDIQDIIEEKLMEYGKYFLAKKYITYRYTRELVRKANTTDQSIKELIDGESEYWNNENSNKNARVVTTQRDYLAGITSTDITRRFLLPKDVVEAHDEGIIHFHDADYFAQNALTNCELINLDDMLQNGTIMNGVMIEKPHRFLTAMTIATQIILAVTSSTYGGATVSLTHLAPFVKSSYDRYYKKYQDRGLSEKQCKEYAEQDTKKEVSDGVQTFNYQVNSMTNTNGQAPFLSVCMYLGETKEYKKELAMIIEEFLKQRMEGFKNEKGVYITPAFPKLLYVLEEDNIVEGRPYYYLTELAAKCTAKRMVPDYISEKKMLELKIDKNGNGNCYPCMGCRSFLTPYVDEKTNKPKYYGRFNQGVVTINLVDVALSSEKDMDKFWKIFDERLELCHKALQVRHERLSKVTSDVAPILWQNGALARLKKGESIHSLLHGGYSTISLGYAGLYECVKYMTDHSHTDNGEGKDFGVQVMQKLNDKCKEWKAVEDIDYSVYGTPIESTTYKFSKCLKKRFGVIEGITDRDYITNSYHIPVFEEIDAFSKLSIESQFQQLSPGGAISYVETPNLQNNIEAVLQIIRFIYDNIMYAELNTKSDYCQECGFDGEILIDDNLEWYCPNCGNRNHDTLNVARRTCGYIGSQFWNKGRTQEIKERVLHIDNKDAEMPKREKTKAAV

SEQ ID NO: 613 - protein, 1438 aa, unidentified
  REGION 1..1438: note = Description of Unknown: uncultivated organism sequence
  REGION 1..1438: note = Category: MG55 effectors
  REGION 1..1438: note = Description: MG55-188 effector
MNKILHVGLDVGSTTVKIIVMDDSQNLIYENYQRHFSDTKNTVCQVLSDFANKYPDYVYTIALTGSGAMSAAKFLDLPFIQEVVACKRAVEKYIPQTDVVIELGGEDAKIIYFGKSIEQRMNGTCAGGTGAFIDQMASLLNTDAAGLNELAKNYKMIYPIASRCGVFAKTDVQPLINEGANKEDIAASIFQAVVNQTISGLACGRPIRGNIAFLGGPLNYLSELRNRFIETLNLDDNSAIIPQDAHLLVAKGAALDSVNNSAISNEKLKAKIEVLKASHDTTSTPLAPLFVTNAEYEAFKERHDKDTVPKKDLKTYKGDCFIGIDAGSTTTKLVVTDCDDNLLYSLYQSNEGNPLKSVINMLKELYKIIPQTATIRYSGVTGYGEQLIQSALNVDLNEIETIAHYTAAKRFMPNVTSIVDIGGQDMKYIKIKNGTINNIMLNEACSSGCGSFIETFAKSLNISINDFVESALDSRSPVDLGSRCTVFMNSKIKQAQKEGATVGDISAGLSYSVIKNAIQKVMKVRDISTLGDHIVVQGGTFYNNAVLRAFELIVGKDVVRPDIAGLMGAYGVAILARKQYEANLDMEYISKLSTLDEIENLQIETSHVRCGGCENHCLLTINKFNNGQKHISGNRCEKGAGITSKSKDLPNIYKYKNERLFSYKPLSEKSAIRGTIGIPRVLNMYEDYPFWFTFLTNLGFRVIISEKSTRKTYEKGMESMPSESVCYPAKLAHGHIMSLINQGIKTIFYPCIPYSRKEYKQADNHYNCPIVISYSEVLKNNVEELKNVKFLNPFLPFEPKKLAEAILSLPEFDEYHFTKKELIKAAQEAEKEYQNFKTDIRNKGQEALNYMKENNIRGIVLAGRPYHVDPEINHGIDTLITSLGLCVLSEDSISNQVTLDKKLRVVNQWVYHSRLYAAADFVGHHANLELVQLNSFGCGVDAVTTDQVEEILSSYDKMYTLIKIDEVNNLGAVRIRIRSLLASMNKRIEKNSNNSDSLGNYELQRKIFTKEMRNDYTILIPQMAPIHFELLESAVQACGYNVHLLRECTPHTVEVGLKYVNNDACYPSILTTGQMIEALESGKYDLNKTALIMSQTGGGCRATNYIGFIRKALKDAGYSDIPVISFNVVGMEKMPGFKLSPKMAEGLLKSVVYGDLLQKMLTKNRAYEKNKGVTQKKYEYWLEKCKKLVSKSSLKEFNHSIYDMVNDFEKIELDTTVEKPKVGIVGEVLIKYHPFGNNFVADKLEQEGAEVILPDFMGFIKFIATHKITFNQLIKTDSGKAKIFKFAIKLIDLLEKNEINALKNSKKGYLLPCNIFELEENVKDILSIGNQTGEGWFLTAEMVEYMQHDIPNIVCVQPFACLPNHVVGKGVIKTIRDKYPEANIAAIDYDPGASEANQTNRIKLLMAVAKDNLKIKNSKNKLLLKENNKINSKNKIYQ

SEQ ID NO: 614 - protein, 726 aa, unidentified
  REGION 1..726: note = Description of Unknown: uncultivated organism sequence
  REGION 1..726: note = Category: MG55 effectors
  REGION 1..726: note = Description: MG55-189 effector
MKIIKRSGSEVTFDISKIMDAVSKANMEVVHSERLSEEQIETISNNVESICKEMNRSLSVEEIQDLVENQIMNFRAFSVARKYITYRYKRALVRKSNSTDKQILSLLECNNEEVKQENSNKNPTVNSVQRDYMAGEVSKDITKRFLLPPDIVDAHEQGLIHFHDADYFAQHMHNCCLVNLEDMLQNGTVISETMIEKPHSFSTACNIATQAIAQIASSQYGGQSISLAHLAPFVQVSREKFIGQVRDEFEKTGIDASEEKIREVAELRVKDEIKRGVQMIQYQVITLMTTNGQAPFVTVFMYLDEVPEGQTRDDLALVTEEVLRQRMQGVKNEQGVYITPAFPKLIYVLEEDNIHEDSKYWYLTEIAAQCTAKRMVPDYISEKKMKELKVDANGNGQCFPCMGCRSFLTPYIDPETGKPKYYGRFNQGVVTLNLVDVACSSGKDMDKFWSILNERLDLCKRALMCRHYRLKGTPSDVAPILWQNGALARLKKGETIDKLLYGGYSTISLGYAGLCECTYYMKGVTHTNPEGTEFALKVMQYLNDTCKRWAAETNIDFSLYGTPLESTTYKFSKCLQKRFGKIAGVTDKNYITNSYHVHVTEQINAFEKLKFESQFQKLSPGGAISYVEVPDMQNNIPAVLKVMQYIYDNIMYAELNTKSDYCQECGYTGQIQIITDDDGKLIWECPNCGNRNQDKMNVARRTCGYIGTQFWNQGRTQEIKERVLHL

SEQ ID NO: 615 - protein, 708 aa, unidentified
  REGION 1..708: note = Description of Unknown: uncultivated organism sequence
  REGION 1..708: note = Category: MG55 effectors
  REGION 1..708: note = Description: MG55-190 effector
MKVIKRDGSTADFDSSKIIVAIQKANQVVEPEDRIDQERIEAIAHYVESKNRMRLLVEDIQDMVEHQLMDEGKFNLAKSYIIYRYTRALVRKANTTDESILSLIRNSNKDVMEENSNKNAVMASTQRDLIAGEVSKDLTRRLILPEKISKAHDEGAIHFHDADYFVQPIFNCCLINVGDMLDNGTVMNGKLIESPKSFQVACTVMTQIIASVASSQYGGQSVDIRHLGKYLRRSYEKFKLTIKAEVGDSVADEVVERLTKRRLQDELRSGVQTIQYQINTLMTTNGQSPFVTIFLNLQADDEYLEENAMIVEEILRQRLEGIKNDKGVFVTPAFPKLVYVLDEHNCLKGGKYDYITKLAVKCSAKRLYPDYISAKKMRENYEGNVFAPMGCRSFLAAWKDDEGNYKFEGRFNQGVVSLNLPQVAILAHGDEEKFWPLLDERLQLCYEALMCRHNSLKGIRSDVSPVHWQYGAIARLEKGEVIDKYLEKGYSTISLGYIGLYEMTKLMKDVSHTTPEGEEFALRVMKYLRAACDKWKKETGLGFALYGTPAESLCYRFARIDKERFGTIVDVTDKGYYTNSYHVDVREDIDAFSKFNFESQFQRISSGGAISYVEIPNMRHNLEAMEDVVRFIYDNIQYAEFNTKSDYCHVCGFDGEIIINDDLEWECPNCGNKNQTLMNVTRRTCGYLGENFWNVGKTKEIKSRVLHL

SEQ ID NO: 616 - protein, 754 aa, unidentified
  REGION 1..754: note = Description of Unknown: uncultivated organism sequence
  REGION 1..754: note = Category: MG55 effectors
  REGION 1..754: note = Description: MG55-191 effector
MKVIKRDGTIVDYDREKIRVAIQKANNEVSKKYRATDEEINEIIAYIEELKKSRILVEDIQDIIEEKLMSLDKYQLAKEYITYRYTRALVRKANTTDQSIKELIEGESEYWNNENSNKNAKVVTTQRDYLAGITSTDITRRFLLPEDVVKAHDEGIIHFHDADYFAQNALHNCDLINLEDMLQNGTNINGVMIEKPHKFLTAMTIATQIITAVTSSQYGGATVTMTHLAPFVRDSYNIYLKKYRDRKLPEDQVVKFAKEDLAKEISDGVQTFQYQINSMTTTNGQSPFLSVCLYLGETDEYKEELAMIIEEVLKQRILGMKNEKGVYITPAFPKLLYVLEEDNIHEDSKYWYLTKLAAKCTAKRMVPDYISEKKMLELKIDKNGNGNCYPCMGCRSFLTPYVDPKTNKPKYYGRFNQGVVTINLVDVALSSGGDFKKFWKIYDERLELCHKALQIRHERLAKATSDVAPILWQYGALARLKKGESIHQLLHGGYSTISLGYAGLYECVKYMTGHSHTDNGKGKDFGLEVMKKLNDKCKEWKAAEDIDYSVYGTPIESTTYKFAKCLQKRFGKIKGITDKNYITNSYHVPVFEEIDAFSKLKLESQFQQLSPGGAISYVETPNLQENLEVVLQLIKFIYDNIMYAELNTKSDYCQKCGYDGEILIDDNLEWYCPNCGNRDHSTLNVARRTCGYIGSNFWNKGRTQEIKERVLHIDNKDDVDDDCDCDDCKHQHEEENKEENVENKVQKNELVLTR

SEQ ID NO: 617 - protein, 978 aa, unidentified
  REGION 1..978: note = Description of Unknown: uncultivated organism sequence
  REGION 1..978: note = Category: MG55 effectors
  REGION 1..978: note = Description: MG55-192 effector
MAKFMGIDVGSTTVKVCVLSESLEILYTSYERHFARVKECVLGQLSVVKEKFGGDFRVCITGSAGLGLAERSGIPFVQEVQAAFTAIRQYYPDADAAVELGGEDAKIIFITGGTEQRMNGSCAGGTGAFIDQMATLLDISVSEMDALSLRAERVYPIASRCGVFAKSDIQPLLNQGARREDIAASIFQAVVDQTVAGLAQGRRIKGKVLFLGGPLYFLQGLRRAFRQTLGLDEEHAVFPENAPSFMAIGAALYAAGTDAMPLAEIVRRIRDARGSDDIVTGEPLFTDRAEYDAFVARHKAHDLAFEDIRTYRGDAYLGIDSGSTTTKLVLITPDCKLLYQHYQSNNGQPLDIVVERLREIYALSEGRVRIAGAATTGYGEDLIKAAIRADFGIVETVAHFKAALHFDPKVDFIIDIGGQDIKCFKIKNGAIDNIMLNEACSSGCGSFIQTFARAMGMEIDEFSKLGLFAKHPVELGSRCTVFMNSSVKQAQKEGAGIEDISAGLSASIVKNAIYKVIRAKTPDELGSNILVQGGTFLNDAVLRCFELETGKQVVRPGIAGLMGAFGAALYAKENVRGESTVLDAQALRTFAYTTRSHVCKGCTSHCNVNVIGFSDGRKFISGNKCEKGAGLKPHSDELDIYHYKYERLLQCAEGARGTRGKVGLPVVLGFYEQLPLWAGFFEACGFEVLFSERSSRSLYFRGQHTVASDTVCYPAKLAHGHIESLLDAGADFIFYPCESYNLDEHDSTNHYNCPVVAYYPELLKANNERLTQDNFIMPYLDLNDERTTVRALHRALKKFGLTPRLIRKGLAEGFRRLALFHADVERKGEEIAAAARAERRPIVVLAGRPYHVDPEINHGIGKLLTSLGVAVLSEDAVFRKGRQVLVNVLNQWTYHARLYRAAEYVAENEDMELVQLVSFGCGIDAITTDEVRALLESRGKLYTQIKIDEINNLGVVKIRLRSMIAAVEEQKRRNHEDR

SEQ ID NO: 618 - protein, 723 aa, unidentified
  REGION 1..723: note = Description of Unknown: uncultivated organism sequence
  REGION 1..723: note = Category: MG55 effectors
  REGION 1..723: note = Description: MG55-193 effector
MKIIKRSGQEVKFDINKIVEAIKKANLDANEKNQLSEEVIFKCAKNVEKECKNKGRILTVEEVQDLVEDQLMSVDAFDVARKYITYRYRRALARKANTTDQQILTLLECNNQNVKEENSNKNPTVNSVQRDYMAGEVSKDITKRILLPKDIVDAHEQGIIHFHDADYFAQHMHNCDLVNLEDMLQNGTVISGTLIEKPKSFSTACNIATQIIAQVASNQYGGQSISITHLAPFVEISRQKITKDVKEELKDLDISEEKIQEIIHKRLLDEIKKGVQTIQYQIVTLLTTNGQAPFVTIFMYLNEARSEQEKKDIALITEEILKQRYQGVKNEKGVWITPAFPKLIYCLEDDNVEPGSPYYYLTELAAKCTAKRMVPDYISEKIMLQLKVDSKGQGHCYTCMGCRSFLTPYINDKGEPQYYGRFNQGVVTINLVDVALSSNKDVKQFWKIFDERLDLCYRALMERHKRLLGTKSDVAPILWQYGALARLNKGETIDKLLFNGYSTISLGYAGLYECVYYMTGKSHTDPEATPFALEIMQHMNDACKKWKEKEHIDFSLYGTPLESTTYKFAKCLQKRFGIIKGVTDKNYITNSYHIVVSEHIDAFSKLAFESQFQKLSPGGAISYVEVPNMENNIPAVMNVIKFIYDHIMYAELNTKSDYCQCCGYTGEIQIKEDEDGKLFWECPQCGNRDQNKMNVARRTCGYIGSQFWNQGRTQEIRDRVLHL

SEQ ID NO: 619 - protein, 720 aa, unidentified
  REGION 1..720: note = Description of Unknown: uncultivated organism sequence
  REGION 1..720: note = Category: MG55 effectors
  REGION 1..720: note = Description: MG55-194 effector
MKIIKRSGAEAVFDISKIIIAINKANHEVVEAERLTADQIKEIAQYIEDSCKDANHALNVEDIQDLVEDQLMDKRAFSVARKYITYRYKRALVRKSNSTDEQILSLIECNNEEVKQENSNKDSTVNSVQRDYMAGEVSKDITRRFLLPEDIVEAHEQGIIHFHDADYFAQHMHNCDLVNLEDMLQNGTVISGTRIDKPHSFSTACNIATQIIAQVASSQYGGQSISLAHLVPFVQISREKIHAELVQTLKESDVELSEEKINSIVERRLHAEIERGVQVIQYQVVTLMTTNGQSPFVTVFMYLNEAKNEQEKKDLAMIIEEVLDQRYQGVKNEDGVWITPAFPKLIYVLEEDNIHEDSEYYYLTKKAAKCTAKRMVPDYISEKKMKELKDGNCYTCMGCRSFLTVYHDEDGKPKFYGRFNQGVVTLNLVDLACSSGGDFEKFWKLFDERLDLCYRALMARHNRLKGTPSDVAPILWQYGALARLKKGETIDKLLYGGYSTISLGYAGLCECTRYMTGKPHTDPAATPFALKVMQRLNDACKEWKEKENIDFSVYGTPLESTTYKFAKCLQKRFGVIPGVTDKNYITNSYHVHVTENIDAFTKLKFESQFQALSPGGAISYVEVPNMQDNLEAVLSVMKFIYENIMYAELNTKSDYCQVCGYDGEIQIVKDDDGKLVWECPHCHNRDQDKMNVARRTCGYIGSQFWNQGRTQEIKERVLHL

SEQ ID NO: 620 - protein, 720 aa, unidentified
  REGION 1..720: note = Description of Unknown: uncultivated organism sequence
  REGION 1..720: note = Category: MG55 effectors
  REGION 1..720: note = Description: MG55-195 effector
MKIIKRSGAEAVFDISKIIIAINKANHEVVEAERLTADQIKAIAQYIEDSCKDANHALNVEDIQDLVEDQLMDKRAFSVARKYITYRYKRALVRKSNSTDEQILSLIECNNEEVKQENSNKDSTVNSVQRDYMAGEVSKDITRRFLLPEDIVEAHEQGIIHFHDADYFAQHMHNCDLVNLEDMLQNGTVISGTRIDKPHSFSTACNIATQIIAQVASSQYGGQRISLAHLVPFVQISREKIHAELVQTLKESDVELSEEKINSIVERRLHAEIERGVQVIQYQVVTLMTTNGQSPFVTVFMYLNEAKNEQEKKDLAMIIEEVLDQRYQGVKNEDGVWITPAFPKLIYVLEEDNIHEDSEYYYLTKKAAKCTAKRMVPDYISEKKMKELKDGNCYTCMGCRSFLTVYHDEDGKPKFYGRFNQGVVTLNLVDLACSSGGDFEKFWKLFDERLDLCYRALMARHNRLKGTPSDVAPILWQYGALARLKKGETIDKLLYGGYSTISLGYAGLCECTRYMTGKPHTDPAATPFALKVMQRLNDACKEWKEKENIDFSVYGTPLESTTYKFAKCLQKRFGVIPGVTDKNYITNSYHVHVTENIDAFTKLKFESQFQALSPGGAISYVEVPNMQDNLDAVLSVMKFIYENIMYAELNTKSDYCQVCGYDGEIQIVKDDDGKLVWECPHCHNRDQDKMNVARRTCGYIGSQFWNQGRTQEIKERVLHL

SEQ ID NO: 621 - protein, 720 aa, unidentified
  REGION 1..720: note = Description of Unknown: uncultivated organism sequence
  REGION 1..720: note = Category: MG55 effectors
  REGION 1..720: note = Description: MG55-196 effector
MKIIKRSGAEAVFDISKIIIAINKANHEVVEAERLTADQIKAIAQYIEDSCKDANHALNVEDIQDLVEDQLMDKRAFSVARKYITYRYKRALVRKSNSTDEQILSLIECNNEEVKQENSNKDSTVNSVQRDYMAGEVSKDITRRFLLPEDIVEAHEQGIIHFHDADYFAQHMHNCDLVNLEDMLQNGTVISGTRIEKPHSFSTACNIATQIIAQVASSQYGGQSISLAHLVPFVQISREKIHAELVQTLKESDVELSEEKINSIVERRLHAEIERGVQVIQYQVVTLMTTNGQSPFVTVFMYLNEAKNEQEKKDLAMIIEEVLDQRYQGVKNEDGVWITPAFPKLIYVLEEDNIHEDSEYYYLTKKAAKCTAKRMVPDYISEKKMKELKDGNCYTCMGCRSFLTVYHDEDGKPKFYGRFNQGVVTLNLVDLACSSGGDFEKFWKLFDERLDLCYRALMARHNRLKGTPSDVAPILWQYGALARLKKGETIDKLLYGGYSTISLGYAGLCECTRYMTGKPHTDPAATPFALKVMQRLNDACKEWKEKENIDFSVYGTPLESTTYKFAKCLQKRFGVIPGVTDKNYITNSYHVHVTENIDAFTKLKFESQFQALSPGGAISYVEVPNMQDNLDAVLSVMKFIYENIMYAELNTKSDYCQVCGYDGEIQIVKDDDGKLVWECPHCHNRDQDKMNVARRTCGYIGSQFWNQGRTQEIKERVLHL

SEQ ID NO: 622 - protein, 720 aa, unidentified
  REGION 1..720: note = Description of Unknown: uncultivated organism sequence
  REGION 1..720: note = Category: MG55 effectors
  REGION 1..720: note = Description: MG55-197 effector
MKIIKRSGAEAVFDISKIIIAINKANHEVVEAERLTADQIKAIAQYIEDSCKDANHALNVEDIQDLVEEQLMDKRAFSVARKYITYRYKRALVRKSNSTDEQILSLIECNNEEVKQENSNKDSTVNSVQRDYMAGEVSKDITRRFLLPEDIVEAHEQGIIHFHDADYFAQHMHNCDLVNLEDMLQNGTVISGTRIDKPHSFSTACNIATQIIAQVASSQYGGQSISLAHLVPFVQISREKIHAELVQTLKESDVELSEEKINSIVERRLHAEIERGVQVIQYQVVTLMTTNGQSPFVTVFMYLNEAKNEQEKKDLAMIIEEVLDQRYQGVKNEDGVWITPAFPKLIYVLEEDNIHEDSEYYYLTKKAAKCTAKRMVPDYISEKKMKELKDGNCYTCMGCRSFLTVYHDEDGKPKFYGRFNQGVVTLNLVDLACSSGGDFEKFWKLFDERLDLCYRALMARHNRLKGTPSDVAPILWQYGALARLKKGETIDKLLYGGYSTISLGYAGLCECTRYMTGKPHTDPAATPFALKVMQRLNDACKEWKEKENIDFSVYGTPLESTTYKFAKCLQKRFGVIPGVTDKNYITNSYHVHVTENIDAFTKLKFESQFQALSPGGAISYVEVPNMQDNLDAVLSVMKFIYENIMYAELNTKSDYCQVCGYDGEIQIVKDDDGKLVWECPHCHNRDQDKMNVARRTCGYIGSQFWNQGRTQEIKERVLHL

SEQ ID NO: 623 - protein, 610 aa, unidentified
  REGION 1..610: note = Description of Unknown: uncultivated organism sequence
  REGION 1..610: note = Category: MG55 effectors
  REGION 1..610: note = Description: MG55-198 effector
MEENSNKNATIASTQRDLIAGEVSKDFAKRDLLPKKIVEAHENAVLHFHDMDYFLQPIFNCCLLNISDMLDNGTVINGKMIESPKSFQVACTVMTQIIAAVASGEYGGQSVKISHLAKYLANDYKKSLKKVREADGTLTAEQVEKIAKAETQEHLKSGIQTIQYQINTLMTTNGQTPFVTLFLQLDESLGYMDEQAAVIEEILKQRIVGMKNEAGVYVTPPFPKLIYVLDECNCLKGGKYDWLTKLAVKCSAKRMYPDYISAKKMRENYEGEVFSCMGCRSFLSPWKDENGNYKWEGRFNQGVVSLNLPQIGILSQSENGPDMYKFWQLMEERTSLCFEALMCRHKALLGTKSDISPIHWQYGGIARLKKGEVIDPLLKDGYSTISLGYIGLYEVTKLMTGKSHTTKEGEEFALKVMRYLKNKCNMWKDMTGIGFGLYGTPAESLCYRFARIDKEKFGEIKDITDKGYYTNSYHVDVREKINAFDKLSFESQFQQISSGGAISYIEIPNMENNLEVLEKVVKFIYENIQYAEFNTKSDYCMNCGFDGEIILNDENEWECPQCGNKDHSKMSVTRRTCGYLGSQFWNKGKTLEIKQRVVHFDIPVVENGGN

SEQ ID NO: 624 - protein, 1005 aa, unidentified
  REGION 1..1005: note = Description of Unknown: uncultivated organism sequence
  REGION 1..1005: note = Category: MG55 effectors
  REGION 1..1005: note = Description: MG55-199 effector
MSEIKLQQKAAYTLGIDVGSTTVKTVILDADHHVLHSTYQRHFSKVKEAVSEQLQAIIKEHPATLFSVHMTGSAGLGLATAAKIPFVQEVHAAFLAVKERYPKADAVIELGGEDAKIIFLTGGVEQRMNGSCAGGTGAFIDQMATLLDVTVDELDQMALQADRTYPIAARCGVFAKSDIQPLLNQGAKRENVAASIYQAVVDQTVSGLAQGRKIQGHVLFLGGPLSFLQGLRNAFMQTLHLDAEHAIFPVDGRTFVAYGCALAAENSADKPVTGEALLKQIESAETNHTVIADKPLFGYQEEYDRFRERHAQNDVVHGDLHTYQGNAYLGVDAGSTTTKVALIGEDNSLLYSFYETNKGQPLECVKRALETLYQKKNPNLKICGSAVTGYGEEMLKAGLGIDFGIVETVAHFRAAEFFCPDVDFIIDIGGQDIKCFQIKNGAIDSIMLNEACSSGCGSFIQAFANALGYDVAEFAKLGLFAERPVDLGSRCTVFMNSSVKQAQKDGATVADISAGLSGSIVKNAIYKVIRAKSPEDLGKHIVVQGGTFLNDAVLRCFEREMGRDVIRPAISGLMGAFGAAIYAKEHTSGSSTLLSLMDLHTLTYRTQNTTCNGCTAHCNLQILRFSNGKRFIAGNRCERGAGVSKKDQIPNLVDWKYETLRSLTDRQPEQPKATVGLPMALHYYDQLPLWYTFFTDLGFAVKLSEESTRKTYYKGQSTIPSDTVCYPAKLAHGHIESLLEQNVDFIFYPCMTYNLDEGDSDNHYNCPVVAYYPELLLANNEKLNEQNFLHPFLDLNRRKHLITVLYACLSDYATKKEIAAALEHGFAALEQYRNQIAQTAQEIVRQARAAGKTILVLAGRPYHIDPEINHGIHKLISSLGMAVITEDSIAGLAHTPELQALNQWTYHSRMYRAAQYVTTQPDFQLVQLVSFGCGIDAITTDEVRRILEQSGKLYTQLKIDEISNLGAAKIRLRSLKAAIGADVPPKPAAAPSETAPKNEKEPVSV

SEQ ID NO: 625 - protein, 709 aa, unidentified
  REGION 1..709: note = Description of Unknown: uncultivated organism sequence
  REGION 1..709: note = Category: MG55 effectors
  REGION 1..709: note = Description: MG55-200 effector
MIKVQKRDGRIVNYDREKIVRAIQKANAEVDAAERAGEALIDGILDDVEKECEDVVHVESIQDMIESRLVKQNKYTLSKKYMIYRYQRALLRKANTTDESILKLIRNENKELAEENSNKNTILASTQRDYIAGEVSRDLTKRMLLPERISMAHEQGAIHFHDADYFVQPIFNCCLINIADMLDNGTVMNEKMIESPKSFQVACTVMTQIIAAVASNQYGGQSVDMRHLGKYLRKSSNKFHRQIREEFGDSLDNEAVEKMARIRLRDELKSGVQTIQYQINTLMTTNGQAPFVTLFLRLDDEDEYIDENALIVEEILRQRLEGIKNEAGVYVTPAFPKLIYVLDENNCLKGGKYDYITKLAVRCSSKRMYPDYISAKKMKENYEGNVFSCMGCRSFLSPWKDENGEYKFEGRFNQGVVSLNLPQIGILAKGDEEVFWKLLDERLAICFEALMCRHKALEGTLSDVSPIHWQYGAIARLPKGAKIDPLLHDGYSTISLGYIGIYEMTKLMKGVSHTDPAGEEFALRVMNRMKEAVECWKEETGLGFGLYGTPAESLCYRFARIDRERFGLIENVTDKGYYTNSYHVDVREKIDAFSKFTFESQFQKISSGGAISYVEVPNMAKNLEAMEEVVKFIYDNIQYAEFNTKSDYCQECGFDGEIIINEDMEWECPQCHNKNKDKMNVTRRTCGYLGENFWNAGKTKEIKSRVLHL

SEQ ID NO: 626 - protein, 972 aa, unidentified
  REGION 1..972: note = Description of Unknown: uncultivated organism sequence
  REGION 1..972: note = Category: MG55 effectors
  REGION 1..972: note = Description: MG55-201 effector
MQIGLDIGSTTIKIAVLDDAGQLQFSKYERHYSQIAEKMQQLLAELHVRMPLLKTARLAISGSAGIGIAESCGLQFAQEVFAEKICTERLNPGTEAVIELGGEDAKLLFLGRHFDARMNDSCAGGTGAFIDQMASLLDVATEDMNALAQQSSTRYTIASRCGVFAKSDIQPLLNQGAAKADLAASIFDAVASQAVTGLAKGRPITGKVLYLGGPLTFMSELRHSFDKILQIEGSCPENSLYYVAMGAAFCAENKVDLTELPAKLAAVGAQRDFDHLEPLFAGQAEYDEFMERHSKERIESGDISAADAAYIGIDAGSTTIKIAVISPSGQLLDSFYQSNKGNPVIAIKEYLQNFYIKYPHCRILGSAVTGYGEDLIRNGFSVDYGIVETMAHFIAAKTLQPDVDFILDIGGQDIKCLKIHNGCIDNIFLNEACSSGCGSFLQTFAEILGYSAEEFARIGLFADKPVNLGSRCTVFMNSSVKQAQKDGATVANISAGLSLSIVKNALYKVIRPGSKESIGKHIVVQGGTFLNDCVLRAFEKEMGLKVVRPNIAGLMGAYGAAIYARSRHQETGHVSTLADAAALKDFFHEVKAVTCGLCSNHCHLTVNTFASGKRFISGNRCERPVTHCAPDDTFNLYRQKLQLLEGLKGVPGKRGRIGLPMGLNMYELLPFWHAFFTRLGFEVITSPIYDKTIYQKGQNTIPSDTVCYPAKLMHGHIKWLLEHGINTIFYPCMTYNVDENSAENCYNCPVVAYYPEVLHANMHDLDNATYIFDYLGLGHKKVLLKKLQQICKEHFPDIGSSELKAALQEAYAAYNKFEAQVKELGQTIINTARSQHKPIVVLAGRPYHIDPKVNHSIDRLITTMGAALVSEDAVSSHISMQELNDDLQVLNQWTYHSRLYAAAKYVSRSSDMYMVHLVSFGCGCDAITADECRRILEEHGQIYTQIKIDDIDNLGAAKIRLRSLFAAAGLES

SEQ ID NO: 627 - protein, 988 aa, unidentified
  REGION 1..988: note = Description of Unknown: uncultivated organism sequence
  REGION 1..988: note = Category: MG55 effectors
  REGION 1..988: note = Description: MG55-202 effector
MSLRIGIDIGSTTVKVVVLDEQNKLLFRSYERHYSKTRERACETLRSISDMLAGRQVKMVITGSAGLGVANASGIDFVQEVYATAAAVNTYIPGTDAVIELGGEDAKIIFFGGALEERMNGSCAGGTGAFIDQMATLMNVSVDELDALSLKHEKIYPIASRCGVFAKSDIQPILNQGGRKEDVAASIFQAVVDQTVAGLTQGRELKGKIVFLGGPLHFLMGLRERFVETLKLDEEHAIFPEDGDCFAAMGAALCSSDYDTILFEDALKKLEESVDTTTLVDTMPPLFQDVAEYGAFCARHNAKRPPEVDIKTYEGPAWLGIDAGSTTTKLALITGDGGLLYTYYHSNLGNPVAIVLEQLREIYAQCGDRIEIRGVAVTGYGEDLIKNAFSCDLGLVETMAHYKAAAHFEPDVDFIIDIGGQDMKCFKIRNGAVDSIMLNEACSSGCGSFIETFAKALGYTIADFAKLGLFAQKPVNLGSRCTVFMNSSVKQAQKDGASVEEISAGLSISIVKNAIYKVIRAASADDLGKHIVVQGGTFHNDAVLRAFEQELGRNVTRPTIAGIMGAFGAALAARDLRLNASGLLSEAALQSFTHSAKPVTCGLCTNHCALTVNQFDGGRKFISGNRCSRPLGKEKVELPDLMNYKYKKLRAMEGKGEGTGVRGRMGIPFGLNMYENLPFWFTFFTKLNFEVVLSPESSRKLYIKGQHTIPSDTVCYPAKLLHGHVEALVEEGVDAIWYPCMSYNNDEGIGDNHFNCPVVAYYPELLAANVPALKQTKFLNPYVGLWRHKDFTKRIAKMMEEEFSIPKKESVAAAKAAYAAYDDYVHDVRATGKKYIEYARAMNMPILVVCGRPYHIDPEINHGINDLITSFGFVLITEDALSYLEGYAPRKVLNQWTFQSRMYNAARYVCTQPDMQVVQLVSFGCGTDAITTDELRSILEEGGKLYTQLKIDDISNLGAVRIRIRSLIAAIDARKQQRPQNGQSAANA

SEQ ID NO: 628 - protein, 733 aa, unidentified
  REGION 1..733: note = Description of Unknown: uncultivated organism sequence
  REGION 1..733: note = Category: MG55 effectors
  REGION 1..733: note = Description: MG55-203 effector
MKIIKRNGQEADFDLDRIVKAVTAANNEVPEYQRMTEMEILCVADNSKRQIDEFHYAVSVEEIQDIVERQIMKFAPVVAQTYIRYRHKRELARQANTTDAAILSLLDYENEEVKQENSNKNPVVASVQRDYMAGEVSKDLSRRVILPKDVVEAHDKGIIHFHDMDYFSQHIFNCCLINLEDMLQNGTVISGVQIDKPKSFQTACTVATQIISTVASNQYGGQSVSLSHLAPFVEVSRQKWQERVRETLDGVAPEAMINELAENLLYKECEAGMQTIQYQVITLMTTNGQAPFITVEMYLGEVKDPQTKKDLAMLIEIMLKQRILGVKNEKGIYITPAFPKIVYVLEEDNASEGSPYWYLTELAAKCTAKRMVPDYVSEKIMLQYKVDQNGEGHCYPPMGCRSFLTPYVDKDGKPKYFGRFNQGVVTINLPDVALSSGGDMEKFWNIFEERLELCHRALQARHERLKGTLSDVSPIHWQHGAIARIEKGKPIDEFLYGGYSTISLGYAGLFECVKYMTGESHTSEAGKPFALEVMQKLNDKCAEWKAAENIAYSVYGTPLESTTYKFAKALQRRFGIIKDVTDHNYITNSYHVNVREEIDAFSKLSFESEFQRLSPGGAISYIEVPDMQDNIPAVLDIIKFIYDNIMYAELNTKSDYCQECGWDGQIEIVSDESGKLIWKCPNCGNTDQSKMNVARRTCGYIGTQFWNQGRTQEIKDRVVHVGVQDYYAGEENG

SEQ ID NO: 629 - protein, 720 aa, unidentified
  REGION 1..720: note = Description of Unknown: uncultivated organism sequence
  REGION 1..720: note = Category: MG55 effectors
  REGION 1..720: note = Description: MG55-204 effector
MKIIKRSGAEAVFDISKIIIAINKANHEVVEAERLTADQIKEIAQYIEDSCKDANHALNVEDIQDLVEDQLMDKRAFSVARKYITYRYKRALVRKSNSTDEQILSLIECNNEEVKQENSNKDSTVNSVQRDYMAGEVSKDITRRFLLPEDIVEAHEQGIIHFHDADYFAQHMHNCDLVNLEDMLQNGTVISGTRIDKPHSFSTACNIATQIIAQVASSQYGGQSISLAHLVPFVQISREKIHAELVQTLKESDVELSEEKINNIVERRLHAEIERGVQVIQYQVVTLMTTNGQSPFVTVFMYLNEAKNEQEKKDLAMIIEEVLDQRYQGVKNEDGVWITPAFPKLIYVLEEDNIHEDSEYYYLTKKAAKCTAKRMVPDYISEKKMKELKDGNCYTCMGCRSFLTVYHDEDGKPKFYGRFNQGVVTLNLVDLACSSGGDFEKFWKLFDERLDLCYRALMARHNRLKGTPSDVAPILWQYGALARLKKGETIDKLLYGGYSTISLGYAGLCECTRYMTGKPHTDPAATPFALKVMQRLNDACKEWKEKENIDFSVYGTPLESTTYKFAKCLQKRFGVIPGVTDKNYITNSYHVHVTENIDAFTKLKFESQFQALSPGGAISYVEVPNMQDNLDAVLSVMKFIYENIMYAELNTKSDYCQVCGYDGEIQIVKDDDGKLVWECPHCHNRDQDKMNVARRTCGYIGSQFWNQGRTQEIKERVLHL

SEQ ID NO: 630 - protein, 979 aa, unidentified
  REGION 1..979: note = Description of Unknown: uncultivated organism sequence
  REGION 1..979: note = Category: MG55 effectors
  REGION 1..979: note = Description: MG55-205 effector
MQIGLDIGSTTIKIAVMDDAGNLLFHKYERHYSQIAEKILALHKELMTKFPTLHSARLAISGSGGIGIADSCGLQFIQEVFAEKICAEKLNPGTDAVIELGGEDAKILFLGRHFDARMNDSCAGGTGAFIDQMASLLNVETPQMNELAQQAQNTYTIASRCGVFAKSDIQPLLNQGAEKSDLAASIFHAVASQAITGLAKGRHISGNVLYLGGPLTFMSCLRDAFDSVLNIKGVCPENSLLYVAMGAAFCAEHEVDLTTLPEKLQAAAAQHSFEHLPPLFKNEGEYTVFKKRHSKESVAIGTPAEASEAFIGIDSGSTTIKIAVMSPDGKLLDSFYQSNKGNPVVAVRNYLTDFYTKYPHCRLLAGAVTGYGEELIRHGFGVDYGIVETMAHFYAAQYLEPEVDFILDIGGQDMKCLKIHNGAIDNIFLNEACSSGCGSFLQTFAEILGYTAEQFAQIGLKADMPVDLGSRCTVFMNSSVKQAQKDGASVANISAGLSISIVKNALYKVIRPASKEAIGKHIVVQGGTFLNDCVLRAFEQEMDLNVIRPNIAGLMGAYGAALYAQRRYKDAPHQTTLLNLQQLGEFVHTVKGMTCGLCNNHCHLTVNTFAGGKRFISGNRCERPITHMAPKDELNLYRQKLQLLKELPVNETPKRGIMGIPMGLNMYELLPFWNALLSSLGFKVVHSPIEDKTIYRLGQGTIPSDTVCYPAKLMHGHIKWLLQQGITNIFYPCMTYNIDEQGTENCYNCPVVAYYPEVLHANIRDLNKPEIHFFYDYLGLLHKKKLVKKLQEMFSKAYPDITKDEIRKAVDAAFNAFYDYEAQVKAKGQQIINKAREEHKPIVVLAGRPYHIDPKVNHSIDRLITNMGAALVSEDAVSSHIKTKELNRDLQVLNQWTYHGRLYAAAEYVAQNPDMHLIQLVSFGCGCDAITADECRRLLEERGRIYTQIKIDDIDNLGAAKIRIRSLFSAAQLFDIDNN

SEQ ID NO: 631 - protein, 708 aa, unidentified
  REGION 1..708: note = Description of Unknown: uncultivated organism sequence
  REGION 1..708: note = Category: MG55 effectors
  REGION 1..708: note = Description: MG55-206 effector
MKVIKRDGSTADFDSSKIIVAIQKANQVVEPEDRIDQERIEAIAHYVESKNRMRLLVEDIQDMVEHQLMDEGKFNLAKSYIIYRYTRALVRKANTTDESILSLIRNSNKDVMEENSNKNAVMASTQRDLIAGEVSKDLTRRLILPEKISKAHDEGAIHFHDADYFVQPIFNCCLINVGDMLDNGTVMNGKLIESPKSFQVACTVMTQIIASVASSQYGGQSVDIRHLGKYLRRSYEKFKLTIKAEVGDSVADEVVERLTKRRLQDELRSGVQTIQYQINTLMTTNGQSPFVTIFLNLQADDEYLEENAMIVEEILRQRLEGIKNDKGVFVTPAFPKLVYVLDEHNCLKGGKYDYITKLAVKCSAKRLYPDYISAKKMRENYEGNVFAPMGCRSFLAAWKDDEGNYKFEGRFNQGVVSLNLPQVAILAHGDEEKFWPLLDERLQLCYEALVCRHNSLKGIRSDVSPVHWQYGAIARLEKGEVIDKYLEKGYSTISLGYIGLYEMTKLMKDVSHTTPEGEEFALRVMKYLRAACDKWKKETGLGFALYGTPAESLCYRFARIDKERFGTIADVTDKGYYTNSYHVDVREDIDAFSKFNFESQFQRISSGGAISYVEIPNMRHNLEAMEDVVRFIYDNIQYAEFNTKSDYCHVCGFDGEIIINDDLEWECPNCGNKNQTLMNVTRRTCGYLGENFWNVGKTKEIKSRVLHL

SEQ ID NO: 632 - protein, 723 aa, unidentified
  REGION 1..723: note = Description of Unknown: uncultivated organism sequence
  REGION 1..723: note = Category: MG55 effectors
  REGION 1..723: note = Description: MG55-207 effector
MKVIKRDKKEVEFDSTKIEAAIKKARNACTSSNLSDENIADIADYITYKCKKLDHSVSVEDIQDMVEDQLMAHGEFALAKEYVKYRYNRQLVRKSNTTDEKILSLIELQNEEVKQENSNKNPTINSTQRDYMAGEVSRDLTNRILLPKDIVEAHEKGIIHFHDSDYFAQHMHNCDLVNLEDMLQNGTVISGTLIEKPHSFHTACNVATQIVAQVASAQYGGQSISLAHLAPFVDISRKKIYNKFRKNFEELGINVTEDKLSELVEKEVKEEINRGVQTIQYQVVTLMTTNGQTPFVTVFMYLGEAKNEREKADLALIIEEVLRQRIQGVKNEKGAWITPAFPKLIYVLEEQNITEDAPYFYLTELAAKCTAKRMVPDYISEKIMLELKKDKNGEGHCYTCMGCRSFLTPYLDKNGKPKYYGRFNQGVVTINLVDVACSSHKDINKFWEIFDERLELCHRALMCRHKRLKGTPSDVAPILWQHGALARLKKGETIDKLLYGGYSTISLGYAGLCECTRYMTGKSHTDPSATPFALEVMKHMNDACAKWKEEENIDFSLYGTPLESTTYKFAKCLQKRFGIIKGVTDKAYITNSYHVHVTEEIDAFTKLAFESQFQKLSPGGAISYVEVPNMQNNIPAVIQVIQFIYDNIMYAELNTKCDYCQKCGYDGEIKVVKKGGKYIWQCPNCGNTDQRFMNVVRRTCGYLGSNYWSHGRTEEIAERKLHL

SEQ ID NO: 633 - protein, 720 aa, unidentified
  REGION 1..720: note = Description of Unknown: uncultivated organism sequence
  REGION 1..720: note = Category: MG55 effectors
  REGION 1..720: note = Description: MG55-208 effector
MKIIKRSGAEAVFDISKIIIAINKANHEVVEAERLTADQIKEIAQYIEDSCKDANHALNVEDIQDLVEDQLMDKRAFSVARKYITYRYKRALVRKSNSTDEQILSLIECNNEEVKQENSNKDSTVNSVQRDYMAGEVSKDITRRFLLPEDIVEAHEQGIIHFHDADYFAQHMHNCDLVNLEDMLQNGTVISGTRIDKPHSFSTACNIATQIIAQVASSQYGGQSISLAHLVPFVQISREKIHAELLQTLKESGVELSEEKINSIVERRLHAEIERGVQVIQYQVVTLMTTNGQSPFVTVFMYLNEAKNEQEKKDLAMIIEEVLDQRYQGVKNEDGVWITPAFPKLIYVLEEDNIHEDSEYYYLTKKAAKCTAKRMVPDYISEKKMKELKDGNCYTCMGCRSFLTVYHDEDGKPKFYGRFNQGVVTLNLVDLACSSGGDFEKFWKLFDERLDLCYRALMARHNRLKGTPSDVAPILWQYGALARLKKGETIDKLLYGGYSTISLGYAGLCECTRYMTGKPHTDPAATPFALKVMQRLNDACKEWKEKENIDFSVYGTPLESTTYKFAKCLQKRFGVIPGVTDKNYITNSYHVHVTENIDAFTKLKFESQFQALSPGGAISYVEVPNMQDNLDAVLSVMKFIYENIMYAELNTKSDYCQVCGYDGEIQIVKDDDGKLVWECPHCHNRDQDKMNVARRTCGYIGSQFWNQGRTQEIKERVLHL

SEQ ID NO: 634 - protein, 720 aa, unidentified
  REGION 1..720: note = Description of Unknown: uncultivated organism sequence
  REGION 1..720: note = Category: MG55 effectors
  REGION 1..720: note = Description: MG55-209 effector
MKIIKRSGAEAVFDISKIIIAINKANHEVVEAERLTADQIKEIAQYIEDSCKDANHALNVEDIQDLVEDQLMDKRAFSVARKYITYRYKRALVRKSNSTDEQILSLIECNNEEVKQENSNKDSTVNSVQRDYMAGEVSKDITRRFLLPEDIVEAHEQGIIHFHDADYFAQHMHNCDLVNLEDMLQNGTVISGTRIDKPHSFSTACNIATQIIAQVASSQYGGQSISLAHLVPFVQISREKIHAELLQTLKESGVELSEEKINSIVERRLHAEIERGVQVIQYQVVTLMTTNGQSPFVTVFMYLNEAKNEQEKKDLAMIIEEVLDQRYQGVKNEDGVWITPAFPKLIYVLEEDNIHEDSEYYYLTKKAAKCTAKRMVPDYISEKKMKELKDGNCYTCMGCRSFLTVYHDEDGKPKFYGRFNQGVVTLNLVDLACSSGGDFEKFWKLFDERLNLCYRALMARHNRLKGTPSDVAPILWQYGALARLKKGETIDKLLYGGYSTISLGYAGLCECTRYMTGKPHTDPAATPFALKVMQRLNDACKEWKEKENIDFSVYGTPLESTTYKFAKCLQKRFGVIPGVTDKNYITNSYHVHVTENIDAFTKLKFESQFQALSPGGAISYVEVPNMQDNLDAVLSVMKFIYENIMYAELNTKSDYCQVCGYDGEIQIVKDDDGKLVWECPHCHNRDQDKMNVARRTCGYIGSQFWNQGRTQEIKERVLHL

SEQ ID NO: 635 - protein, 735 aa, unidentified
  REGION 1..735: note = Description of Unknown: uncultivated organism sequence
  REGION 1..735: note = Category: MG55 effectors
  REGION 1..735: note = Description: MG55-210 effector
MGDKMDKELLIMTNVIKRNGKEVKFDIYKIIHAMEKANKEVAPVYQMNEYQIQAAAETVAKKIQASSHAVNVEDIQDMVETAIMEMRAYEVAQKYVRYRYKREMARKANSTDEDILALIDQANEELKQENSNKNPVINSTQRDYMAGEVSKDLTKRLLLPEDIVKAHEEGVIHFHDSDYYAQKEHNCDLINLEDMLQNGTVISETMIEKPHSFFTACNVTTQIVAQVASNQYGGQSFTLSHLAPFVDISRQKIREAVIGERKETGESMDEDIIAKIVNRRLKEEIKSGIQTIQYQLITLMTCNGQAPFVTMFMYLDEVPEGKTREDLALIIEEVLRQRMQGVKNEKGVWITPAFPKLIYVLDEDNITEDAPYYHLTKLAAQCTAKRMVPDYISAKIMREYKGGDVYPCMGCRSFLTEDKEGLGENGAHKYYGRFNQGVVTINLVDVACSSQGNMDSFWQILEERLELCHKALRLRHERLLGTVSDVAPILWQHGALARLKKGEKIDKLLYNNYSTISLGYAGLYEMCVRMLGKSHTTEEGREFSLKVMEKLNDSCKKWREAENISYSVYGTPMESTTYKFAKALKKRFGTIPGVTDKNYITNSYHVHVSEKIDAFSKLAFEADFQKLSPGGAISYVEVPNMQNNIPAVLSLMHFIYENIMYAELNTKSDYCCACGYDGEIQIIEDQYGKLQWRCPNCGNENQEQLSVARRTCGYIGTQFWNQGRTQEIKDRVLHL

SEQ ID NO: 636 - protein, 982 aa, unidentified
  REGION 1..982: note = Description of Unknown: uncultivated organism sequence
  REGION 1..982: note = Category: MG55 effectors
  REGION 1..982: note = Description: MG55-211 effector
MSLRIGIDIGSTTVKVVVLDEQNKLLFRSYERHYSKTRERACETLRSISDMLAGRQVKMVITGSAGLGVANASGIDFVQEVYATAAAVNTYIPGTDAVIELGGEDAKIIFFGGALEERMNGSCAGGTGAFIDQMATLMNVSVDELDALSLKHEKIYPIASRCGVFAKSDIQPILNQGGRKEDVAASIFQAVVDQTVAGLTQGRELKGKIVFLGGPLHFLMGLRERFVETLKLDEEHAIFPEDGDCFAAMGAALCSSDYDTILFEDALKKLEESVDTTTLVDTMPPLFQDVAEYGAFCARHNAKRPPEVDIKTYEGPAWLGIDAGSTTTKLALITGDGGLLYTYYHSNLGNPVAIVLEQLREIYAQCGDRIEIRGVAVTGYGEDLIKNAFSCDLGLVETMAHYKAAAHFEPDVDFIIDIGGQDMKCFKIRNGAVDSIMLNEACSSGCGSFIETFAKALGYEIADFAKMGLFAQHPVNLGSRCTVFMNSSVKQAQKDGASVEDISAGLSISIVKNAVYKVIRAANADDLGQHIVVQGGTFLNDAVLRAFEQELGRNVTRPTIAGIMGAFGAALAAKDLGLEKSSILGPEALERFTHSAKPVTCNLCTNHCSLTVNQFDGGRRFISGNRCSRPLGKEKVTQPDLMTYKYKKLRAMQGKGEGTGVRGRIGIPFGLNMYENLPFWFTFFTKLNFEVVLSPESSRKLYLKGQHTIPSDTVCYPAKLLHGHVEALVEEGVDAIWYPCMSYNNDEGIGDNHFNCPVVAYYPELLAANVPALKETRFLDPYVGLWRHKDFEKRIAKLMEEEFSIPQRETRAAAQAAYAAYEAYVHDLRQTGQEYIAYAREHGLNIAVVCGRPYHIDPEINHGINDLITSFGFVLITEDALSYLEGYAPRKVLNQWTFQSRMYNAARYVCTQPDMQVIQLVSFGCGTDAITTDEMRSILEEGGKLYTQLKIDDINNLGAVKIRIRSLMAAMDARKHQAAPAR

SEQ ID NO: 637 - protein, 979 aa, unidentified
  REGION 1..979: note = Description of Unknown: uncultivated organism sequence
  REGION 1..979: note = Category: MG55 effectors
  REGION 1..979: note = Description: MG55-212 effector
MQIGLDIGSTTIKIAVMDDAGNLLFHKYERHYSQIAEKILALHKELMTKFPTLHSARLAISGSGGIGIADSCGLQFVQEVFAEKICAEKLNPGTDAVIELGGEDAKILFLGRHFDARMNDSCAGGTGAFIDQMASLLNVETPQMNELAQQAQNTYTIASRCGVFAKSDIQPLLNQGAEKSDLAASIFHAVASQAITGLAKGRPISGNVLYLGGPLTFMSCLRDAFDSVLNIKGVCPENSLLYVAMGAAFCAEHEVDLTTLPEKLQAAAAQHSFEHLPPLFKNEGEYTVFKKRHSKESVAIGTPAEASEAFIGIDSGSTTIKIAVMSPDAKLLDSFYQSNKGNPVVAVRNYLTDFYTKYPNCHLLAGAVTGYGEDLIRHGFGVDYGIVETMAHFYAAQYLEPEVDFILDIGGQDMKCLKIHNGAIDNIFLNEACSSGCGSFLQTFAEILGYTAEQFAQIGLKADMPVDLGSRCTVFMNSSVKQAQKDGASVANISAGLSISIVKNALYKVIRPASKEAIGKHIVVQGGTFLNDCVLRAFEQEMDLNVIRPNIAGLMGAYGAALYAQRRYKDAPHQTTLLNLQQLGEFVHTVKGMTCGLCNNHCHLTVNTFAGGKRFISGNRCERPITHMAPKDELNLYRQKLQLLKELPVNETPKRGIMGIPMGLNMYELLPFWNALLSSLGFKVVHSPIEDKNIYRLGQGTIPSDTVCYPAKLMHGHIKWLLQQGITNIFYPCMTYNIDEQGTENCYNCPVVAYYPEVLHANIRDLNKPEIHFFYDYLGLLHKKKLVKKLQEMFAKVYPDITKEEIRKAVDAAFTAFYDYEAQVKAKGQEIISKAREEHKPIVVLAGRPYHIDPKVNHSIDRLITNMGAALVSEDAVSSHIKTKELNRDLQVLNQWTYHGRLYAAAEYVAQNPDMHLIQLVSFGCGCDAITADECRRLLEERGRIYTQIKIDDIDNLGAAKIRIRSLFSAVQLFDIDNN

SEQ ID NO: 638 - protein, 979 aa, unidentified
  REGION 1..979: note = Description of Unknown: uncultivated organism sequence
  REGION 1..979: note = Category: MG55 effectors
  REGION 1..979: note = Description: MG55-213 effector
MQIGLDIGSTTIKIAVMDDAGNLLFHKYERHYSQIAEKILALHKELMTKFPTLHSARLAISGSGGIGVADSCGLQFVQEVFAEKICAEKLNPGTDAVIELGGEDAKILFLGRHFDARMNDSCAGGTGAFIDQMASLLNVETPQMNELAQQAKNTYTIASRCGVFAKSDIQPLLNQGAEKSDLAASIFHAVASQAITGLAKGRPISGNVLYLGGPLTFMSCLCDAFDSVLNIKGVCPENSLLYVAMGAAFCAEHEVDLTTLPEKLQTAAAQHSFEHLPPLFKNEGEYTVFKKRHSKESVAIGTPEEASEAFIGIDSGSTTIKIAVMSPDGKLLDSFYQSNKGNPVVAVRNYLTDFYTKYPHCHLLAGAVTGYGEELIRHGFCVDYGIVETMAHFYAAQYLEPEVDFILDIGGQDMKCLKIHNGAIDNIFLNEACSSGCGSFLQTFAEILGYTAEQFAHIGLKADMPVDLGSRCTVFMNSSVKQAQKDGASVANISAGLSISIVKNALYKVIRPASKEAIGKHIVVQGGTFLNDCVLRAFEQEMDLNVIRPNIAGLMGAYGAALYAQRRYKDAPHQTTLLNLQQLGEFVHTVKGMTCGLCNNHCHLTVNTFAGGKRFISGNRCERPITHMAPKDELNLYRQKLQLLKELPVNETPKRGIMGIPMGLNMYELLPFWNALLSSLGFKVVHSPIEDKTIYRLGQGTIPSDTVCYPAKLMHGHIKWLLQQGITNIFYPCMTYNIDEQGTENCYNCPVVAYYPEVLHANIRDLNKPEIHFFYDYLGLLHKKKLVKKLQEMFSKAYPNITKDEIRKAVDAAFNAFYDYEAQVKAKGQQIISKAREEHKPIVVLAGRPYHIDPKVNHSIDRLITNMGAALVSEDAVSSHIKTKELNRDLQVLNQWTYHGRLYAAAEYVAQNPDMHLIQLVSFGCGCDAITADECRRLLEERGRIYTQIKIDDIDNLGAAKIRIRSLFSAAQLFDIDNN

SEQ ID NO: 639 - protein, 724 aa, unidentified
  REGION 1..724: note = Description of Unknown: uncultivated organism sequence
  REGION 1..724: note = Category: MG55 effectors
  REGION 1..724: note = Description: MG55-214 effector
MKIIKRNGAEVGFDITKIIIAITKANESVEEVDRMTPVQIQRIAESVDLQCQKMNRAPTVEEIQDMVEHYIMAHGAFEVAKHYITYRYTRSLVRKSNTTDDKILSLIECNNEEAKQENSNKNPVVNSTQRDYMAGEVSRDITNRILLPKDIVEAHNEGIIHFHDTDYYAQHMHNCDLVNLEDMLQNGTVITGTLIEKPHSFATACNIATQIVAQVASNQYGGQSISLTHLAPFVQISREKIRASVRDEFDAVGVAVTEDKINSIAEKRLREEIRRGVQTIQYQVVTLLTTNGQAPFVTVFMYLGEAKNQQEKDDLALIIEETLLQRYQGVKNEKGVWVTPAFPKLIYVLEEDNIREGSKYWELTKLAAKCTAKRMVPDYISEKKMLELKVDKNGNGHCYPCMGCRSFLTPYVDEDGNPKYYGRFNQGVVTVNLPDIALSSGGNIEKFWRIFDERMELCHRALLCRHERLKGTLSDAAPILWQYGACARLKKGEPIDKLLYGGYSTISLGYAGLYECVKYMTGKSHTDPSATPFALEIMHKLNAACKTWKAQHNIDFSLYGTPLESTTYKFAKCLQKRFGVIEGITDKGYITNSYHVHVTEPIDAFKKLEFEAQFQHLSPGGAISYVEVPDMQNNLDAVLEVMKFIYDHIIYAELNTKSDYCQVCGWDGEIEVVEEDGKLIWKCPQCGNTDQDKMNVARRTCGYIGTQFWNQGRTQEIKDRVLHL

SEQ ID NO: 640 - protein, 720 aa, unidentified
  REGION 1..720: note = Description of Unknown: uncultivated organism sequence
  REGION 1..720: note = Category: MG55 effectors
  REGION 1..720: note = Description: MG55-215 effector
MKIIKRSGAEAVFDISKIIIAINKANHEVVEAERLTADQIKAIAQYIEDSCKDANHALNVEDIQDLVEDQLMDKRAFSVARKYITYRYKRALVRKSNSTDEQILSLIECNNEEVKQENSNKDSTVNSVQRDYMAGEVSKDITRRFLLPEDIVEAHEQGIIHFHDADYFAQHMHNCDLVNLEDMLQNGTVISGTRIDKPHSFSTACNIATQIIAQVASSQYGGQSISLAHLAPFVQISREKIHAELVQTLKESDVELSEEKINSIVERRLHAEIERGVQVIQYQVVTLMTTNGQSPFVTVFMYLNEAKNEQEKKDLAMIIEEVLDQRYQGVKNEDGVWITPAFPKLIYVLEEDNIHEDSEYYYLTKKAAKCTAKRMVPDYISEKKMKELKDGNCYTCMGCRSFLTVYHDEDGKPKFYGRFNQGVVTLNLVDLACSSGGDFEKFWKLFDERLDLCYRALMARHNRLKGTPSDVAPILWQYGALARLKKGETIDKLLYGGYSTISLGYAGLCECTRYMTGKPHTDPAATPFALKVMQRLNDACKEWKEKENIDFSVYGTPLESTTYKFAKCLQKRFGVIPGVTDKNYITNSYHVHVTENIDAFTKLKFESQFQALSPGGAISYVEVPNMQDNLDAVLSVMKFIYENIMYAELNTKSDYCQVCGYDGEIQIVKDDDGKLVWECPHCHNRDQDKMNVARRTCGYIGSQFWNQGRTQEIKERVLHL

SEQ ID NO: 641 - protein, 720 aa, unidentified
  REGION 1..720: note = Description of Unknown: uncultivated organism sequence
  REGION 1..720: note = Category: MG55 effectors
  REGION 1..720: note = Description: MG55-216 effector
MKIIKRSGAEAVFDISKIIIAINKANHEVVEAERLTADQIKEIAQYIEDSCKDANHALNVEDIQDLVEDQLMDKRAFSVARKYITYRYKRALVRKSNSTDEQILSLIECNNEEVKQENSNKDSTVNSVQRDYMAGEVSKDITRRFLLPEDIVAAHEQGIIHFHDADYFAQHMHNCDLVNLEDMLQNGTVISGTRIDKPHSFSTACNIATQIIAQVASSQYGGQSISLAHLVPFVQISREKIHAELVQTLKESDVELSEEKINSIVERRLHAEIERGVQVIQYQVVTLMTTNGQSPFVTVFMYLNEAKNEQEKKDLAMIIEEVLDQRYQGVKNEDGVWITPAFPKLIYVLEEDNIHEDSEYYYLTKKAAKCTAKRMVPDYISEKKMKELKDGNCYTCMGCRSFLTVYHDEDGKPKFYGRFNQGVVTLNLVDLACSSGGDFEKFWKLFDERLDLCYRALMARHNRLKGTPSDVAPILWQYGALARLKKGETIDRLLYGGYSTISLGYAGLCECTRYMTGKPHTDPAATPFALKVMQRLNDACKEWKEKENIDFSVYGTPLESTTYKFAKCLQKRFGVIPGVTDKNYITNSYHVHVTENIDAFTKLKFESQFQALSPGGAISYVEVPNMQDNLDAVLSVMKFIYENIMYAELNTKSDYCQVCGYDGEIQIVKDDDGKLVWECPHCHNRDQDKMNVARRTCGYIGSQFWNQGRTQEIKERVLHL

SEQ ID NO: 642 - protein, 341 aa, unidentified
  REGION 1..341: note = Description of Unknown: uncultivated organism sequence
  REGION 1..341: note = Category: MG55 effectors
  REGION 1..341: note = Description: MG55-217 effector
MAATMKDIARRTGLGLATISSYFNGGNVREKNRIKIEEAIQELHYEVNEVARGLKTNATKTIGVVIPELNNTFCAEIITGMEDVLRSHGYATIVCDCRTDKRLEREAVEFLSRKRVDGIISMPVDAEGNHLKKFQKTGKPIVLIDRRIRELSCDSVLVDNEKAAEDAMRVFFQAGHRKIGIIGGPEEISTAQERLQGYRNAYEKENIPVRESLIYHGDYTIQGGVQGIEKLVADNPDMTAVFVTNYEMTMGAVIGMNELGLKIPEQLSMIGFDNLQFARACNPKLTIVAQPTQGIAGEVAGIMLKRLEGAASEETEPITEKLGAEIIMGKSVRVLDEKEKL

SEQ ID NO: 643 - protein, 1005 aa, unidentified
  REGION 1..1005: note = Description of Unknown: uncultivated organism sequence
  REGION 1..1005: note = Category: MG55 effectors
  REGION 1..1005: note = Description: MG55-218 effector
MSEIKLQQKAAYTLGIDVGSTTVKTVILDADHHVLHSTYQRHFSKVKEAVSEQLQAIIKEHPATLFSVHMTGSAGLGLATAAKIPFVQEVHAAFLAVKERYPKADAVIELGGEDAKIIFLTGGVEQRMNGSCAGGTGAFIDQMATLLDVTVDELDQMALQADRTYPIAARCGVFAKSDIQPLLNQGAKRENVAASIYQAVVDQTVSGLAQGRKIQGYVLFLGGPLSFLQGLRNAFMQTLHLDAEHAIFPVDGRTFVAYGCALAAENSADKPVTGEALLKQIESAETNHTVIADKPLFGYQEEYDRFRERHAQNDVVHGDLHTYQGNAYLGVDAGSTTTKVALIGEDNSLLYSFYETNKGQPLECVKRALETLYQKKNPNLKICGSAVTGYGEEMLKAGLGIDFGIVETVAHFRAAEFFCPDVDFIIDIGGQDIKCFQIKNGAIDSIMLNEACSSGCGSFIQAFANALGYDVAEFAKLGLFAERPVDLGSRCTVFMNSSVKQAQKDGATVADISAGLSGSIVKNAIYKVIRAKSPEDLGKHIVVQGGTFLNDAVLRCFEREMGRDVIRPAISGLMGAFGAAIYAKEHTSGSSTLLSLMDLHTLTYRTQNTTCNGCTAHCNLQILRFSNGKRFIAGNRCERGAGVSKKDQIPNLVDWKYETLRSLTDRQPEQPKATVGLPMALHYYDQLPLWYTFFTDLGFAVKLSEESTRKTYYKGQSTIPSDTVCYPAKLAHGHIESLLEQNVDFIFYPCMTYNLDEGDSDNHYNCPVVAYYPELLLANNEKLNEQNFLHPFLDLNRRKHLITVLYACLSDYATKKEIAAALEHGFAALEQYHNQIAQTAQEIVRQARAAGKTILVLAGRPYHIDPEINHGIHKLISSLGMAVITEDSIAGLAHTPELQALNQWTYHSRMYRAAQYVTTQPDFQLVQLVSFGCGIDAITTDEVRRILEQGGKLYTQLKIDEISNLGAAKIRLRSLKAAIGADVPPKPAAAPSEVAPKNEKEPVSV

SEQ ID NO: 644 - protein, 990 aa, unidentified
  REGION 1..990: note = Description of Unknown: uncultivated organism sequence
  REGION 1..990: note = Category: MG55 effectors
  REGION 1..990: note = Description: MG55-219 effector
MNVNVGIDIGSTTVKIVVVRDGEIIHKHYERHFSKVREKAVELVQNAREVIGPDATIRCAITGSAGLGVAKAADIDFVQEVFATRKAVGVHVPQADVVIELGGEDAKIVFLSGQLEERMNGSCAGGTGAFIDQMAVLLDVTPGELDELAQHAEQIYTIASRCGVFAKSDIQPLLNDGARKEDVAASIFQAVVNQTVAGLAQGREIKGDVLFLGGPLFFFKGLQKRFQETLKLDDMHAHFPALAPYAIAAGAAEYAKDTQKTYSVDSLLDALEHAAGAPVVANYLPPLFENEQQYEEFKHRHGVHDVMTQNVTMYEGDAYLGIDCGSTTTKLVLIGEDHQILFHHYQSNKGNPADVIREQLTKLYELCGDRVHIVSSAVTGYGEALIQHAFGVDFGLVETVAHFRAARHFCPDVDFIIDIGGQDIKCFKIRNKCIDNISLNEACSSGCGSFIETFARSMGYSIEEFCKLGLFAKHPIDLGSRCTVFMNSSVKQAQKDGAGIDAISAGLSVSVVKNALYKVIRAHSPDDLGQHIVVQGGTFLNDAILRSFEQEIGRDVTRPAIAGLMGAYGAALHAKDNRPAQTSLVGMDVLASFRHTVKSARCGLCENHCSLTINDFGGGRRFISGNRCERPLGGTKKADLPNLYQWKLEKLRSYGESSGKPMPNGRIGLPFGLNYYELLPFWTTFLRSLGFETVLSDVSTRDIYMQGQHSIPSDTVCYPAKLMHGHIENLLEKGVDAIFYPCMTYNLDEGRATNCYNCPVVAYYPELLHANVAALADFDFMMPYFELTDHKRFIQQAAKYFCGKYPQIKKKQVAAAAEAAFQELDNYYAEIRLEGQKAIAYADTHGLDIAVIAGRPYHVDPEINHGIDQLIASFGLVIVSEDAVWQLAEEPKVHVLNQWTYHSRMYGAAKYVTRKENAQLIQLVSFGCGIDAITTDEVRAICENGGKIYTQLKIDEISNLGAAKIRIRSMLAAVEEGRKLAEQQSNQHVG

SEQ ID NO: 645 - protein, 708 aa, unidentified
  REGION 1..708: note = Description of Unknown: uncultivated organism sequence
  REGION 1..708: note = Category: MG55 effectors
  REGION 1..708: note = Description: MG55-220 effector
MKVIKRDGRVVDYDRSKILLAIQKANDEVEIKEKITEQKIEKIVASIEHLKKDTMHVEEIQDFIEQKLMADGKFTLAKTYIIYRYTRELVRKANTTDESIMSLIKNSNKDVMEENSNKNAVIASTQRDLIAGEVSKDLTRRLLLPEKISKAHDEGVLHFHDADYFLQSIFNCCLINIKDMLDNGTVMNGKLIESPKSFQVACTVMTQIISAVASSQYGGQSVDIRHLGKYLRYSYKKYQERYQERFKGKLSDEVIEQIVQERLQDELKSGVQTIQYQINTLMTTNGQSPFVTLFLNLDKDDEYIEENAMIIEEVLRQRLQGIKNEKGVYVTPAFPKLIYVLDEHNCFKGGKYDYITKLAVQCSAKRLYPDYISAKKMRENYEGNVFSCMGCRSFLTPWKDENGNYKFEGRFNQGVVSLNLPQIGIIAQGDEEVFWPLLDERLALCYEALMCRHRALEGTLSDVSPIHWQYGAIARLNKGETIDKLLHGGYSTISLGYIGLYEVTKLMKGVSHTEAGGSEFAFKLMNRLREACDTWKRDTGIGFGLYGTPAESLCYRFARIDKERFGEIADVTDKGYYTNSYHVDVREHIDAFNKFTFESQFQVISSGGAISYIEIPNMRHNMEALEEIVKFIYENIQYAEFNTKSDYCHECSFDGEIIINENLEWECPNCGNKDHSKMNVTRRTCGYLGENFWNVGKTKEINSRVLHV

SEQ ID NO: 646 - protein, 727 aa, unidentified
  REGION 1..727: note = Description of Unknown: uncultivated organism sequence
  REGION 1..727: note = Category: MG55 effectors
  REGION 1..727: note = Description: MG55-221 effector
MKVIKRDGHMVDYCPEKIEQAIMKANNEVEEEDQASSTQIKNIIKYIEKLGKKRILVEDIQDIIEMKLMSQGKYELAKHYITYRYTRELVRRSNTTDQSIKELIDGESEYWNTENSNKNAKVVTTQRDYLAGITSTDITRRFLLPEDIVEAHDAGIIHFHDADYFAQNALHNCDLVNLEDMLQNGTSINGVMIEKPHRFLTAMTIATQIITAVSSSQYGGVTITLTHLAPFVRESYNRYLDKYKKRKLSKEQCEKFAMEDTKKEIVDGVQTFQYQVNSMTTTNGQAPFLSVCMYLGETTEYKEELSWIIEEFLKQRILGMKNEQGVYITPAFPKLLYVLEEDNINKNGKYYYLTKLAAECTAKRMVPDYISEKIMKELKIDKNGNGNCYPCMGCRSFLTPYVDENGKPKYYGRFNQGVVTINLVDAALSSDKDMDTFWQIFEERLELCHKALQIRHKRLSKATSDVAPILWQHGALARLKKGESIHELLHNGYSTISLGYAGLYECVKYMTGHSHTDNGKGKEFALEVMEKMNAKCKEWKEVENIDYSVYGTPIESTTYKFAKCLKDRFGVVKGITDRDYITNSYHVPVFEEIDAFTKLKLESEFQKLSPGGAISYIETPNLSNNLDAVLEVITFIYNNIMYAELNTKSDYCQECGYTGEILIDDNMEWYCPNCGNRDHNKLNVARRTCGYIGTNFWNKGRTQEIKERVLHIDNKEEKDTKKDKEEK

SEQ ID NO: 647 - protein, 730 aa, unidentified
  REGION 1..730: note = Description of Unknown: uncultivated organism sequence
  REGION 1..730: note = Category: MG55 effectors
  REGION 1..730: note = Description: MG55-222 effector
MKIIKRSGSEDIFDISKIEAAIRKANDSVIDYEKLGDDKIQAILSNVEKACENMKRSPSVEEIQDMVENQIMSQKAFNVARNYITYRYKRELVRKSNSTDEQILSLLECNNEEVKQENSNKNPTVNSVQRDYMAGEVSKDITRRFLLPPEIVEAHEKGIIHFHDADYFAQHMHNCCLVNLEDMLQNGTVISETMIDTPKSFSTACNIATQAIAQIASSQYGGQSISLSHLAPFVQVSREKFRKQVRKELETAGIEATEEKVNQMAEMRVKEEINRGVQMIQYQVITLMTTNGQAPFITVFMYLDEVPEGQLRDDLAAVIEEMLHQRILGVKNEQGVYITPAFPKLIYVLEEDNIREGSKYWYLTRLAAECTAKRMVPDYISEKMMKKLKDGDCYTCMGCRSFLTVDRTTGNLAHAKNYKEGKHKYYGRFNQGVVTLNLVDAACSSGGDEKKFWEIMDERLEMCYQALMIRHNRLKGTPSDVAPILWQNGALARLKKGETIDELLYHGYSTISLGYAGLCECTRYMKGVSHTEPEGTEFALAVMRRLNDACAKWKKETDIDFSLYGTPLESTTYKFAKCLQKRFGIIPGVTDKNYITNSYHVHVTEQINAFDKLKFESQFQELSPGGAISYVEVPNMQNNLEAVLSVMQYIYENIMYAELNTKSDYCMECGYAGEIKIVTDRDGKLVWECPNCGNRDQNKMSVARRTCGYIGTQFWNQGRTQEIKERVLHL

SEQ ID NO: 648 - protein, 712 aa, unidentified
  REGION 1..712: note = Description of Unknown: uncultivated organism sequence
  REGION 1..712: note = Category: MG55 effectors
  REGION 1..712: note = Description: MG55-223 effector
MEDNFDIKKIEAAIRKANESVIDYEKLTEEKIQEILANVEKACENMKRSPSVEEIQDMVENQIMNQRAFNVARNYITYRYKRALVRKSNSTDEQILSLLECNNEEVKQENSNKNPTVNSVQRDYMAGEVSKDITRRFLLDGDIVEAHEQGIIHFHDADYFAQHMHNCCLVNLEDMLQNGTVISETMIDRPKSFSTACNIATQAIAQIASSQYGGQSISLSHLAPFVDVSRQKFRKTVREELTATGIEPTEEMVNKIAEMRVKEEINRGVQMIQYQVITLMTTNGQAPFVTVFMYLDEVPEGQLRDDLAAVIEEVLHQRIQGVKNEKGVFITPAFPKLIYVLEEDNIREGSRYWYLTRLAAECTAKRMVPDYISEKIMKKLKQGNCYTCMGCRSFLTVYKDENDKFKFYGRFNQGVVTLNLVDVACSSGRDMNKFWELMDERLELCHRALMARHERLKGTPSDVAPILWQNGALARLKKGETIDKLLYGGYSTISLGYAGLCECTRYMKGVSHTDPDGTPFALEVMRHLNDACAKWKAEHNIDFSLYGTPLESTTYKFAKCLQKRFGIIPGVTDKNYITNSYHVHVTEEMSAFDKLKFESQFQELSPGGAISYVEVPNMQNNLDAVLSVMQYIYDNIMYAELNTKSDYCQECGYSGEIKIVNDKDGKLVWECPNCGNRDQNKMSVARRTCGYIGTQFWNQGRTQEIKERVLHL

SEQ ID NO: 649 - protein, 735 aa, unidentified
  REGION 1..735: note = Description of Unknown: uncultivated organism sequence
  REGION 1..735: note = Category: MG55 effectors
  REGION 1..735: note = Description: MG55-224 effector
MGVKMDKELLIMTNVIKRNGKEVKFDIYKIIHAMEKANKEVAPVYQMNEYQIQAAAETVAKKIQASSHAVNVEDIQDMVETAIMEMRAYEVAQKYVRYRYKREMARKANSTDEDILALIDQANEELKQENSNKNPVINSTQRDYMAGEVSKDLTRRLLLPEDIVKAHEEGVIHFHDSDYYAQKEHNCDLINLEDMLQNGTVISETMIEKPHSFFTACNVTTQIVAQVASNQYGGQSFTLSHLAPFVDISRQKIREAVIGERKETGESMDEDIIAKIVNRRLKEEIKSGIQTIQYQLITLMTCNGQAPFVTMFMYLDEVPEGKTREDLALIIEEVLHQRMQGVKNEKGVWITPAFPKLIYVLDEDNISEDAPYYHLTKLAAQCTAKRMVPDYISAKIMREYKGGDVYPCMGCRSFLTEDKEGLGENGAHKYYGRFNQGVVTINLVDVACSSEGNMDSFWEILEERLELCHKALRLRHERLLGTVSDVAPILWQHGALARLKKGEKIDKLLYNNYSTISLGYAGLYEMCVRMLGKSHTTEEGRAFSLKVMEKLNDSCKKWREEEKISYSVYGTPMESTTYKFAKALKKRFGTIPGVTDKNYITNSYHVHVSEKIDAFSKLAFEADFQKLSPGGAISYVEVPNMQNNIPAVLSLMHFIYENIMYAELNTKSDYCCACGYDGEIQIVEDSYGKLQWRCPNCGNENQDQLSVARRTCGYIGTQFWNQGRTQEIKDRVLHL

SEQ ID NO: 650 - protein, 708 aa, unidentified
  REGION 1..708: note = Description of Unknown: uncultivated organism sequence
  REGION 1..708: note = Category: MG55 effectors
  REGION 1..708: note = Description: MG55-225 effector
MRVIKRDGRTVEYDRNKILIAIRKANAEVDTFERVNDDMIDGIVAGIENMKRDTMQVEDIQDIIEQKLMAAGKFDLAKKYIIYRYTRELVRKANTTDDSIMSLLQNSNKDVMEENSNKNAYVASTQRDLIAGEGSKDLTKRILLPEKITKAHEDGVLHFHDMDYFIQPIFNCCLINIGDMLDNGTVMNGKLIESPKSFQVACTVMTQIISAVASSQYGGQSVDTRHLGKYLRKSADKYRKHYTERYAGKIAPDVIEEFVKERVNDELRSGVQTIQYQINTLMTTNGQSPFVTLFLNLDPKDEYIKENAMIIEEILRQRLEGIKNEKGVYVTPAFPKLIYVLDEHNALKGGEYDYITKLAVRCSAKRMYPDYISAKKMRENYEGNVFSCMGCRSFLTPWKDENGNYKFEGRFNQGVVSLNLPQIGILAKGDMEYFWQLLEERLSLCFEALMCRHRALEGVTSDVSPIHWQYGAIARLQKGEKIDKLLHGGYSTISLGYIGLYEVTKLMTGESQTTEKGSQFAKALMNRLRRATDTWKEETGIHFGLYGTPAESLCYRFAEIDKKRFGEIEDVTDKGYYTNSYHVDVREKIDAFSKFEFEAQFQVISSGGAISYVEVPNMQNNLPALEEVVKYIYEHIQYAEFNTKSDYCHVCGYDGEIIINDNLEWECPNCGNKDHDKMNVTRRTCGYLGENFWNVGKTKEINARVLHL

SEQ ID NO: 651 - protein, 708 aa, unidentified
  REGION 1..708: note = Description of Unknown: uncultivated organism sequence
  REGION 1..708: note = Category: MG55 effectors
  REGION 1..708: note = Description: MG55-226 effector
MKVIKRDGSTADFDSSKIIVAIQKANQVVEPEDRIDQERIEAIAHYVESKNRMRLLVEDIQDMVEHQLMDEGKFNLAKSYIIYRYTRALVRKANTTDESILSLIRNSNKDVMEENSNKNAVMASTQRDLIAGEVSKDLTRRLILPEKISKAHDEGAIHFHDADYFVQPIFNCCLINVGDMLDNGTVMNGKLIESPKSFQVACTVMTQIIASVASSQYGGQSVDIRHLGKYLRRSYEKFKLTIKAEVGDSVADEVVERLTKRRLQDELRSGVQTIQYQINTLMTTNGQSPFVTIFLNLQADDEYLEENAMIVEEILRQRLEGIKNDKGVFVTPAFPKLVYVLDEHNCLKGGKYDYITKLAVKCSAKRLYPDYISAKKMRENYEGNVFAPMGCRSFLAAWKDDEGNYKFEGRFNQGVVSLNLPQVAILAHGDEEKFWPLLDERLQLCYEALMCRHNSLKGIRSDVSPVHWQYGAIARLEKGEVIDKYLEKGYSTISLGYIGLYEMTKLMKDVSHTTPEGEEFALRVMKYLRAACDKWKKETGLGFALYGTPEISLCYRFARIDKERFGTIADVTDKGYYTNSYHVDVREDIDAFSKFNFESQFQRISSGGAISYVEIPNMRHNLEAMEDVVRFIYDNIQYAEFNTKSDYCHVCGFDGEIIINDDLEWECPNCGNKNQTLMNVTRRTCGYLGENFWNVGKTKEIKSRVLHL

SEQ ID NO: 652 - protein, 1441 aa, unidentified
  REGION 1..1441: note = Description of Unknown: uncultivated organism sequence
  REGION 1..1441: note = Category: MG55 effectors
  REGION 1..1441: note = Description: MG55-227 effector
MDEILHVGLDVGSTTVKIIVMNSNKETIYSNYERHFSDTKNTICNTLEKLAEKYPNNKFTLALTGSGAMSAAKFLGVDFIQEVVSCKRAVEKYIPKTDVVIELGGEDAKIIYFDESIEQRMNGTCAGGTGAFLDQMASLLHTDTQGLNTLAKNYNTIYPIASRCGVFAKTDIQPLLNEGAAKEDIAASIFQAVVNQTISGLACGRPIKGNVAFLGGPLNYLSELRQRFIKTLNLKPEEIIIPEEAHLIVAKGAALDSINSNIITIEELKEKINNLKNSHDNTSKPLDPLFNSKEELEEFKLRHSKAKINKKDLKDFEENCYIGIDAGSTTTKLVLIDDNNNLLYSLYGSNEGNPLKSVMNMLKELYSILPEKAIIRYSGVTGYGENLIQTALNVDLNEIETIAHYTAAKEFEPDVTSIVDIGGQDMKYIKIKDDTIDNIMLNEACSSGCGSFIETFAKSLNITISDFVKEALESKTPVDLGSRCTVFMNSKIKQAQKEGYSVGDISAGLSYSVIKNAIQKVMKVRDVETLGNHIVVQGGTFYNDAVLRAFELIVGKNVIRPEIAGLMGAYGVALLAKEQFESNLNMEYTSTIANLKDIENLDIKTSHIRCKGCENHCLLTINTFSNGQRHISGNRCEKGAGITNKKQDLPNLVKYKYERLFNYTPLEEKDAPRGTIGIPRVLNMYEDYPFWFTFFTNLGFRVILSDKSTRETYEKGMESMPSESVCYPAKLSHGHIINLIEKGITTIFYPCIPYSRKEFEKANNQYNCPIVISYSEVLKNNVEELKTNNIKFLNPFLPFDTKNLVKRILELDEFKEYNFNKKELLNAAKLAEEEYQNFKKEILEKGNETVKYIEENNLRGIVLAGRPYHLDPEINHGIDTLITSLGLCVLTEDFVARNEKLENPLRVVNQWVYHSRLYAAADFVGKHDHLELIQLNSFGCGVDAVTTDQVEEILKSYDKMYTLIKIDEVNNLGAVRIRIRSLLASMNKRIKEKQENKELGNYSPLRPIFTKEMKKDYTILIPQMAPIHFELLESAVRASGYNAVLLRECTQKTVETGLKYVNNDACYPSILTTGQFIEALQSGKYDLDKTAIIMSQTGGGCRATNYIGFIRKALKDAGFEKVPIISFNVVGMEKMPGFKLTLPLLERLLKMVIYGDLLQKMLTKNRAYEINKGETEKLFNEWLEKCKKLVAKSTNKQFKQSIYNIVNDFEKIELDTSIEKPKVGVVGEVLIKYHPFGNNYVANVLEKEGAEVILPDFMGFVKFMATHKITFNTLLKTTPTIAKISKAAIKLIDILEKDVKIALANSKKGYMQPCDIFHLEEQVKDVLSIGNQTGEGWFLTAEMIEYMENEIPNIVCVQPFACLPNHVVGKGVIKTIRNKYPEANISPIDYDPGASEANQTNRIKLLMTVAKDNLKNNKIKKEKLNSKENKAIDHDIKIYKK

SEQ ID NO: 653 - protein, 1416 aa, unidentified
  REGION 1..1416: note = Description of Unknown: uncultivated organism sequence
  REGION 1..1416: note = Category: MG55 effectors
  REGION 1..1416: note = Description: MG55-228 effector
MKLDFNTLGIDIGSTTVKIAILNKDGEIIFSDYQRHYANIQETLAKIIDEAYEEFGDIPVSPMITGSGGLTLSKHMEIPFVQEVVAVATSLKDYAPRTDVAIELGGEDAKIIYFTGGIDQRMNGICAGGTGSFIDQMATLLKTDAAGLNEYAKNYKAIYPIAARCGVFAKTDIQPLINEGATKEDLSASIFQAVVNQTISGLACGKPIKGNVAFLGGPLHFLTELKQAFIRTLGLEGDAIIAPEHSHLFAASGAAMNAHADVQSSLGELKEKLSHKIELEFEVTRMEPLFASEKEYEDFTERHNKHNVRKGDFASYKGDLFLGIDAGSTTTKVAVIGDDGSLLYSFYSSNNGSPLKTALKAMKDIYSKMPEGARIVRSCSTGYGEALLKSALLLDEGEVETVAHYTAAAFFDPNVDCILDIGGQDMKCIKIKNNSVDKVQLNEACSSGCGSFIETFAKSLNYEVADFAKIALFAENPIDLGSRCTVFMNSKVKQAQKEGASVADISAGLAYSVIKNALLKVIKLTDPKDLGKQVVVQGGTFYNDAVLRSFERISGCEAIRPDIAGIMGAFGAALIAKDRYTGQKSTMLSFKEINELRFKTSMTRCQGCINHCLLTVNEFTGDRKFISGNRCEKGLGLEKNKEQIPNLFEYKNERVFRHYKPLKKADAPRGVVGIPRVLNMYENYPFWFTFFTKLGYSVKLSPVSSRKIYELGIESIPSESECYPAKLAHGHVTWLIRQGLEYIFYPCIPYERVEVPDAGNHYNCPIVTSYGENIKNNIEELRDDKIKYQNPFISLESEEILTKRLVDFFRKENGIPAAEIKAAAHEGWLEMQAVREDMTKKGKEVLQYLKETGRHGIVLAGRPYHSDPEINHGIPDLITSYGVAVLTEDSISELSEVDRPTIVMDQWMYHSRLYKAASFVAKNDNLDLIQLNSFGCGLDAVTTDQVNDILTKQNKIYTVLKIDEVNNLGAARIRIRSLLAAVKDRERKKIEAKRVDTAHHRVIFTEQMRKDYTILVPDMSPIHFEILESALASCGYKVEVLKADSKCIDYGLKYVNNDACYPSLIVVGQFMQTLLSGKYDLHKVALIITQTGGGCRATNYIGFIRRALEKAGMGYIPVISMSAGIEKNPGLKVNLEMANKALQALIYGDVFMRVLYKTRPYEKVKGSANALHEKWKKIAIESVKKANKKQFKKNIQNIVKEFDELELVDIKKPKVGIVGEILVKFMPLANNFIVELLEEEGAEAVCPDLIDFFMYSLYNANFKAEYLGKKKSSAKINNFLIWFIERYRKCANDALAASKRFHPTVPIQKLAEYASPIVSCGNQTGEGWFLTGEMIELIKSGVPNIVCTQPFGCLPNHVVGKGVIKELRHQYPDSNIVAVDYDPGASEVNQLNRIKLMLSTAGKNLIAESKDNEEPA

SEQ ID NO: 654 - protein, 337 aa, unidentified
  REGION 1..337: note = Description of Unknown: uncultivated organism sequence
  REGION 1..337: note = Category: MG55 effectors
  REGION 1..337: note = Description: MG55-229 effector
MAATMKDIARRTGLGLATISSYFNGGNVREKNRIKIEEAIEELHYEVNEVARGLKTNATKTIGVVIPELNNIFCAEIITGMEDILRSHGYATIVCDCRTDKKLEREAVEFLIRRRVDGIINMPVDETGAHLKRFQKTGRPIVLIDRRIQGIPCDSVLVDNQKAAEEAVELFIEKGHRNIGIIGGPEGIFTAEERLTGYCTALEKAGISIKNSLVYRGDYTIKGGVRGLEELVRNNPDMTAVFVTNYEMTMGAMIGVNELGIQVPGQLSMIGFDNLPFARACRPKLTIVSQPTDGIAREVARIMLERLEKREAGSEEPFMEKLQTEIMEGKSVCVLSR

SEQ ID NO: 655 - protein, 971 aa, unidentified
  REGION 1..971: note = Description of Unknown: uncultivated organism sequence
  REGION 1..971: note = Category: MG55 effectors
  REGION 1..971: note = Description: MG55-230 effector
MTNYKIGIDVGSTTVKCVLISEDKKILYSEYKRHFSRVKEAVLEQLERMFENFEGNFKVAITGSAGLGLSSAADLLFVQEVYSASLAIKDMYPDADCAVELGGEDAKILFLTGGIEQRMNGTCAGGTGAFIDQMATLLKVSGDNLDGLALKAEKKYPIASRCGVFAKSDIQPLLNQGASLSDVAASIFQAVVDQTVAGLAQGRKIQGKVLFLGGPLHFYKALGKAFKDTLKLSDENAIFPEYATCFMAFGAALYADGNPEYFTKEEILRRIRDSKPNSSIVAFKPLFENEEEYKEFKERHSKMSVAKANINTYEGNAYLGIDAGSTTTKIVLLSEDKKILYSHYTENSGRPLDVVCTKLKEIYSIIGDRIKIKSSAVTGYGEELLRAGLKIDFGIVETVAHFNAAIYFNPDVDFIIDIGGQDIKCFKIKNKAIDNIMLNEACSSGCGSFIQTFANALGYSVEDFAKLGLFAKNPVELGSRCTVFMNSAVKQAQKDGATVEDISAGISSSVVKNAIYKVIRAKSAKELGQNVVVQGGTFLNDAVLRSFERELGINVIRPTIAGLMGAYGAALYAIRKSKDKSTIISKEELNNFSYTSKSVNCQRCTAHCLLDIINFSDGRKLISGNRCERGLGKKDSEILPDIYKFKYSYITEGIVNTNEKPLATVGLPLCLNFYEQMPFWNTVFNELGFRTVISDQSSRETFIRGQHTIPSDTVCYPAKLVHGHIFNLLDKNVDFIFYPCQSYNIDEGDSDNHYNCPVVAYYPELLKANMDVLTKDNFICPHMDLNNPANVADVVYHSLKKYNLKKSKVVKAIHNGYEAMKKYQDAIREEGARLVEIARERNLPIIVLAGRPYHIDPEINHGVQKLIATLGAVSISEDAVSYLAKPPKLGILNQWTYHSRLYRAAQYVTTQKDMHLVQLVSFGCGIDAITTDETRSIIENGGKIYTQLKIDEISNLGAIKIRLRSLLAAIE

SEQ ID NO: 656 - protein, 735 aa, unidentified
  REGION 1..735: note = Description of Unknown: uncultivated organism sequence
  REGION 1..735: note = Category: MG55 effectors
  REGION 1..735: note = Description: MG55-231 effector
MGDNMDKELLIMTNVIKRNGKEVKFDIYKIIHAMEKANKEVAPVYQMNEYQIQAAAETVAKKIQASSHAVNVEDIQDMVETAIMEMRAYEVAQKYVRYRYKREMARKANSTDEDILALIDQANEELKQENSNKNPVINSTQRDYMAGEVSKDLTKRLLLPEDIVKAHEEGVIHFHDSDYYAQKEHNCDLINLEDMLQNGTVISETMIEKPHSFFTACNVTTQIVAQVASNQYGGQSFTLSHLAPFVDISRQKIREAVIAERKETGESMDEDIIAKIVNRRLKEEIKSGIQTIQYQLITLMTCNGQAPFVTMFMYLDEVPEGKTREDLALIIEEVLHQRMQGVKNEKGVWITPAFPKLIYVLDEDNITEDAPYYHLTKLAAQCTAKRMVPDYISAKIMREYKGGDVYPCMGCRSFLTEDKEGLGENGAHKYYGRFNQGVVTINLVDVACSSQGNMDAFWQILEERLELCHKALRLRHERLLGTVSDVAPILWQHGALARLKKGEKIDKLLYNNYSTISLGYAGLYEMCVRMLGKSHTTEEGREFSLKVMEKLNDSCKKWREAENISYSVYGTPMESTTYKFAKALKKRFGTIPGVTDKNYITNSYHVHVSEKIDAFSKLAFEADFQKLSPGGAISYVEVPNMQNNIPAVLSLMHFIYENIMYAELNTKSDYCCACGYDGEIQIVEDSYGKLQWRCPNCGNENQEQLSVARRTCGYIGTQFWNQGRTQEIKDRVLHL

SEQ ID NO: 657 - protein, 1439 aa, unidentified
  REGION 1..1439: note = Description of Unknown: uncultivated organism sequence
  REGION 1..1439: note = Category: MG55 effectors
  REGION 1..1439: note = Description: MG55-232 effector
MIKTLHVGLDVGSTTVKIIVMDENLNTIYTDYKRHFSDTKNTICNVLENLIIMYPDTEFTIALTGSGAISAAKFLDLPFIQEVVSCKRAVEKYIPETDVVIELGGEDAKIIYFDKFIEQRMNGTCAGGTGAFIDQMASLLNTDPTGLNELAKSHKLIYPIASRCGVFAKTDIQPLLNEGAAKEDIAASIFQAVVNQTISGLACGRPIRGNVAFLGGPLNYLSELRNRFIETLNLKDNEIIVPNEAHLLVAKGAALDSLNSHTITIEKLKSKIEVLKSSHDDTSNPLNPLFSIDAEYDEFKKRHEKDKVKRADFKTFKGNCFLGIDAGSTTTKLVVISEDGTLLYSLYGSNEGNPLQSVINMLKKLYAEKPSEAIIRFSGVTGYGEKLIQTALNVDLNEIETIAHYTAAKEFMPNVTSIVDIGGQDMKYIKMKNGAIDNIMLNEACSSGCGSFIETFAKSLGLSIQDFVQSALEARRPVDLGSRCTVFMNSKIKQAQKEGYSVGDISAGLSYSVIKNAIQKVMKVRDVKKLGAHIVVQGGTFYNDAVLRAFELIVGRNVVRPDIAGLMGAYGVALLAKEQYENNLDMDYVSSISNINELDKLEINITHIRCQGCENHCLLTINKFSNGTKYISGNRCEKGAGIVDKTLDRPNLIKYKFERTFNYTPLEEKNAPRGTIGIPRVLNMYEDYPFWFTFLTNLGFRVILSEKSNRKTYEKGMESMPSESVCFPAKLSHGHIIGLINSGIKTIFYPCIPYSRKEYQKADNHYNCPIVISYSEVLKNNVEELKDKNIKFLNPFLPFEPDKLAEIIMNLPEFKEYNFTKKELLSAAKKAETEYQNYKSDIHNKGQETLKFMEENNLKGIVLAGRPYHVDPEVNHGIDTLITSLGLCVLTEDSISNLTEAKRPLRVVDQWVFHARLYAAADFVGKHDNLELVQLNSFGCGVDAVTTDQVEEILTSYEKMYTLIKIDEINNLGAIRIRIRSLLASMNKRIKDNNSSMCNGNYEVNKKIFTKEMRKDYTILMPQMAPIHFEFLESAMKNSGYKMELLRDCTQHTVETGLKYVNNDACYPSILVTGQMIEALESGKYDLNKTALIMSQTGGGCRATNYIGFIRKALKDAGFENVPVISFNVVGMEKMPGFKLTIPLIERLIKSCIYADLLQKMLTKNRAYEINKGKTKELFDYWMEKCKKLVNKSSIKEFKQSIFDIVSDFEKIEIDTSVIKPKVGIVGEVLIKYHPFGNNFVADKLEQEGAEVILPDFMGFIKFIATHKITFNKLIKTDAIKAKLFKTAIKLIDLLEKPVISALNNSKKGYLLPCNIWDLEEKVNDILSIGNQTGEGWFLTAEMIEYIEHDIPNIVCVQPFACLPNHVVGKGVIKTIRSKFPEANIAPIDYDPGASEANQTNRIKLMMTVAKDNLKNKNNINKAIKKENYIIDEKNKISN

SEQ ID NO: 658 - protein, 722 aa, unidentified
  REGION 1..722: note = Description of Unknown: uncultivated organism sequence
  REGION 1..722: note = Category: MG55 effectors
  REGION 1..722: note = Description: MG55-233 effector
MKIIKRNGAEVKFDVSKILNAIRKANREVSEDNRLTEEQIATIAKKVTELAGDLNRAVGVEEIQDFVENQIMDQKAYAVARKYITYRYSRALVRRANTTDERILTLIECNNEEVKQENSNKNPTVNSVQRDYMAGEVSRDLTRRLLLPREIVEAHDAGLIHFHDADYYAQHMHNCDLVNLEDMLQNGTVISGTFIEKPHSFSTACNIATQIIAQVASNQYGGQSISLTHLAPFVDVSRQKIRAEVREELADVGVMEDTVNRIAEKRLRAEIKKGIQTIQYQVVTLLTTNGQAPFVTVFMYLGEARNERERADLAMIIEETLNQRIEGVKNESGVWVTPAFPKLIYVLEEDNVREGSRYWYLTELAAKCTAKRMVPDYISEKKMLEFKVDKNGEGHCYTCMGCRSFLTPYVDETGKPKYYGRFNQGVVTINLPDVALSSGGDMEKFWQIFDERLELCHRALMERHNRLKGTLSDAAPILWQYGALARLKKGETIDKLLYGGYSTISLGYAGLYECVKYMTGKTHTDPSAKPFALSVMQHMNDKCKEWKKMHNIDFSLYGTPLESTTYKFAKALQKRFGIIEGVTDKNYITNSYHVHVTEHIDAFTKLKFESEFQQLSPGGAISYVEVPNMQDNIPAVLSVMQYIYENIMYAELNTKSDYCQVCGYDGEIQIVEDGGKLYWECPHCHNRDQSKMNVARRTCGYIGTQYWNQGRTQEIKDRVLHL

SEQ ID NO: 659 - protein, 1284 aa, unidentified
  REGION 1..1284: note = Description of Unknown: uncultivated organism sequence
  REGION 1..1284: note = Category: MG55 effectors
  REGION 1..1284: note = Description: MG55-234 effector
MKLDFNTLGIDIGSTTVKIAILNKDGEIIFSDYQRHYANIQETLAKIIDEAYEEFGDIPVSPMITGSGGLTLSKHMEIPFVQEVVAVATSLKDYAPRTDVAIELGGEDAKIIYFTGGIDQRMNGICAGGTGSFIDQMATLLKTDAAGLNEYAKNYKAIYPIAARCGVFAKTDIQPLINEGATKEDLSASIFQAVVNQTISGLACGKPIKGNVAFLGGPLHFLTELKQAFIRTLGLEGDAIIAPEHSHLFAASGAAMNAHADVQSSLGELKEKLSHKIELEFEVTRMEPLFASEKEYEDFTERHNKHNVRKGDFASYKGDLFLGIDAGSTTTKVAVIGDDGSLLYSFYSSNNGSPLKTALKAMKDIYSKMPEGARIVRSCSTGYGEALLKSALLLDEGEVETVAHYTAAAFFDPNVDCILDIGGQDMKCIKIKNNSVDKVQLNEACSSGCGSFIETFAKSLNYEVADFAKIALFAENPIDLGSRCTVFMNSKVKQAQKEGASVADISAGLAYSVIKNALLKVIKLTDPKDLGKQVVVQGGTFYNDAVLRSFERISGCEAIRPDIAGIMGAFGAALIAKDRYTGQKSTMLSFKEINELRFKTSMTRCQGCINHCLLTVNEFTGDRKFISGNRCEKGLGLEKNKEQIPNLFEYKNERVFRHYKPLKKADAPRGVVGIPRVLNMYENYPFWFTFFTKLGYSVKLSPVSSRKIYELGIESIPSESECYPAKLAHGHVTWLIRQGLEYIFYPCIPYERVEVPDAGNHYNCPIVTSYGENIKNNIEELRDDKIKYQNPFISLESEEILTKRLVDFFRKENGIPAAEIKAAAHEGWLEMQAVREDMTKKGKEVLQYLKETGRHGIVLAGRPYHSDPEINHGIPDLITSYGVAVLTEDSISELSEVDRPTIVMDQWMYHSRLYKAASFVAKNDNLDLIQLNSFGCGLDAVTTDQVNDILTKQNKIYTVLKIDEVNNLGAARIRIRSLLAAVKDRERKKIEAKRVDTAHHRVIFTEQMRKDYTILVPDMSPIHFEILESALASCGYNVEVLKADSKCIDYGLKYVNNDACYPSLIVVGQFMQALLSGKYDLHKVALIITQTGGGCRATNYIGFIRRALEKAGMGYIPVISMSAGIEKNPGLKVNLEMANKALQALIYGDVFMRVLYKTRPYEKVKGSANALHEKWKKIAIESVKKANKKQFKKNIQNIVKEFDELELVDIKKPKVGIVGEILVKFMPLANNFIVELLEEEGAEAVCPDLIDFFMYSLYNANFKAEYLGKKKSSAKINNFLIWFI

SEQ ID NO: 660 - protein, 978 aa, unidentified
  REGION 1..978: note = Description of Unknown: uncultivated organism sequence
  REGION 1..978: note = Category: MG55 effectors
  REGION 1..978: note = Description: MG55-235 effector
MSRSVGVDIGSTTAKVVVMENDQVLFRRYERHYSQVRQKTLEIIRQAEKEIGSEPFTIAISGSAGLGVAKAADIPFVQEGFATSELVRKKIPDADAVIELGGEDAKILFFDKSGTFEERMNGSCAGGTGAFIDQMATLLAVTPEELDRLSADHKFIYTIASRCGVFAKTDIQPLLNQGASKSDIAASIFQAVVDQTITGLAQGRKIQGKVLFLGGPLHFFTGLQERFVETLKLSEENAVFPEYGLYAVGMGAAIYAEEEGKTFTYDELVEKLENAKDEAVTTLRLQPLFRDEAEYEAFKARHAKATIETVPIENYTGKAFLGIDCGSTTTKLCLIDDNYNILYSYYDSNKGNPVKIVREQLLHILDLCGDRIQICGSAVTGYGEDLIKNAFNIDMGLVETMAHLRAASHFNPNVDFVLDIGGQDIKCFKIRNGVIDNIVLNEACSSGCGSFIETFAKSMGYDAASFAKEGLFAQHPVDLGSRCTVFMNSSVKQAQKEGATLQDISAGLSMSVTKNAIYKVIRAVSKEDLGTNIVVQGGTFLNDAILRSFELEIERDVIRPSISGLMGAYGAALYARELRLETSAMMNKEQLEQFQHTSKTISCGICNNHCNLTVNTFDGKRKFISGNRCEKPLGVKANKELPNMFQYKMEKIRALKGVDGGMGKIGIPMGLNMYENIAFWYAFLTRLGFEVVLSDPSTRALYRKGQDTIPSDTVCYPAKLMHGHIKNLIEKGCTRIFYPCLPYNFDEKVGDNHYNCPVVAYYPELLEANMDDLKTVKFYNGYFGIHRPKDFDKKAYEYFKDEFNFPHKLVKQAAKEAYAVYNSWMEDIRNEGARAIHYAREHGCKIIVLAGRPYHIDPEINHGLDKMLSSFNLVIVTEDSVAHLGHAGKVHVLNQWTYHSRLYNAAKYVTTQLDMELIQIVSFGCGIDAITTDEVRSILENGDKLYTQLKIDEINNLSAIRIRIRSLLAAIKAKEAQK

SEQ ID NO: 661 - protein, 731 aa, unidentified
  REGION 1..731: note = Description of Unknown: uncultivated organism sequence
  REGION 1..731: note = Category: MG55 effectors
  REGION 1..731: note = Description: MG55-236 effector
MKVVKRDGHIVDFDRSKIVTAIRKANAEVDPEEKISDDKIETIVHGIETKKRKRILVEDIQDIIEQDLMEDGKYVLAKTYIIYRYTRELVRKANTTDDSILSLIKNRNKDVMEENSNKNATVASTQRDLIAGEVSKDLTRRVLLPEKISKAHDEGVLHFHDADYFLQPIFNCCLINIKDMLENGTVMNGKLIESPKSFQVACTVMTQIIASVASSQYGGQSVDLIHLGKYLRKSYEKYKERFTKDFGDKVDADTLEAMIQERLNDELRSGVQTIQYQINTLMTTNGQSPFVTLFLHLDPEDEYVEENARIIIEILRQRYEGIKNEAGVYVTPAFPKLIYVLDEFNCLKGGKYDYITEMAVKCSAKRMYPDYISAKKMRENYEGNVFSPMGCRSFLAPWKDENGQYKFEGRFNQGVVSLNLPQIGIIARGDEELFWKILDERLELCYEALMCRHNALMGVTSDVSPIHWQYGAIARLGKGERIDKYLLNGYSSISLGYIGLYEVTKLMKGVSHTTPEGQEFALRIMHKLRNACDTWKKETGLGFALYGTPAESLCYRFARIDKERFGTIPDITDKGYYTNSYHVDVREDIDAFEKFTFESQFQSISSGGAISYVEIPNMANNLEALTELVKFLYDNIQYAEFNTKSDYCHVCGFDGEIKVNENNEWECPVCHNKDHSKMNVTRRTCGYLGENFWNVGKTKEIKSRVLHVGTPDYIAETVTASASKIFPEKKF

SEQ ID NO: 662 - protein, 708 aa, unidentified
  REGION 1..708: note = Description of Unknown: uncultivated organism sequence
  REGION 1..708: note = Category: MG55 effectors
  REGION 1..708: note = Description: MG55-237 effector
MKVIKRDGHTVTYDRSKIITAIKKANAEVEPCEKVTDEKIEEIVQGIESKNRPRMLVEDIQDIIEQKLMADGKFVLAKTYIIYRYTRELVRKANTTDDSILSLIKNRNKDVMEENSNKNATVASTQRDLIAGEVSKDLTRRVLLPEKISKAHDEGVLHFHDADYFLQPIFNCCLINIGDMLDNGTVMNGKLIESPKSFQVACTVMTQIISSVASSQYGGQSVDIRHLGKYLRKSYNKYKNKLVEEFGDKIDDAILEQMAQDRLQDELRSGVQTIQYQINTLMTTNGQSPFVTLFLNLDPNDEYIEENAIIVEEILRQRLEGIKNEKGVYVTPAFPKLIYVLDEHNCLKGGKYDYITKLAVKCSAKRLYPDYISAKKMRENYEGNVFSCMGCRSFLSPWKDENGNYKWEGRFNQGVVSLNLPQIGILAKGNEEKFWSMLDERLDLCYEALMCRHNALLGVTSDVSPVHWQYGAIARLKKGEKIDPLLKDGYSTISLGYIGLYEVTKLMTGKSHTEPEGEEFALRVMNRLRKACDTWKEETGLGFGLYGTPAESLCYRFARIDQERFGTIEDVTDKGYYTNSYHVDVREKIDAFSKFRFESQFQTISSGGAISYVEIPNMRHNLEALEEIVRFIYDNIQYAEFNTKSDYCHVCDYDGEIMINDDNEWECPQCGNKDHSKMNVTRRTCGYLGENFWNVGKTKEIKARVLHL

SEQ ID NO: 663 - protein, 1439 aa, unidentified
  REGION 1..1439: note = Description of Unknown: uncultivated organism sequence
  REGION 1..1439: note = Category: MG55 effectors
  REGION 1..1439: note = Description: MG55-238 effector
MIKTLHVGLDVGSTTVKIIVMDENLNTIYTDYKRHFSDTKNTICNVLENLIIMYPNTEFTIALTGSGAISAAKFLDLPFIQEVVSCKRAVEKYIPETDVVIELGGEDAKIIYFDKFIEQRMNGTCAGGTGAFIDQMASLLNTDPTGLNELAKSHKLIYPIASRCGVFAKTDIQPLLNEGAAKEDIAASIFQAVVNQTISGLACGRPIRGNVAFLGGPLNYLSELRNRFIETLNLKDNEIIVPNEAHLLVAKGAALDSLNSHTITIEKLKSKIEVLKSSHDDTSNPLNPLFSIDAEYDEFKKRHEKDKVKRADFKTFKGNCFLGIDAGSTTTKLVVISEDGTLLYSLYGSNEGNPLQSVINMLKKLYAEKPSEAVIRFSGVTGYGEKLIQTALNVDLNEIETIAHYTAAKEFMPNVTSIVDIGGQDMKYIKMKNGAIDNIMLNEACSSGCGSFIETFAKSLGLSIQDFVQSALEARRPVDLGSRCTVFMNSKIKQAQKEGYSVGDISAGLSYSVIKNAIQKVMKVRDVKKLGAHIVVQGGTFYNDAVLRAFELIVGRNVVRPDIAGLMGAYGVALLAKEQYENNLDMDYVSSISNINELDKLEINITHIRCQGCENHCLLTINKFSNGTKYISGNRCEKGAGIVDKTLDRPNLIKYKFERTFNYTPLEEKNAPRGTIGIPRVLNMYEDYPFWFTFLTNLGFRVILSEKSNRKTYEKGMESMPSESVCFPAKLSHGHIIGLINSGIKTIFYPCIPYSRKEYQKADNHYNCPIVISYSEVLKNNVEELKDKNIKFLNPFLPFEPDKLAEIIMNLPEFKEYNFTKKELLSAAKKAETEYQNYKSDIHNKGQETLKFMEENNLKGIVLAGRPYHVDPEVNHGIDTLITSLGLCVLTEDSISNLTEAKRPLRVVDQWVFHARLYAAADFVGKHDNLELVQLNSFGCGVDAVTTDQVEEILTSYEKMYTLIKIDEINNLGAIRIRIRSLLASMNKRIKDNNSSMCNGNYEVNKKIFTKEMRKDYTILMPQMAPIHFEFLESAMKNSGYKMELLRDCTQHTVETGLKYVNNDACYPSILVTGQMIEALESGKYDLNKTALIMSQTGGGCRATNYIGFIRKALKDAGFENVPVISFNVVGMEKMPGFKLTIPLIERLIKSCIYADLLQKMLTKNRAYEINKGKTKELFDYWMEKCKKLVNKSSIKEFKQSIFDIVSDFEKIEIDTSVIKPKVGIVGEVLIKYHPFGNNFVADKLEQEGAEVILPDFMGFIKFIATHKITFNKLIKTDAIKAKLFKTAIKLIDLLEKPVISALNNSKKGYLLPCNIWDLEEKVNDILSIGNQTGEGWFLTAEMIEYIEHDIPNIVCVQPFACLPNHVVGKGVIKTIRSKFPEANIAPIDYDPGASEANQTNRIKLMMTVAKDNLKNKNNINKAIKKENYIIDEKNKISN

SEQ ID NO: 664 - protein, 1439 aa, unidentified
  REGION 1..1439: note = Description of Unknown: uncultivated organism sequence
  REGION 1..1439: note = Category: MG55 effectors
  REGION 1..1439: note = Description: MG55-239 effector
MIKTLHVGLDVGSTTVKIIVMDENLNTIYTDYKRHFSDTKNTICNVLENLIIMYPNTEFTIALTGSGAISAAKFLDLPFIQEVVSCKRAVEKYIPETDVVIELGGEDAKIIYFDKFIEQRMNGTCAGGTGAFIDQMASLLNTDPTGLNELAKSHKLIYPIASRCGVFAKTDIQPLLNEGAAKEDIAASIFQAVVNQTISGLACGRPIRGNVAFLGGPLNYLSELRNRFIETLNLKDNEIIVPNEAHLLVAKGAALDSLNSHTITIEKLKSKIEVLKSSHDDTSNPLNPLFSIDAEYDEFKKRHEKDKVKRADFKTFKGNCFLGIDAGSTTTKLVVISEDGTLLYSLYGSNEGNPLQSVINMLKKLYAEKPSEAVIRFSGVTGYGEKLIQTALNVDLNEIETIAHYTAAKEFMPNVTSIVDIGGQDMKYIKMKNGAIDNIMLNEACSSGCGSFIETFAKSLGLSIQDFVQSALEARRPVDLGSRCTVFMNSKIKQAQKEGYSVGDISAGLSYSVIKNAIQKVMKVRDVKKLGAHIVVQGGTFYNDAVLRAFELIVGRNVVRPDIAGLMGAYGVALLAKEQYENNLDMDYVSSISNINELDKLEINITHIRCQGCENHCLLTINKFSNGAKYISGNRCEKGAGIVDKTLDRPNLIKYKFERTFNYTPLEEKNAPRGTIGIPRVLNMYEDYPFWFTFLTNLGFRVILSEKSNRKTYEKGMESMPSESVCFPAKLSHGHIIGLINSGIKTIFYPCIPYSRKEYQKADNHYNCPIVISYSEVLKNNVEELKDKNIKFLNPFLPFEPDKLAEIIMNLPEFKEYNFTKKELLSAAKKAETEYQNYKSDIHNKGQETLKFMEENNLKGIVLAGRPYHVDPEVNHGIDTLITSLGLCVLTEDSISNLTEAKRPLRVVDQWVFHARLYAAADFVGKHDNLELVQLNSFGCGVDAVTTDQVEEILTSYEKMYTLIKIDEINNLGAIRIRIRSLLASMNKRIKDNNSSMCNGNYEVNKKIFTKEMRKDYTILMPQMAPIHFEFLESAMKNSGYKMELLKDCTQHTVETGLKYVNNDACYPSILVTGQMIEALESGKYDLNKTALIMSQTGGGCRATNYIGFIRKALKDAGFENVPVISFNVVGMEKMPGFKLTIPLIERLIKSCIYADLLQKMLTKNRAYEINKGKTKELFDYWMEKCKKLVNKSSIKEFKQSIFDIVSDFEKIEIDTSVIKPKVGIVGEVLIKYHPFGNNFVADKLEQEGAEVILPDFMGFIKFIATHKITFNKLIKTDAIKAKLFKTAIKLIDLLEKPVISALNNSKKGYLLPCNIWDLEGKVNDILSIGNQTGEGWFLTAEMIEYIEHDIPNIVCVQPFACLPNHVVGKGVIKTIRSKFPEANIAPIDYDPGASEANQTNRIKLMMTVAKDNLKNKNNINKAIKKENYIIDEKNKISN

SEQ ID NO: 665 - protein, 1439 aa, unidentified
  REGION 1..1439: note = Description of Unknown: uncultivated organism sequence
  REGION 1..1439: note = Category: MG55 effectors
  REGION 1..1439: note = Description: MG55-240 effector
MIKTLHVGLDVGSTTVKIIVMDENLNTIYTDYKRHFSDTKNTICNVLENLIIMYPDTEFTIALTGSGAISAAKFLDLPFIQEVVSCKRAVEKYIPETDVVIELGGEDAKIIYFDKFIEQRMNGTCAGGTGAFIDQMASLLNTDPTGLNELAKSHKLIYPIASRCGVFAKTDIQPLLNEGAAKEDIAASIFQAVVNQTISGLACGRPIRGNVAFLGGPLNYLSELRNRFIETLNLKDNEIIVPNEAHLLVAKGAALDSLNSHTITIEKLKSKIEVLKSSHDDTSNPLNPLFSIDAEYDEFKKRHEKDKVKRADFKTFKGNCFLGIDAGSTTTKLVVISEDGTLLYSLYGSNEGNPLQSVINMLKKLYAEKPSEAIIRFSGVTGYGEKLIQTALNVDLNEIETIAHYTAAKEFMPNVTSIVDIGGQDMKYIKMKNGAIDNIMLNEACSSGCGSFIETFAKSLGLSIQDFVQSALEARRPVDLGSRCTVFMNSKIKQAQKEGYSVGDISAGLSYSVIKNAIQKVMKVRDVKKLGAHIVVQGGTFYNDAVLRAFELIVGRNVVRPDIAGLMGAYGVALLAKEQYENNLDMDYVSSISNINELDKLEINITHIRCQGCENHCLLTINKFSNGTKYISGNRCEKGAGIVDKTLDRPNLIKYKFERTFNYTPLEEKNAPRGTIGIPRVLNMYEDYPFWFTFLTNLGFRVILSEKSNRKTYEKGMESMPSESVCFPAKLSHGHIIGLINSGIKTIFYPCIPYSRKEYQKADNHYNCPIVISYSEVLKNNVEELKDKNIKFLNPFLPFEPDKLAEIIMNLPEFKEYNFTKKELLSAAKKAETEYQNYKSDIHNKGQETLKFMEENNLKGIVLAGRPYHVDPEVNHGIDTLITSLGLCVLTEDSISNLTEAKRPLRVVDQWVFHARLYAAADFVGKHDNLELVQLNSFGCGVDAVTTDQVEEILTSYEKMYTLIKIDEINNLGAIRIRIRSLLASMNKRIKDNNSSMCNGNYEVNKKIFTKEMRKDYTILMPQMAPIHFEFLESAMKNSGYKMELLKDCTQHTVETGLKYVNNDACYPSILVTGQMIEALESGKYDLNKTALIMSQTGGGCRATNYIGFIRKALKDAGFENVPVISFNVVGMEKMPGFKLTIPLIERLIKSCIYADLLQKMLTKNRAYEINKGKTKELFNYWMEKCKKLVNKSSIKEFKQSIFDIVSDFEKIEIDTSVIKPKVGIVGEVLIKYHPFGNNFVADKLEQEGAEVILPDFMGFIKFIATHKITFNKLIKTDAIKAKLFKTAIKLIDLLEKPVISALNNSKKGYLLPCNIWDLEEKVNDILSIGNQTGEGWFLTAEMIEYIEHDIPNIVCVQPFACLPNHVVGKGVIKTIRSKFPEANIAPIDYDPGASEANQTNRIKLMMTVAKDNLKNKNNINKAIKKENYIIDEKNKISN

SEQ ID NO: 666 - protein, 354 aa, unidentified
  REGION 1..354: note = Description of Unknown: uncultivated organism sequence
  REGION 1..354: note = Category: MG55 effectors
  REGION 1..354: note = Description: MG55-241 effector
MRSKVEKLREEKGRLDQLEQRDWLTGQYNRVATERLVNRLIEERGCGVMLVLDVDHLRKINGRHGHIVGDHVLRAVAGVLDSMVFRHDVVGRIDGDMFVVFMPVDQEERFLQERCRQIRERLKEIRLPGDLSLSVSLNAGGAVWRSGDDYNSMFERAKEQLSSEKPIGPARERSAGSGARKGNFMVDLRQVRGELAEQTMIPGAYCQDYETFKNIYRFVERRLRRAKISSYILLLTLTDGNGDFPPLEKRERQMATLRELIQNSLRSGDVFTQYSSCQYLVMVADASAENVEMIASRIREAFYRIIDNGTGQVLLHHCYPMWPAGRPARDPGAGRDEDGVDPGNALGNVSGEFK

SEQ ID NO: 667 - protein, 967 aa, unidentified
  REGION 1..967: note = Description of Unknown: uncultivated organism sequence
  REGION 1..967: note = Category: MG55 effectors
  REGION 1..967: note = Description: MG55-242 effector
MRLGLDIGSTTIKCVVLDDNDKLLYSTYERHYSQITTKIGEILTRVRKEIDGVENALVAMSGSAGMGVADQCDITFVQEVYATRVATNTFIPGTDVVIELGGEDAKILFLSGGMEVRMNGTCAGGTGAFIDQMATLLNVPLEEMNDLAKGYEKTYTIASRCGVFAKTDIQPLLNQGARKADIAQSIFHAVVNQTVAGLAQGREIEGNVVYLGGPLTFMEELRKAFDEELGTKGTCPENSLYYVACGAALCAESTINFDEIIEKVSHYTGSGNFAFNPPLFKNEEEYEQFKARHAKATVKEVPLEDYDGDCYIGMDAGSTTVKAVVMGKNGELLYSKYLSNSGNPVPIIKDFLNELYDKKPNIKIKSSAVTGYGEDIIKNAFCVDYGIVETVAHFTAAKSFMPDVEFVIDIGGQDIKCFKVHNGAIDNIFLNEACSSGCGSFLQTFANALGYSIQDFAQLGIFGKHPVDLGSRCTVFMNSSVKQAQKDGATIEDISSGLSLSVVKNALYKVIRASGPDELGKKIVVQGGTFLNDAVLRAFEQEMGVNVVRPTISGLMGAYGAAMYAQSKSEGSAEGSTLLKKPDLENFVHEIKVVNCGMCNNNCRLTVNTFADGRKFIAGNRCERPITKKSPDESLNMYEYKLKVLREYKPVKGSRGKIGIPMGLNMFELLPFWHRFFTELGFEVIRSPFSTRKLYQKGQQTIPSDTVCFPAKLMHGHVKALIDMGVDTIFYPCMSYNIDEHLGDNHYNCPVVAYYPEVIYNNMKEVHNVTFIKDYFGIHRPKDFYKKAYEDLSKYFPDLTQKEVKNAAKCAYEEYDNYFAKIRQHGNEIIEKAEKEGKDIIVLSGRPYHIDPEINHGISKMIASFGVAIVSEDCVSDRVEKFKVGVLNQWTYHSRLYAAAKYVSTRKDMNLVQLVSFGCGVDAITTDEVRDILEKNGKIYTQIKIDEITNLGAVKIRIRSLLAAIGK

SEQ ID NO: 668 - protein, 983 aa, unidentified
  REGION 1..983: note = Description of Unknown: uncultivated organism sequence
  REGION 1..983: note = Category: MG55 effectors
  REGION 1..983: note = Description: MG55-243 effector
MLAMNESQEKYTLGIDVGSTTVKAVLLNSKGEVLYVSYKRHFSKVRETSESEVKKIREKFGNLEVKFAFTGSAGLGLSERSHLPFVQEVQSSYVAIKRLYPMTDSAIELGGEDAKIIFITGGLEERMNGQCAGGTGAFIDQMATLLNVTVPGLEELATQSKKTYPIASRCGVFAKSDIQALLNQGASKEDVAMSIFYAVADQTIAGLAQGRRIQGHVLFLGGPLHFLNSLGKAFKDRLKLTDEEAIFPEDSDTFVAKGAAIYAEGFKETISLDEIADHLEQANMKGTITTGKPLFNNQEEYDSFVASHQDFDIKRADLRTYEGKAYLGIDAGSTTTKIVLLSENNEILYDHYESNLGLPIDRIVEQLKTIYSLANPKLDIVGSAVTGYGEDLIRAALHVDYGMVETVAHFKAARFYEPDVNFVIDIGGQDIKCFNVKNGAIDSIMLNEACSSGCGSFLQTFAQSLGYGVEEFAQTAYFAKNPVLLGSRCTVFMNSSVKQAQREGAPVDDIAAGLCRSVVKNALYKVIRVRDAKELGEKIVCQGGTFLNNAVLRSFEQEIGHQVIRPSIAGLMGAFGAALTAKEKGGERGLISPKDLDNFGYTSTHSTCHMCGARCPLTLLKFPNGQIFLSGNKCDKPEGRRRSSDALDLYVYKRNRIKELLPSPASPKGVVGLPMSLVMWEQLPFWDAFFKHLGFDTLVSPFSTRKMYREGQKTIPSDTACYPAKLMHGHVDYLLQQNPTFIFYPSESYNVNEKRGDNHFNCPVVAYYGELIKKNDERFPTATFLDPFVDLSAPKKAIATLTDCLSSYGVKKKEVKNAFEFAYQAELKYRADLKQKAKQIIAEAREKKMITVVLAGRPYHVDPEVSHGIERLLDSLGVAVVSEDALDYSEQPQSKVHVLNQWTFHARLYDAANYVAKHEDMELVQLISFGCGVDAVTSDEVRRILESQHKLYTGIKIDEINNLGAVRIRLRSLLAAVEEKKHV

SEQ ID NO: 669 - protein, 720 aa, unidentified
  REGION 1..720: note = Description of Unknown: uncultivated organism sequence
  REGION 1..720: note = Category: MG55 effectors
  REGION 1..720: note = Description: MG55-244 effector
MKIIKRSGSEDTFDARKITAAVTKANYEVPTKERLSKEQIKSITADVENICLDMNRALSVEEIQDLVEEQIMDRRAFAVARKYITYRYNRALLRKANSTDKQILSLLECNNEMVKQENSNKNPTVNSVQRDYMAGEVSKDITKRFLLPSEIVRAHEQGIIHFHDSDYFAQHMHNCCLVNLEDMLQNGTVISETMIEKPKSFSTACNIATQSIAQIASSQYGGQSISLTHLAPFVDISRQKYKKQVENELKEAGLSYNSKQVDEIAEIRVRDEIKRGVQMIQYQVITLMTTNGQAPFVSVFMYLDEAPEGRLREDLALIMEEILRQRMQGVKNEKGVYITPAFPKLLYVLEEDNVREGSKYWYLTQLAAKCTAKRMVPDYISEKIMKKMKDGNCYPCMGCRSFLTVYHDEKDRPKFYGRFNQGVVTINLVDVACSSDGDEETFWKILDKRLELCKKALMYRHNRLKGTPSDVAPILWQYGALARLKKGEVIDKLLYNGYSTISLGYAGLCECTRYMTGKSHTDPSATPFALKVMEKLNDACSRWREEENIDFSLYGTPLESTTYKFAKCLQKRFGIIKGVTDKNYITNSYHVHVTEEINAFDKLKFEAQFQNLSPGGAVSYVEVPNMENNIDAVLQVMQFIYDNIMYAELNTKSDYCQVCDYSGQIEIVNDEHGKLIWKCPNCGNTDQDKMNVARRTCGYIGTQFWNQGRTQEIKERVLHL

SEQ ID NO: 670 - protein, 1439 aa, unidentified
  REGION 1..1439: note = Description of Unknown: uncultivated organism sequence
  REGION 1..1439: note = Category: MG55 effectors
  REGION 1..1439: note = Description: MG55-245 effector
MIKTLHVGLDVGSTTVKIIVMDENLNTIYTDYKRHFSDTQNTICNVLENLIIMYPDTEFTIALTGSGAISAAKFLDLPFIQEVVSCKRAVEKYIPETDVVIELGGEDAKIIYFDKFIEQRMNGTCAGGTGAFIDQMASLLNTDPTGLNELAKSHKLIYPIASRCGVFAKTDIQPLLNEGAAKEDIAASIFQAVVNQTISGLACGRPIRGNVAFLGGPLNYLSELRNRFIETLNLKDNEIIVPNEAHLLVAKGAALDSLNSHTITIEKLKSKIEVLKSSHDDTSNPLNPLFSIDAEYDEFKKRHEKDKVKRADFKTFKGNCFLGIDAGSTTTKLVVISEDGTLLYSLYGSNEGNPLQSVINMLKKLYAEKPSEAVIRFSGVTGYGEKLIQTALNVDLNEIETIAHYTAAKEFMPNVTSIVDIGGQDMKYIKMKNGAIDNIMLNEACSSGCGSFIETFAKSLGLSIQDFVQSALEARRPVDLGSRCTVFMNSKIKQAQKEGYSVGDISAGLSYSVIKNAIQKVMKVRDVKKLGAHIVVQGGTFYNDAVLRAFELIVGRNVVRPDIAGLMGAYGVALLAKEQYKNNLDMDYVSSISNINELDKLEINITHIRCQGCENHCLLTINKFSNGAKYISGNRCEKGAGIVDKTLDRPNLIKYKFERTFNYTPLEEKNAPRGTIGIPRVLNMYEDYPFWFTFLTNLGFRVILSEKSNRKTYEKGMESMPSESVCFPAKLSHGHIIGLINSGIKTIFYPCIPYSRKEYQKADNHYNCPIVISYSEVLKNNVEELKDKNIKFLNPFLPFEPDKLAEIIMNLPEFKEYNFTKKELLSAAKKAETEYQNYKSDIHNKGQETLKFMEENNLKGIVLAGRPYHVDPEVNHGIDTLITSLGLCVLTEDSISNLTEAKRPLRVVDQWVFHARLYAAADFVGKHDNLELVQLNSFGCGVDAVTTDQVEEILTSYEKMYTLIKIDEINNLGAIRIRIRSLLASMNKRIKDNNSSMCNGNYEVNKKIFTKEMRKDYTILMPQMAPIHFEFLESAMKNSGYKMELLKDCTQHTVETGLKYVNNDACYPSILVTGQMIEALESGKYDLNKTALIMSQTGGGCRATNYIGFIRKALKDAGFENVPVISFNVVGMEKMPGFKLTIPLIERLIKSCIYADLLQKMLTKNRAYEINKGKTKELFDYWMEKCKKLVNKSSIKEFKQSIFDIVSDFEKIEIDTSVIKPKVGIVGEVLIKYHPFGNNFVADKLEQEGAEVILPDFMGFIKFIATHKITFNKLIKTDAIKAKLFKTAIKLIDLLEKPVISALNNSKKGYLLPCNIWDLEGKVNDILSIGNQTGEGWFLTAEMIEYIEHDIPNIVCVQPFACLPNHVVGKGVIKTIRSKFPEANIAPIDYDPGASEANQTNRIKLMMTVAKDNLKNKNNINKAIKKENYIIDEKNKISN

SEQ ID NO: 671 - protein, 1439 aa, unidentified
  REGION 1..1439: note = Description of Unknown: uncultivated organism sequence
  REGION 1..1439: note = Category: MG55 effectors
  REGION 1..1439: note = Description: MG55-246 effector
MIKTLHVGLDVGSTTVKIIVMDENLNTIYTDYKRHFSDTKNTICNVLENLIIMYPNTEFTIALTGSGAISAAKFLDLPFIQEVVSCKRAVEKYIPETDVVIELGGEDAKIIYFDKFIEQRMNGTCAGGTGAFIDQMASLLNTDPTGLNELAKSHKLIYPIASRCGVFAKTDIQPLLNEGAAKEDIAASIFQAVVNQTISGLACGRPIRGNVAFLGGPLNYLSELRNRFIETLNLKDNEIIVPNEAHLLVAKGAALDSLNSHTITIEKLKSKIEVLKSSHDDTSNPLNPLFSIDAEYDEFKKRHEKDKVKRADFKTFKGNCFLGIDAGSTTTKLVVISEDGTLLYSLYGSNEGNPLQSVINMLKKLYAEKPSEAVIRFSGVTGYGEKLIQTALNVDLNEIETIAHYTAAKEFMPNVTSIVDIGGQDMKYIKMKNGAIDNIMLNEACSSGCGSFIETFAKSLGLSIQDFVQSALEARRPVDLGSRCTVFMNSKIKQAQKEGYSVGDISAGLSYSVIKNAIQKVMKVRDVKKLGAHIVVQGGTFYNDAVLRAFELIVGRNVVRPDIAGLMGAYGVALLAKEQYENNLDMDYVSSISNINELDKLEINITHIRCQGCENHCLLTINKFSNGTKYISGNRCEKGAGIVDKTLDRPNLIKYKFERTFNYTPLEEKNAPRGTIGIPRVLNMYEDYPFWFTFLTNLGFRVILSEKSNRKTYEKGMESMPSESVCFPAKLSHGHIIGLINSGIKTIFYPCIPYSRKEYQKADNHYNCPIVISYSEVLKNNVEELKDKNIKFLNPFLPFEPDKLAEIIMNLPEFKEYNFTKKELLSAAKKAETEYQNYKSDIHNKGQETLKFMEENNLKGIVLAGRPYHVDPEVNHGIDTLITSLGLCVLTEDSISNLTEAKRPLRVVDQWVFHARLYAAADFVGKHDNLELVQLNSFGCGVDAVTTDQVEEILTSYEKMYTLIKIDEINNLGAIRIRIRSLLASMNKRIKDNNSSMCNGNYEVNKKIFTKEMRKDYTILMPQMAPIHFEFLESAMKNSGYKMELLRDCTQHTVETGLKYVNNDACYPSILVTGQMIEALESGKYDLNKTALIMSQTGGGCRATNYIGFIRKALKDAGFENVPVISFNVVGMEKMPGFKLTIPLIERLIKSCIYADLLQKMLTKNRAYEINKGKTKELFDYWMEKCKKLVNKSSIKEFKQSIFDIVSDFEKIEIDTSVIKPKVGIVGEVLIKYHPFGNNFVADKLEQEGAEVILPDFMGFIKFIATHKITFNKLIKTDAIKAKLFKTAIKLIDLLEKPVISALNNSKKGYLLPCNIWNLEEKVNDILSIGNQTGEGWFLTAEMIEYIEHDIPNIVCVQPFACLPNHVVGKGVIKTIRSKFPEANIAPIDYDPGASEANQTNRIKLMMTVAKDNLKNKNNINKAIKKENYIIDEKNKISN

SEQ ID NO: 672 - protein, 1416 aa, unidentified
  REGION 1..1416: note = Description of Unknown: uncultivated organism sequence
  REGION 1..1416: note = Category: MG55 effectors
  REGION 1..1416: note = Description: MG55-247 effector
MKLDFNTLGIDIGSTTVKIAILNKDGEIIFSDYQRHYANIQETLAKIIDEAYEEFGDIPVSPMITGSGGLTLSKHMEIPFVQEVVAVATSLKDYAPRTDVAIELGGEDAKIIYFTGGIDQRMNGICAGGTGSFIDQMATLLKTDAAGLNEYAKNYKAIYPIAARCGVFAKTDIQPLINEGATKEDLSASIFQAVVNQTISGLACGKPIKGNVAFLGGPLHFLTELKQAFIRTLGLEGDAIIAPEHSHLFAASGAAMNAHADVQSSLGELKEKLSHKIELEFEVTRMEPLFASEKEYEDFTERHNKHNVRKGDFASYKGDLFLGIDAGSTTTKVAVIGDDGSLLYSFYSSNNGSPLKTALKAMKDIYSKMPEGARIVRSCSTGYGEALLKSALLLDEGEVETVAHYTAAAFFDPNVDCILDIGGQDMKCIKIKNNSVDKVQLNEACSSGCGSFIETFAKSLNYEVADFAKIALFAENPIDLGSRCTVFMNSKVKQAQKEGASVADISAGLAYSVIKNALLKVIKLTDPKDLGKQVVVQGGTFYNDAVLRSFERISGCEAIRPDIAGIMGAFGAALIAKDRYTGQKSTMLSFKEINELRFKTSMTRCQGCINHCLLTVNEFTGNRKFISGNRCEKGLGLEKNKEQIPNLFEYKNERVFRHYKPLKKADATRGVVGIPRVLNMYENYPFWFTFFTKLGYSVKLSPVSSRKIYELGIESIPSESECYPAKLAHGHVTWLIRQGLEYIFYPCIPYERVEVPDAGNHYNCPIVTSYGENIKNNIEELRDDKIKYQNPFISLESEEILTKRLVDFFRKENGIPAAEIKAAAHEGWLEMQAVREDMNKKGKEVLQYLKETGRHGIVLAGRPYHSDPEINHGIPDLITSYGVAVLTEDSISELSEVDRPTIVMDQWMYHSRLYKAASFVAKNDNLDLIQLNSFGCGLDAVTTDQVSDILTKQNKIYTVLKIDEVNNLGAARIRIRSLLAAVKDRERKKIEAKRVDTAHHRVIFTEQMRKDYTILVPDMSPIHFEILESALASCGYNVEVLKADSKCIDYGLKYVNNDACYPSLIVVGQFMQALLSGKYDLHKVALIITQTGGGCRATNYIGFIRRALEKAGMGYIPVISMSAGIEKNPGLKVNLEMANKALQALIYGDVFMRVLYKTRPYEKVKGSANALHEKWKKIAIESVKKANKKQFKKNIQNIVKEFDELELVDIKKPKVGIVGEILVKFMPLANNFIVELLEEEGAEAVCPDLIDFFMYSLYNANFKAEYLGKKKSSAKINNFLIWFIERYRKCANDALAASKRFHPTVPIQKLAEYASPIVSCGNQTGEGWFLTGEMIELIKSGVPNIVCTQPFGCLPNHVVGKGVIKELRHQYPDSNIVAVDYDPGASEVNQLNRIKLMLSTAGKNLIAESKDNEETA

SEQ ID NO: 673 - protein, 1439 aa, unidentified
  REGION 1..1439: note = Description of Unknown: uncultivated organism sequence
  REGION 1..1439: note = Category: MG55 effectors
  REGION 1..1439: note = Description: MG55-248 effector
MIKTLHVGLDVGSTTVKIIVMDENLNTIYTDYKRHFSDTKNTICNVLENLIIMYPNTEFTIALTGSGAISAAKFLDLPFIQEVVSCKRAVEKYIPETDVVIELGGEDAKIIYFDKFIEQRMNGTCAGGTGAFIDQMASLLNTDPTGLNELAKSHKLIYPIASRCGVFAKTDIQPLLNEGAAKEDIAASIFQAVVNQTISGLACGRPIRGNVAFLGGPLNYLSELRNRFIETLNLKDNEIIVPNEAHLLVAKGAALDSLNSHTITIEKLKSKIEVLKSSHDDTSNPLNPLFSIDAEYDEFKKRHEKDKVKRADFKTFKGNCFLGIDAGSTTTKLVVISEDGTLLYSLYGSNEGNPLQSVINMLKKLYAEKPSEAVIRFSGVTGYGEKLIQTALNVDLNEIETIAHYTAAKEFMPNVTSIVDIGGQDMKYIKMKNGAIDNIMLNEACSSGCGSFIETFAKSLGLSIQDFVQSALEARRPVDLGSRCTVFMNSKIKQAQKEGYSVGDISAGLSYSVIKNAIQKVMKVRDVKKLGAHIVVQGGTFYNDAVLRAFELIVGRNVVRPDIAGLMGAYGVALLAKEQYENNLDMDYVSSISNINELDKLEINITHIRCQGCENHCLLTINKFSNGAKYISGNRCEKGAGIVDKTLDRPNLIKYKFERTFNYTPLEEKNAPRGTIGIPRVLNMYEDYPFWFTFLTNLGFRVILSEKSNRKTYEKGMESMPSESVCFPAKLSHGHIIGLINSGIKTIFYPCIPYSRKEYQKADNHYNCPIVISYSEVLKNNVEELKDKNIKFLNPFLPFEPDKLAEIIMNLPEFKEYNFTKKELLSAAKKAETEYQNYKSDIHNKGQETLKFMEENNLKGIVLAGRPYHVDPEVNHGIDTLITSLGLCVLTEDSISNLTEAKRPLRVVDQWVFHARLYAAADFVGKHDNLELVQLNSFGCGVDAVTTDQVEEILTSYEKMYTLIKIDEINNLGAIRIRIRSLLASMNKRIKDNNSSMCNGNYEVNKKIFTKEMRKDYTILMPQMAPIHFEFLESAMKNSGYKMELLRDCTQHTVETGLKYVNNDACYPSILVTGQMIEALESGKYDLNKTALIMSQTGGGCRATNYIGFIRKALKDAGFENVPVISFNVVGMEKMPGFKLTIPLIERLIKSCIYADLLQKMLTKNRAYEINKGKTKELFDYWMEKCKKLVNKSSIKEFKQSIFDIVSDFEKIEIDTSVIKPKVGIVGEVLIKYHPFGNNFVADKLEQEGAEVILPDFMGFIKFIATHKITFNKLIKTDAIKAKLFKTAIKLIDLLEKPVISALNNSKKGYLLPCNIWNLEEKVNDILSIGNQTGEGWFLTAEMIEYIEHDIPNIVCVQPFACLPNHVVGKGVIKTIRSKFPEANIAPIDYDPGASEANQTNRIKLMMTVAKDNLKNKNNINKAIKKENYIIDEKNKISN

SEQ ID NO: 674 - protein, 1439 aa, unidentified
  REGION 1..1439: note = Description of Unknown: uncultivated organism sequence
  REGION 1..1439: note = Category: MG55 effectors
  REGION 1..1439: note = Description: MG55-249 effector
MIKTLHVGLDVGSTTVKIIVMDENLNTIYTDYKRHFSDTKNTICNVLENLIIMYPDTEFTIALTGSGAISAAKFLDLPFIQEVVSCKRAVEKYIPETDVVIELGGEDAKIIYFDKFIEQRMNGTCAGGTGAFIDQMASLLNTDPTGLNELAKSHKLIYPIASRCGVFAKTDIQPLLNEGAAKEDIAASIFQAVVNQTISGLACGRPIRGNVAFLGGPLNYLSELRNRFIETLNLKDNEIIVPNEAHLLVAKGAALDSLNSHTITIEKLKSKIEVLKSSHDDTSNPLNPLFSIDAEYDEFKKRHEKDKVKRADFKTFKGNCFLGIDAGSTTTKLVVISEDGTLLYSLYGSNEGNPLQSVINMLKKLYAEKPSEAVIRFSGVTGYGEKLIQTALNVDLNEIETIAHYTAAKEFMPNVTSIVDIGGQDMKYIKMKNGAIDNIMLNEACSSGCGSFIETFAKSLGLSIQDFVQSALEARRPVDLGSRCTVFMNSKIKQAQKEGYSVGDISAGLSYSVIKNAIQKVMKVRDVKKLGAHIVVQGGTFYNDAVLRAFELIVGRNVVRPDIAGLMGAYGVALLAKEQYENNLDMDYVSSISNINELDKLEINITHIRCQGCENHCLLTINKFSNGTKYISGNRCEKGAGIVDKTLDRPNLIKYKFERTFNYTPLEEKNAPRGTIGIPRVLNMYEDYPFWFTFLTNLGFRVILSEKSNRKTYEKGMESMPSESVCFPAKLSHGHIIGLINSGIKTIFYPCIPYSRKEYQKADNHYNCPIVISYSEVLKNNVEELKDKNIKFLNPFLPFEPDKLAEIIMNLPEFKEYNFTKKELLSAAKKAETEYQNYKSDIHNKGQETLKFMEENNLKGIVLAGRPYHVDPEVNHGIDTLITSLGLCVLTEDSISNLTEAKRPLRVVDQWVFHARLYAAADFVGKHDNLELVQLNSFGCGVDAVTTDQVEEILTSYEKMYTLIKIDEINNLGAIRIRIRSLLASMNKRIKDNDSSMCNGNYEVNKKIFTKEMRKDYTILMPQMAPIHFEFLESAMKNSGYKMELLKDCTQHTVETGLKYVNNDACYPSILVTGQMIEALESGKYDLNKTALIMSQTGGGCRATNYIGFIRKALKDAGFENVPVISFNVVGMEKMPGFKLTIPLIERLIKSCIYADLLQKMLTKNRAYEINKGKTKELFDYWMEKCKKLVNKSSIKEFKQSIFDIVSDFEKIEIDTSVIKPKVGIVGEVLIKYHPFGNNFVADKLEQEGAEVILPDFMGFIKFIATHKITFNKLIKTDAIKAKLFKTAIKLIDLLEKPVIFALNNSKKGYLLPCNIWNLEEKVNDILSIGNQTGEGWFLTAEMIEYIEHDIPNIICVQPFACLPNHVVGKGVIKTIRSKFPEANIAPIDYDPGASEANQTNRIKLMMTVAKDNLKNKNNINKAIKKENYIIDEKNKISN

SEQ ID NO: 675 - protein, 1439 aa, unidentified
  REGION 1..1439: note = Description of Unknown: uncultivated organism sequence
  REGION 1..1439: note = Category: MG55 effectors
  REGION 1..1439: note = Description: MG55-250 effector
MIKTLHVGLDVGSTTVKIIVMDENLNTIYTDYKRHFSDTKNTICNVLENLIIMYPNTEFTIALTGSGAISAAKFLDLPFIQEVVSCKRAVEKYIPETDVVIELGGEDAKIIYFDKFIEQRMNGTCAGGTGAFIDQMASLLNTDPTGLNELAKSHKLIYPIASRCGVFAKTDIQPLLNEGAAKEDIAASIFQAVVNQTISGLACGRPIRGNVAFLGGPLNYLSELRNRFIETLNLKDNEIIVPNEAHLLVAKGAALDSLNSHTITIEKLKSKIEVLKSSHDDTSNPLNPLFSIDAEYDEFKKRHEKDKVKRADFKTFKGNCFLGIDAGSTTTKLVVISEDGTLLYSLYGSNEGNPLQSVINMLKKLYAEKPSEAVIRFSGVTGYGEKLIQTALNVDLNEIETIAHYTAAKEFMPNVTSIVDIGGQDMKYIKMKNGAIDNIMLNEACSSGCGSFIETFAKSLGLSIQDFVQSALEARRPVDLGSRCTVFMNSKIKQAQKEGYSVGDISAGLSYSVIKNAIQKVMKVRDVKKLGAHIVVQGGTFYNDAVLRAFELIVGRNVVRPDIAGLMGAYGVALLAKEQYENNLDMDYVSSISNINELDKLEINITHIRCQGCENHCLLTINKFSNGAKYISGNRCEKGAGIVDKTLDRPNLIKYKFERTFNYTPLEEKNAPRGTIGIPRVLNMYEDYPFWFTFLTNLGFRVILSEKSNRKTYEKGMESMPSESVCFPAKLSHGHIIGLINSGIKTIFYPCIPYSRKEYQKADNHYNCPIVISYSEVLKNNVEELKDKNIKFLNPFLPFEPDKLAEIIMNLPEFKEYNFTKKELLSAAKKAETEYQNYKSDIHNKGQETLKFMEENNLKGIVLAGRPYHVDPEVNHGIDTLITSLGLCVLTEDSISNLTEAKRPLRVVDQWVFHARLYAAADFVGKHDNLELVQLNSFGCGVDAVTTDQVEEILTSYEKMYTLIKIDEINNLGAIRIRIRSLLASMNKRIKDNNSSICNGNYEVNKKIFTKEMRKDYTILMPQMAPIHFEFLESAMKNSGYKMELLRDCTQHTVETGLKYVNNDACYPSILVTGQMIEALESGKYDLNKTALIMSQTGGGCRATNYIGFIRKALKDAGFENVPVISFNVVGMEKMPGFKLTIPLIERLIKSCIYADLLQKMLTKNRAYEINKGKTKELFDYWMEKCKKLVNKSSIKEFKQSIFDIVSDFEKIEIDTSVIKPKVGIVGEVLIKYHPFGNNFVADKLEQEGAEVILPDFMGFIKFIATHKITFNKLIKTDAIKAKLFKTAIKLIDLLEKPVISALNNSKKGYLLPCNIWNLEEKVNDILSIGNQTGEGWFLTAEMIEYIEHDIPNIVCVQPFACLPNHVVGKGVIKTIRSKFPEANIAPIDYDPGASEANQTNRIKLMMTVAKDNLKNKNNINKAIKKENYIIDEKNKISN

SEQ ID NO: 676 - protein, 1439 aa, unidentified
  REGION 1..1439: note = Description of Unknown: uncultivated organism sequence
  REGION 1..1439: note = Category: MG55 effectors
  REGION 1..1439: note = Description: MG55-251 effector
MIKTLHVGLDVGSTTVKIIVMDENLNTIYTDYKRHFSDTKNTICNVLENLIIMYPDTEFTIALTGSGAISAAKFLDLPFIQEVVSCKRAVEKYIPETDVVIELGGEDAKIIYFDKFIEQRMNGTCAGGTGAFIDQMASLLNTDPTGLNELAKSHKLIYPIASRCGVFAKTDIQPLLNEGAAKEDIAASIFQAVVNQTISGLACGRPIRGNVAFLGGPLNYLSELRNRFIETLNLKDNEIIVPNEAHLLVAKGAALDSLNSHTITIEKLKSKIEVLKSSHDDTSNPLNPLFSIDAEYDEFKKRHEKDKVKRADFKTFKGNCFLGIDAGSTTTKLVVISEDGTLLYSLYGSNEGNPLQSVINMLKKLYAEKPSEAVIRFSGVTGYGEKLIQTALNVDLNEIETIAHYTAAKEFMPNVTSIVDIGGQDMKYIKMKNGAIDNIMLNEACSSGCGSFIETFAKSLGLSIQDFVQSALEARRPVDLGSRCTVFMNSKIKQAQKEGYSVGDISAGLSYSVIKNAIQKVMKVRDVKKLGAHIVVQGGTFYNDAVLRAFELIVGRNVVRPDIAGLMGAYGVALLAKEQYKNNLDMDYVSSISNINELDKLEINITHIRCQGCENHCLLTINKFSNGAKYISGNRCEKGAGIVDKTLDRPNLIKYKFERTFNYTPLEEKNAPRGTIGIPRVLNMYEDYPFWFTFLTNLGFRVILSEKSNRKTYEKGMESMPSESVCFPAKLSHGHIIGLINSGIKTIFYPCIPYSRKEYQKADNHYNCPIVISYSEVLKNNVEELKDKNIKFLNPFLPFEPDKLAEIIMNLPEFKEYNFTKKELLSAAKKAETEYQNYKSDIHNKGQETLKFMEENNLKGIVLAGRPYHVDPEVNHGIDTLITSLGLCVLTEDSISNLTEAKRPLRVVDQWVFHARLYAAADFVGKHDNLELVQLNSFGCGVDAVTTDQVEEILTSYEKMYTLIKIDEINNLGAIRIRIRSLLASMNKRIKDNNSSMCNGNYEVNKKIFTKEMRKDYTILMPQMAPIHFEFLESAMKNSGYKMELLKDCTQHTVETGLKYVNNDACYPSILVTGQMIEALESGKYDLNKTALIMSQTGGGCRATNYIGFIRKALKDAGFENVPVISFNVVGMEKMPGFKLTIPLIERLIKSCIYADLLQKMLTKNRAYEINKGKTKELFDYWMEKCKKLVNKSSIKEFKQSIFDIVSDFEKIEIDTSVIKPKVGIVGEVLIKYHPFGNNFVADKLEQEGAEVILPDFMGFIKFIATHKITFNKLIKTDAIKAKLFKTAIKLIDLLEKPVISALNNSKKGYLLPCNIWDLEGKVNDILSIGNQTGEGWFLTAEMIEYIEHDIPNIVCVQPFACLPNHVVGKGVIKTIRSKFPEANIAPIDYDPGASEANQTNRIKLMMTVAKDNLKNKNNINKAIKKENYIIDEKNKISN

SEQ ID NO: 677 - protein, 1439 aa, unidentified
  REGION 1..1439: note = Description of Unknown: uncultivated organism sequence
  REGION 1..1439: note = Category: MG55 effectors
  REGION 1..1439: note = Description: MG55-252 effector
MIKTLHVGLDVGSTTVKIIVMDENLNTIYTDYKRHFSDTKNTICNVLENLIIMYPDTEFTIALTGSGAISAAKFLDLPFIQEVVSCKRAVEKYIPETDVVIELGGEDAKIIYFDKFIEQRMNGTCAGGTGAFIDQMASLLNTDPTGLNELAKSHKLIYPIASRCGVFAKTDIQPLLNEGAAKEDIAASIFQAVVNQTISGLACGRPIRGNVAFLGGPLNYLSELRNRFIETLNLKDNEIIVPNEAHLLVAKGAALDSLNSHTITIEKLKSKIEVLKSSHDDTSNPLNPLFSIDAEYDEFKKRHEKDKVKRADFKTFKGNCFLGIDAGSTTTKLVVISEDGTLLYSLYGSNEGNPLQSVINMLKKLYAEKPSEAIIRFSGVTGYGEKLIQTALNVDLNEIETIAHYTAAKEFMPNVTSIVDIGGQDMKYIKMKNGAIDNIMLNEACSSGCGSFIETFAKSLGLSIQDFVQSALEARRPVDLGSRCTVFMNSKIKQAQKEGYSVGDISAGLSYSVIKNAIQKVMKVRDVKKLGAHIVVQGGTFYNDAVLRAFELIVGRNVVRPDIAGLMGAYGVALLAKEQYENNLDMDYVSSISNINELDKLEINITHIRCQGCENHCLLTINKFSNGTKYISGNRCEKGAGIVDKTLDRPNLIKYKFERTFNYTPLEEKNAPRGTIGIPRVLNMYEDYPFWFTFLTNLGFRVILSEKSNRKTYEKGMESMPSESVCFPAKLSHGHIIGLINSGIKTIFYPCIPYSRKEYQKADNHYNCPIVISYSEVLKNNVEELKDKNIKFLNPFLPFEPDKLAEIIMNLPEFKEYNFTKKELLSAAKKAETEYQNYKSDIHNKGQETLKFMEENNLKGIVLAGRPYHVDPEVNHGIDTLITSLGLCVLTEDSISNLTEAKRPLRVVDQWVFHARLYAAADFVGKHDNLELVQLNSFGCGVDAVTTDQVEEILTSYEKMYTLIKIDEINNLGAIRIRIRSLLASMNKRIKDNNSSMCNGNYEVNKKIFTKEMRKDYTILMPQMAPIHFEFLESAMKNSGYKMELLRDCTQHTVETGLKYVNNDACYPSILVTGQMIEALESGKYDLNKTALIMSQTGGGCRATNYIGFIRKALKDAGFENVPVISFNVVGMEKMSGFKLTIPLIERLIKSCIYADLLQKMLTKNRAYEINKGKTKELFDYWMEKCKKLVNKSSIKEFKQSIFDIVSDFEKIEIDTSVIKPKVGIVGEVLIKYHPFGNNFVADKLEQEGAEVILPDFMGFIKFIATHKITFNKLIKTDAIKAKLFKTAIKLIDLLEKPVISALNNSKKGYLLPCNIWDLEGKVNDILSIGNQTGEGWFLTAEMIEYIEHDIPNIVCVQPFACLPNHVVGKGVIKTIRSKFPEANIAPIDYDPGASEANQTNRIKLMMTVAKDNLKNKNNINKAIKKENYIIDEKNKISN

SEQ ID NO: 678 - protein, 1439 aa, unidentified
  REGION 1..1439: note = Description of Unknown: uncultivated organism sequence
  REGION 1..1439: note = Category: MG55 effectors
  REGION 1..1439: note = Description: MG55-253 effector
MIKTLHVGLDVGSTTVKIIVMDENLNTIYTDYKRHFSDTQNTICNVLENLIIMYPDTEFTIALTGSGAISAAKFLDLPFIQEVVSCKRAVEKYIPETDVVIELGGEDAKIIYFDKFIEQRMNGTCAGGTGAFIDQMASLLNTDPTGLNELAKSHKLIYPIASRCGVFAKTDIQPLLNEGAAKEDIAASIFQAVVNQTISGLACGRPIRGNVAFLGGPLNYLSELRNRFIETLNLKDNEIIVPNEAHLLVAKGAALDSLNSHTITIEKLKSKIEVLKSSHDDTSNPLNPLFSIDAEYDEFKKRHEKDKVKRADFKTFKGNCFLGIDAGSTTTKLVVISEDGTLLYSLYGSNEGNPLQSVINMLKKLYAEKPSEAVIRFSGVTGYGEKLIQTALNVDLNEIETIAHYTAAKEFMPNVTSIVDIGGQDMKYIKMKNGAIDNIMLNEACSSGCGSFIETFAKSLGLSIQDFVQSALEARRPVDLGSRCTVFMNSKIKQAQKEGYSVGDISAGLSYSVIKNAIQKVMKVRDVKKLGAHIVVQGGTFYNDAVLRAFELIVGRNVVRPDIAGLMGAYGVALLAKEQYENNLDMDYVSAISNINELDKLEINITHIRCQGCENHCLLTINKFSNGAKYISGNRCEKGAGIVDKTLDRPNLIKYKFERTFNYTPLEEKNAPRGTIGIPRVLNMYEDYPFWFTFLTNLGFRVILSEKSNRKTYEKGMESMPSESVCFPAKLSHGHIIGLINSGIKTIFYPCIPYSRKEYQKADNHYNCPIVISYSEVLKNNVEELKDKNIKFLNPFLPFEPDKLAEIIMNLPEFKEYNFTKKELLSAAKKAETEYQNYKSDIHNKGQETLKFMEENNLKGIVLAGRPYHVDPEVNHGIDTLITSLGLCVLTEDSISNLTEAKRPLRVVDQWVFHARLYAAADFVGKHDNLELVQLNSFGCGVDAVTTDQVEEILTSYEKMYTLIKIDEINNLGAIRIRIRSLLASMNKRIKDNNSSMCNGNYEVNKKIFTKEMRKDYTILMPQMAPIHFEFLESAMKNSGYKMELLRDCTQHTVETGLKYVNNDACYPSILVTGQMIEALESGKYDLNKTALIMSQTGGGCRATNYIGFIRKALKDAGFENVPVISFNVVGMEKMPGFKLTIPLIERLIKSCIYADLLQKMLTKNRAYEINKGKTKELFDYWMEKCKKLVNKSSIKEFKQSIFDIVSDFEKIEIDTSVIKPKVGIVGEVLIKYHPFGNNFVADKLEQEGAEVILPDFMGFIKFIATHKITFNKLIKTDAIKAKLFKTAIKLIDLLEKPVISALNNSKKGYLLPCNIWDLEEKVNDILSIGNQTGEGWFLTAEMIEYIEHDIPNIVCVQPFACLPNHVVGKGVIKTIRSKFPEANIAPIDYDPGASEANQTNRIKLMMTVAKDNLKNKNNINKAIKKENYIIDEKNKISN

SEQ ID NO: 679 - protein, 1439 aa, unidentified
  REGION 1..1439: note = Description of Unknown: uncultivated organism sequence
  REGION 1..1439: note = Category: MG55 effectors
  REGION 1..1439: note = Description: MG55-254 effector
MIKTLHVGLDVGSTTVKIIVMDENLNTIYTDYKRHFSDTKNTICNVLENLIIMYPDTEFTIALTGSGAISAAKFLDLPFIQEVVSCKRAVEKYIPETDVVIELGGEDAKIIYFDKFIEQRMNGTCAGGTGAFIDQMASLLNTDPTGLNELAKSHKLIYPIASRCGVFAKTDIQPLLNEGAAKEDIAASIFQAVVNQTISGLACGRPIRGNVAFLGGPLNYLSELRNRFIETLNLKDNEIIVPNEAHLLVAKGAALDSLNSHTITIEKLKSKIEVLKSSHDDTSNPLNPLFSIDAEYDEFKKRHEKDKVKRADFKTFRGNCFLGIDAGSTTTKLVVISEDGTLLYSLYGSNEGNPLQSVINMLKKLYAEKPSEAVIRFSGVTGYGEKLIQTALNVDLNEIETIAHYTAAKEFMPNVTSIVDIGGQDMKYIKMKNGAIDNIMLNEACSSGCGSFIETFAKSLGLSIQDFVQSALEARRPVDLGSRCTVFMNSKIKQAQKEGYSVGDISAGLSYSVIKNAIQKVMKVRDVKKLGAHIVVQGGTFYNDAVLRAFELIVGRNVVRPDIAGLMGAYGVALLAKEQYENNLDMDYVSSISNINELDKLEINITHIRCQGCENHCLLTINKFSNGTKYISGNRCEKGAGIVDKTLDRPNLIKYKFERTFNYTPLEEKNAPRGTIGIPRVLNMYEDYPFWFTFLTNLGFRVILSEKSNRKTYEKGMESMPSESVCFPAKLSHGHIIGLINSGIKTIFYPCIPYSRKEYQKADNHYNCPIVISYSEVLKNNVEELKDKNIKFLNPFLPFEPDKLAEIIMNLPEFKEYNFTKKELLSAAKKAETEYQNYKSDIHNKGQETLKFMEENNLKGIVLAGRPYHVDPEVNHGIDTLITSLGLCVLTEDSISNLTEAKRPLRVVDQWVFHARLYAAADFVGKHDNLELVQLNSFGCGVDAVTTDQVEEILTSYEKMYTLIKIDEINNLGAIRIRIRSLLASMNKRIKDNNSSMCNGNYEVNKKIFTKEMRKDYTILMPQMAPIHFEFLESAMKNSGYKMELLRDCTQHTVETGLKYVNNDACYPSILVTGQMIEALESGKYDLNKTALIMSQTGGGCRATNYIGFIRKALKDAGFENVPVISFNVVGMEKMPGFKLTIPLIERLIKSCIYADLLQKMLTKNRAYEINKGKTKELFDYWMEKCKKLVNKSSIKEFKQSIFDIVSDFEKIEIDTSVIKPKVGIVGEVLIKYHPFGNNFVADKLEQEGAEVILPDFMGFIKFIATHKITFNKLIKTDAIKAKLFKTAIKLIDLLEKPVISALNNSKKGYLLPCNIWNLEEKVNDILSIGNQTGEGWFLTAEMIEYIEHDIPNIVCVQPFACLPNHVVGKGVIKTIRSKFPEANIAPIDYDPGASEANQTNRIKLMMTVAKDNLKNKNNINKAIKKENYIIDEKNKISN

SEQ ID NO: 680 - protein, 723 aa, unidentified
  REGION 1..723: note = Description of Unknown: uncultivated organism sequence
  REGION 1..723: note = Category: MG55 effectors
  REGION 1..723: note = Description: MG55-255 effector
MRIIKRNGSEEDFNIEKIINAVKKANGSGEHKFLTDEQIEDVADYVEYKCNKIRRAVSVEEIQDMVEDQLMAKGAFELARRYVRYRYNRSLVRKANTTDNRILSLIECNNEEVKQENSNKNPTVNSVQRDYMAGEVSRDLTRRMLLPADIVEADKEGIIHFHDSDYFAQHMHNCDLVNLEDMLQNGTVISDTLIERPHSFSTACNIATQIIAQVASNQYGGQSISLAHLAPFVQVSREKIRRETLAEIEELGVHPTEEKINDIVEQRLRKEVNRGVQTIQYQVVTLLTTNGQAPFVTVFMYLNEAKNEQEKHDLAMIIEETLKQRHKGVKNEKGVWITPAFPKLIYVLEEDNITEDSKYWYLTELAAKCTAKRMVPDYISEKVMLQSKIDKNGEGHCFTCMGCRSFLTPYVDENGKPKYYGRFNQGVVTVNLIDIGLSAGKDLDKFWKIFDERMELCHRALQCRHERLTGTLSDAAPILWQYGALARLKKGEKIDKLLHGGYSTLSLGYAGLWECVYSLIGKKLTEKEGKELGLEIMQKLNDYCAKWKKEENIDYSIYGTPLESTTYKFAKCLQKRFGIIKGVTDKNYITNSYHVHVTENIDAFSKLKLESEFQALSPGGAISYVEVPNMQDNIPAVLQVIKFIYDNIMYAELNTKSDYCQVCGYDGEIKIVHDDGKLVWECPNCGNRDQDKMNVARRTCGYIGTQFWNQGRTQEIEERVLHL

SEQ ID NO: 681 - protein, 723 aa, unidentified
  REGION 1..723: note = Description of Unknown: uncultivated organism sequence
  REGION 1..723: note = Category: MG55 effectors
  REGION 1..723: note = Description: MG55-256 effector
MKIIKRNGSEVPFDITKIITAVTKASDSVSGKSRLTREQITQIAAEVTDQCQSLNRAVSVEEIQDMVENKLMDMKAHDIARHYITYRYVQSLKRQTNTTDERILSLIECQNEEVKQENANKNPTVNSVQRDYMAGEISKDLTARLLLDPEIVKAHQEGLIHFHDSDYFAQHMHNCDLVNLEDMLQNGTVISGTYIEKPHSFSTACNIATQIIAQVASNQYGGQSISLTHLAPFVDVSRKKIAAEVEAEMEGLNVSAERKKAIVERRLRNEINRGVQTIQYQVVTLMTTNGQAPFITVFMYLGEARNAQEKADLAIIIEETIRQRYQGVKNEAGVWITPAFPKLIYVLEEDNIRPGTPYYYLTELAAKCTAKRMVPDYISEKKMLEMKIDKNGEGHCYTCMGCRSFLTPYVDPETGKPKYYGRFNQGVVTINLVDVALSSGGNFEKFWKIFDERLALCHRALQARHKRLLGTPSDAAPILWQYGALARLKKGEKIDKLLFGGYSTISLGYAGLYECVKYMTGRSHTDAGAKPFALSVMQHMNDKCNEWKKAENIDYSLYGTPLESTTYKFAKCLQKRFGIVPGITDKNYITNSYHVHVSEPIDAFTKLKFESEFQRLSPGGAISYVEVPNMQDNLEAVISVLQFIYDNIMYAELNTKSDYCQCCGYDGEIKIVEDDGKLVWECPKCGNRDQNKLNVARRTCGYIGTQFWNQGRTQEIKDRVLHL

SEQ ID NO: 682 - protein, 723 aa, unidentified
  REGION 1..723: note = Description of Unknown: uncultivated organism sequence
  REGION 1..723: note = Category: MG55 effectors
  REGION 1..723: note = Description: MG55-257 effector
MKIIKRNGSEVPFDITKIITAVTKASDSVSGKSRLTREQITQIAAEVTDQCQSLNRAVSVEEIQDMVENKLMDMKAHDIARHYITYRYVQSLKRQTNTTDERILSLIECQNEEVKQENANKNPTVNSVQRDYMAGEISKDLTARLLLDPEIVKAHQEGLIHFHDSDYFAQHMHNCDLVNLEDMLQNGTVISGTYIEKPHSFSTACNIATQIIAQVASNQYGGQSISLTHLAPFVDVSRKKIAAEVETEMEGLNVSAERKKAIVERRLRNEINRGVQTIQYQVVTLMTTNGQAPFITVFMYLGEARNAQEKADLAIIIEETIRQRYQGVKNEAGVWITPAFPKLIYVLEEDNIRPGTPYYYLTELAAKCTAKRMVPDYISEKKMLEMKIDKNGEGHCYTCMGCRSFLTPYVDPETGKPKYYGRFNQGVVTINLVDVALSSGGNFEKFWKIFDERLALCHRALQARHKRLLGTPSDAAPILWQYGALARLKKGEKIDKLLFGGYSTISLGYAGLYECVKYMTGRSHTDAGAKPFALSVMQHMNDKCNEWKKAENIDYSLYGTPLESTTYKFAKCLQKRFGIVPGITDKNYITNSYHVHVSEPIDAFTKLKFESEFQRLSPGGAISYVEVPNMQDNLEAVISVLQFIYDNIMYAELNTKSDYCQCCGYDGEIKIVEDDGKLVWECPKCGNRDQNKLNVARRTCGYIGTQFWNQGRTQEIKDRVLHL

SEQ ID NO: 683 - protein, 703 aa, unidentified
  REGION 1..703: note = Description of Unknown: uncultivated organism sequence
  REGION 1..703: note = Category: MG55 effectors
  REGION 1..703: note = Description: MG55-258 effector
MKVIKRDGSTADFDSSKIIVAIQKANQVVEPEDRIDQERIEAIAHYVESKNRMRLLVEDIQDMVEHQLMDEGKFNLAKSYIIYRYTRALVRKANTTDESILSLIRNSNKDVMEENSNKNAVMASTQRDLIAGEVSKDLTRRLILPEKISKAHDEGAIHFHDADYFVQPIFNCCLINVGDMLDNGTVMNGKLIESPKSFQVACTVMTQIIASVASSQYGGQSVDIRHLGKYLRRSYEKFKLTIKAEVGDSVADEVVERLTKRRLQDELRSGVQTIQYQINTLMTTNGQSPFVTIFLNLQADDEYLEENAMIVEEILRQRLEGIKNDKGVFVTPAFPKLVYVLDEHNCLKGGKYDYITKLAVKCSAKRLYPDYISAKKMRENYEGNVFAPMGCRSFLAAWKDDEGNYKFEGRFNQGVVSLNLPQVAILAHGDEEKFWPLLDERLQLCYEALMCRHNSLKGIRSDVSPVHWQYGAIARLEKGEVIDKYLEKGYSTIGLYEMTKLMKDVSHTTPEGEEFALRVMKYLRAACDKWKKETGLGFALYGTPAESLCYRFARIDKERFGTIADVTDKGYYTNSYHVDVREDIDAFSKFNFESQFQRISSGGAISYVEIPNMRHNLEAMEDVVRFIYDNIQYAEFNTKSDYCHVCGFDGEIIINDDLEWECPNCGNKNQTLMNVTRRTCGYLGENFWNVGKTKEIKSRVLHL

SEQ ID NO: 684 - protein, 972 aa, unidentified
  REGION 1..972: note = Description of Unknown: uncultivated organism sequence
  REGION 1..972: note = Category: MG55 effectors
  REGION 1..972: note = Description: MG55-259 effector
MQIGLDIGSTTIKIAVLDDAGQLQFSKYERHYSQIAEKMQQLLAELHIKMPLLKTARLAISGSAGIGIADSCSLQFVQEVFAEKVCTERLNPGTEAVIELGGEDAKLLFLGRHFDARMNDSCAGGTGAFIDQMASLLSVPTEAMNELAQQASTRYTIASRCGVFAKSDIQPLLNQGAAKADLAASIFDAVASQAVTGLAKGRPITGKVLYLGGPLTFMSELRHSFDKILKIEGYCPENSLYYVAMGAAFCAENKVDLTELPAKLAAVGAQRDFDHLEPLFASTAEYDEFMERHSKERIEPGDISAATEAYIGMDAGSTTIKIAVISPSGQLLDSSYQSNKGNPVIAIKEYLQNFYIKYPHCRILGSAVTGYGEDLIRNGFSVDYGIVETMAHFIAAKTLQPDVDFILDIGGQDIKCLKIHNGCIDNIFLNEACSSGCGSFLQTFAEILGYSAEEFARIGLFADKPVDLGSRCTVFMNSSVKQAQKDGATVANISAGLSLSIVKNALYKVIRPGSKESIGKHIVVQGGTFLNDCVLRAFEKEMGLKVVRPNIAGLMGAYGAAIYSRSRHQETGHVSTLADAAALENFVHEVKAVTCGLCSNHCHLTVNTFASGKRFISGNRCERPVTHCAPDDTFNLYRQKLQLLESLKGVPGKRGKIGLPMGLNMYELLPFWHAFFTRLGFEVITSPIYDKTIFQKGQNTIPSDTVCYPAKLMHGHIKWLLENGINTIFYPCMTYNVDENSAENCYNCPVVAYYPEVLHANMHDLDNATYIFDYLGLGHKKVLLKKLQQICKEHFPDIGSSELKAALQEAYAAYNKFEAQVKELGQTIINTARSQHKPIVVLAGRPYHIDPKVNHSIDRLITTMGAALVSEDAVSSHISMQELNDDLQVLNQWTYHSRLYAAAKYVSRSSDMYMVHLVSFGCGCDAITADECRRILEEHGQIYTQIKIDDIDNLGAAKIRLRSLFAAAGLES

SEQ ID NO: 685 - protein, 724 aa, unidentified
  REGION 1..724: note = Description of Unknown: uncultivated organism sequence
  REGION 1..724: note = Category: MG55 effectors
  REGION 1..724: note = Description: MG55-260 effector
MKIIKRNGAEENFDISKIIMAVTKANAAVEECDRMTPRQIQRIAESVELACQELGRSAAVEEIQDMVEKQIMAHGAFEVAKAYITYRYTRSLVRRANTTDDRILSLIECNNEEAKQENSNKNPIVNSTQRDYMAGEVSRDITSRLLLPKDIVEAHEEGIIHFHDADYYAQHMHNCDLVNLEDMLENGTVITGTLIERPHSFSTACNIATQIIAQVASNQYGGQSISLTHLAPFVQVSRERIRREVEAEMQAIDAHPGEEKLAELVENRVREEIRRGVQTIQYQVVTLLTTNGQAPFVTVFMYLGEAKNEQERHDLAMIIEETLRQRYQGVKNEKGVWVTPAFPKLIYVLEEDNIHEDSPYWYLTELAARCTAKRMVPDYISEKKMLELKVDKNGEGHCYTCMGCRSFLTPYVDENGKPKYYGRFNQGVVTINLPDVALSSGGNMEKFWKIFDERLELCHRALMCRHERLKGTLSDAAPILWQYGALARLKKGEPIDKLLYGGYSTISLGYAGLYECVKYMTGKSHTDPSATPFALEIMQHMNDACAKWKQMHNIDFSLYGTPLESTTYKFAKCLQKRFGIIPGVTDKGYITNSYHIHVTEHIDAFSKLAFESKFQALSPGGAISYVEVPNMQNNIPAVLEVMKFIYDNIMYAELNTKSDYCQKCGFDGEIEILEQDGKLVWTCPQCGNQDQDTMNVARRTCGYIGTQFWNQGRTQEIKERVLHL

SEQ ID NO: 686 - protein, 728 aa, unidentified
  REGION 1..728: note = Description of Unknown: uncultivated organism sequence
  REGION 1..728: note = Category: MG55 effectors
  REGION 1..728: note = Description: MG55-261 effector
MYIIKRSGAEELFDHTKIETAIAKANETVEAVERATKAERELVARRVEECAETCGHALNIEEIQDLVVTNIMDLKLYRLAQNYAVYRYKRELVRKSNTTDEQILSLIECNNEEVKQENSNKNPTVNSVQRDYMAGEVSKDLTRRFLLPPDIVQAHEEGLIHFHDADYFAQHMHNCCLVNLEDMLQNGTVISETQIDPPKSFSTACNVATQAIAQVASSQYGGQTISLSHLAPFVQVSREKFRKQAIAEYDANGIDYTDEQVERAVAMRVKEEIKKGVQTIQYQVITLMTTNGQAPFITVFMYLDEVPEGQTRDDLAAIIEEMLHQRIIGVKNEKGVYVTPAFPKLIYVLEEDNIHEESKYFYLTSLAAQCTAKRMVPDYISEKKMKEIKIDANGDSYCYPSMGCRSFLTPYIDPETNKPKYYGRFNQGVVTLNLVDVACSSDGDMDKFWKILDERLQLCYRALMCRHKRLLGTPSDVAPILWQNGALARLKKGEPIDKLLFNGYSTISLGYAGLYETCMRMLGVSHTEKEKGMPFAKAVMQHLNDACKEWKEKENIDFSVYGTPLESTTYKFAKCLQKRFGKIKDVTDHNYITNSYHVCVREEINAFDKLKFESEFQPLSPGGAISYVEVPNMQNNIEAVLSVMKYIYDNIMYAELNTKSDYCMECGYDGEIKIVKEEGSGKLVWECPCCGNRDQNKMSVARRTCGYIGTQFWNQGRTAEIADRRLHL

SEQ ID NO: 687 - protein, 984 aa, unidentified
  REGION 1..984: note = Description of Unknown: uncultivated organism sequence
  REGION 1..984: note = Category: MG55 effectors
  REGION 1..984: note = Description: MG55-262 effector
MARRIKNVASNNYTLGIDIGSTTAKLALMCDGKIVYSKYQRHRSRIIGTTLDMLREMKEIHPVDKVRVTISGSAGMGMAEKAGIDFIQEVYATGEVVYKLAPDTGVVIELGGEDAKVIFFKGGVDERMNGSCAGGTGAFIDQMAVLLNMSVDDMDKASLEAKRIYPIASRCGVFAKTDIQPLLNQGASKADIAASIFQAVVNQTITGLIQGRKIEGKVMFLGGPLYYCEGLKKRFYETLSLTKETAVFPEYALYAVAMGASMYAQNSEEISFEELEKRIENSAKCESRGLDTLPPLFASKEEYDYFVQRHNKATVPQKDINTYIGNAWLGIDCGSTTTKLVLISDDRSILYSFYSSNKGNPVKLVKEQLEIIYFLCQNRIKICGSSVTGYGEELIRHAFRTDEGVVETIAHYTAAKYFRPDVDFILDIGGQDIKCFKIRNGAIDSIMLNEACSSGCGSFVETFAKAMGYNVSDFAKLGIFAKSPVNLGSRCTVFMNSSVKQSQKDGASVEDISAGLSASVVKNAIYKVIRANSPKELGNCIVVQGGTFYNDAVLRAFEKEIKNNVIRPSIAGLMGAYGAALHIMKSKESTLLSQKELETFTHTSNSSICRGCSNNCHLTINRFSDGETFVSGNQCQKALGLKNTEELPNLYAWKRNFFENLKPVRGTRGKIGIPMALSMYELAPLWNAFFTYLGFEVHFSALSNRKTYEKGQFTIPSDTACYPAKIMHGHMVELMEKGFENIFYPSITYNINEHAGDNHFNCPIVAYYAELLNGNMEELKNINFLYPYVSIDSPSELSKTIYDTILKLDPKVSKSEVLKAAKSGFAAYKEYKNKVKNEGAKAIAYARENGKRIMILAGRPYHIDPEIGHGIDKLATSLGFVVVSEDSVCELAPVQYVKVLDQWTFHSRLYRAARYATEHSDTELVQLVSFGCGVDAITTDEVRSILEEKHKHYTQIKIDEITNLGAVKIRLRSLIGALEEGEAK

SEQ ID NO: 688 - protein, 1416 aa, unidentified
  REGION 1..1416: note = Description of Unknown: uncultivated organism sequence
  REGION 1..1416: note = Category: MG55 effectors
  REGION 1..1416: note = Description: MG55-263 effector
MKLDFNTLGIDIGSTTVKIAILNKDGEIIFSDYQRHYANIQETLAKIIDEAYEEFGDIPVSPMITGSGGLTLSKHMEIPFVQEVVAVATSLKDYAPRTDVAIELGGEDAKIIYFTGGIDQRMNGICAGGTGSFIDQMATLLKTDAAGLNEYAKNYKAIYPIAARCGVFAKTDIQPLINEGATKEDLSASIFQAVVNQTISGLACGKPIKGNVAFLGGPLHFLTELKQAFIRTLGLEGDAIIAPEHSHLFAASGAAMNAHADVQSSLGELKEKLSHKIELEFEVTRMEPLFASEKEYEDFTERHNKHNVKKGDFASYKGDLFLGIDAGSTTTKVAVIGDDGSLLYSFYSSNNGSPLKTALKAMKDIYSKMPEGARIVRSCSTGYGEALLKSALLLDEGEVETVAHYTAAAFFDPNVDCILDIGGQDMKCIKIKNNSVDKVQLNEACSSGCGSFIETFAKSLNYEVADFAKIALFAENPIDLGSRCTVFMNSKVKQAQKEGASVADISAGLAYSVIKNALLKVIKLTDPKDLGKQVVVQGGTFYNDAVLRSFERISGCEAIRPDIAGIMGAFGAALIAKDRYTGQKSTMLSFKEINELRFKTSMTRCQGCINHCLLTVNEFTGDRKFISGNRCEKGLGLEKNKEHIPNLFEYKNERVFKHYKPLKKADAPRGVVGIPRVLNMYENYPFWFTFFTKLGYSVKLSPVSSRKIYELGIESIPSESECYPAKLAHGHVTWLIRQGLEYIFYPCIPYERVEVPDAGNHYNCPIVTSYGENIKNNIEELRDDKIKYQNPFISLESEEILTKRLVDFFRKENGIPAAEIKAAAHEGWLEMQAVREDMNKKGKEVLQYLKETGRHGIVLAGRPYHSDPEINHGIPDLITSYGVAVLTEDSISELSEVDRPTIVMDQWMYHSRLYKAASFVAKNDNLDLIQLNSFGCGLDAVTTDQVNDILTKQNKIYTVLKIDEVNNLGAARIRIRSLLAAVKDRERKKIEAKRVDTAHHRVIFTEQMRKDYTILVPDMSPIHFEILESALASCGYNVEVLKADSKCIDYGLKYVNNDACYPSLIVVGQFMQALLSGKYDLHKVALIITQTGGGCRATNYIGFIRRALEKAGMGYIPVISMSAGIEKNPGLKVNLEMANKALQALIYGDVFMRVLYKTRPYEKVKGSANALHEKWKKIAIESVKKANKKQFKKNIQNIVKEFDELELVDIKKPKVGIVGEILVKFMPLANNFIVELLEEEGAEAVCPDLIDFFMYSLYNANFKAEYLGKKKSSAKINNFLIWFIERYRKCANDALAASKRFHPTVPIQKLAEYASPIVSCGNQTGEGWFLTGEMIELIKSGVPNIVCTQPFGCLPNHVVGKGVIKELRHQYPDSNIVAVDYDPGASEVNQLNRIKLMLSTAGKNLIAESKDNEETA

SEQ ID NO: 689 - protein, 1415 aa, unidentified
  REGION 1..1415: note = Description of Unknown: uncultivated organism sequence
  REGION 1..1415: note = Category: MG56 effectors
  REGION 1..1415: note = Description: MG56-1 effector
MDKITREDKAKYFINKNKTGVHLLERDKKRARVFSLFKKLVTALHAEYIDRVLSENDNTESLSDDFASLINKLVDYKNKKSRESDDLSDIEKNVNKLKKELASSINKVLKNKNNAIEIAIGERNITIDFNALTGAGDPGADKLVEAFREIPIEDLKKAEIFKHYIDEQDWDLEDISWGKEADALNPFSFFHKWKTYLRKFYQIRAKIYDTDGYDSDTENSGIVKGLAHQITTRILDDNAELFVQNYQKYLSQIAEKDYKAKLDEQLSKELSVNSDIFKPENFANVLSQSQIDIYNKAVGIANRFLNEKLQGSGKKPDFFKKLYKQILGKENKDENSDSKDEFLEFDTIDELQKFLLVANDYDGKPFLQYAVDLLDKDIFTGLLDKENKKLNFPETELGEFRLNTNQLSFISNFAFGNWEVFRDAVKRVKEELKNKKDDELTGEEKQVIDSVNKFLDENEIALSELVQIFRFKVEDPDSSEKTKINLTGKDLYKLVKEESAWNLPKEELQKFSQEDTGDAALYNLLLVFELYFNSLRNGRAWHTAVEEKEMEESCDKKTCPEHKSLRELFEDLKSYVSAHGEQIKESKNKRNDYMEKLSILFYRLNDMNKFLYLFELADDESLYTNKALQEIVKINPRKNKINEAFNATRNYATKAIVVEDKIKLTFERQKLADGWSLKKTENRWGNQYEAFILKKNDKYHLGINAKLPFRIENNFNLDGFEIMEYKLLKNKTLFGSSWRGYFNESSPNYTLERLRKENPDTAVKKINKMLAEFLNEKFVKTNYFSAITDKFKEIVALLESGKVDFELSYEKLSSLYAKKFSTEYKDDDSDKSTKLDRMEELSKYLVDEQILNTIPLHCIVNKIKSILDKKEGVLSGNEVAMCYIATLEKYMYEIEFINVNKKNPPTNLVLFEIYNKDFSDKKEADSTKNIHTLYFLELFSAENKKNSQFKLSGQAEVFFRDALPESEREKVSKAELKKPKTDKIPYRKKRFASPKILFHVPIEINRLAGKGGVADEIKEYIKNNKDEISVIGVDRGEKHLAYYCLLDKDGNIKEIDSLNEIEGIKFQEKLTAREEQRMKNRKLWKTIEQIKDLKKGYISFVIRKLAEMIVDNNTILTMEELNRGFKRGRMKIEKNIYQQLENALLHKLEYFVKEKTSGGIRNAYQLVPPVGPQYKWGSQQGVVFYVDAKFTSKTCPKCGYRRRGVNFGSSKDIRKMMDKKDLQLFYDKENDRFIVKYKWEYKYKNPSGNEIPFRSDYLLTDSNGFETIYSNIDRSVWRKKQHNVERINVTKILKEALLDVDLDDLAINKNIFEIPDIEVSFSKLKMALKYWTNLRFEDNWSDIEDDKRDVLQCPSCHFDTRKANHLINGDAVGAYNIARKGILAKQNLAEKNKAKVILKEWDEYTHQQRSEQRDL

SEQ ID NO: 690 - protein, 1189 aa, unidentified
  REGION 1..1189: note = Description of Unknown: uncultivated organism sequence
  REGION 1..1189: note = Category: MG56 effectors
  REGION 1..1189: note = Description: MG56-2 effector
MNKYQKTSAIRLALKVNENFESNLKNAIETYKKNTADPEELCSRLIEILKKVIELFDKEEVKKDEYKSLLYKLKLSPHIIGSEFGLFISGSGRADSLRLNSRKLKGFFSTLFKKTNESLISLEKQLTEKNTPNFSPKNTRKILDEIFKSSLDIEHELLKRKAPTLKEAIDLIQKQNYHSDDLVPQEFAELQKTLAKLSKILDKLKESLSIFHEVITASLNEHTLTRQTTLEEREKKIKEEEDKLTQKVWAGDLKDNLNYISRFVAGHKNAFKATMNYLGKSINDNFITVEEAGKWTKKFYKIIAEGYKTEIKGLKKEVDELAKQIIGSDLEEFVKSNKDKIRVNKIKIDQNIKNSAINIFKKYLPDLPSNIKDDFLIKFLRNRILKVLIDNLIGKENKKYQIKPERKNAANELAKIINNKSEDNLEESQIIEILLNKKQKAAHTAGTNYTHIINKSNFIQNKNKVAKYIGNIKAKIATYKKDKKNLSHLALLVLDKKDENFDLLLVPKKFKKEFLYTLERLNEPVGDKKIYKIESLTLRSAKTLISANLGELIPFFKAGKWHTIFAFKAFLIKYLLDAGSINSTKAAALKCKVVEEFKKLIEYASLGGQEQKEADKFIGVVDKLICNSKNRFSHIELSHSFAEKSISIVEKDYSDVADFKKDFTELYNFVLVANVNSGKLIKLIQEAQKKFNNPNNLQFSNLFLLTSSGVKGNYRQNRRYLKEEKELLQSIKKQDFESIRLNPEIKIFLELGLDTQSSEELKELASKTRRGKDRLSIVFTITKNAKEEEDFLPAFAQDEDLETRIFELNKVVNENLKNAVRIGLDRGESELVSAVFGKIEEGRVKFQKIQVYYIDYKKIFDENQEGAVKIFLNPSLLFDENKPYTKYTKHLIEKEISQENLSYAKVIKDKVIMNADISSVVNQLMYITFADLNIEQVENLIVAEPGFVDKTKTIQLKFNGINSKKFGINASYLYLNGNITEDVKENFISAFLIKVLEHKLKIFNERVLPLIKIGQISIDTLPKNTKEALASNIAGVIAYLIEKEFNNQAIIHLEDLSAQFKDDHSKNGRAISREFEWALYRRLGKIENDFDLVPPKLGQTIYFAEIKKLKQAGIIKYLPTGKSSSFCPECLQFNFTNKDGIKKYIKITQKCQFCDFEIGNNELGIDSPDTLAAYNLIYPEFERRAINNN

SEQ ID NO: 691 - protein, 1403 aa, unidentified
  REGION 1..1403: note = Description of Unknown: uncultivated organism sequence
  REGION 1..1403: note = Category: MG57 effectors
  REGION 1..1403: note = Description: MG57-1 effector
MEKFTNLYQLSKTLRFKLEPIGNTAETFKQWLNDMNSTNESDNLFAKDKNIYDAYLVIKSIMDKLHEQFIEKSLLSDEAKQIDFSEYYEVFKDSTKEISTDLEKRLRREIGNTYNVGGSFFLNEIATATKKLEEEKNKVRKSGKKSKGEKTDNKKKKKPYEYLTDAKILNYLSANVKTLAIQNDIEEQELDKHIKQFKGFWGYLGGYNQNRENYYEVEKEASTAVATRIVHENLPTFCSNALRFEKHKDEYLGIHQYLKDNNLITKIKNSSGEENEAETMTDTIFLIGHFNECLAQTQIEEYNRIIGNYNYLINLYNQARCDEKGFNKIDEFEKLKKQIGCGKKKHMFASLIKDKQSELTETEKKNEIEDGAILSVETLLKRAKEAGDVMFNNGNDEVEIKTIPDFIQFLKECDNWDGIYMSKTAINKISNLYFANWHSIVDTFIEIYNGKDKELKEKVNTSVTYDKKREDPLKLRDAIELSGLFAVLDTVPTEHFFKESLFKEDDTNEYRGLLDKTLPPSKNLIKLLCFDIEHNTKAFLNKSRDVIKLEKYKEENIQADEEDQKIKLIKDWFDAATDVMRIVRYFAVRKGKMKGNLPNVTMEQALSNLLYRDDAQWFKWYDLIRNYLTKKPQDDVKENKLKLNFGNSSLLGGWSDGQEKTKAATLLRCENDLYLCILKKRDVFDTSKDNPIYSSPSNASRLIIRNLKFQTLAGKGFLSEYGISYGEMSKDDPKKAIQCLQEIIKERYVKKYPLLEKFVTIKYADKSEFDAEINETLKECYVCEFVPINWNLIVEKQNNDELFLFKILCKDYKPNSIGKRDLQTIYWEDVLSDASNHQLCAGAEIFMRKPIANESPLTHRIGSKLVNKRDKDGNTIPDKFYREIYLYANGKTKVISKEAKKYIDEEKATIKDVNHEIIKDKRFYGDSQEPQYMFHCPIKLNYKTKGYKEPQYAFPEVNAKINGALQQSENMQFVGIDRGEKHLVYSCTIDKDGKIVKDTNNEWKCQHHDNINGTDYVKKLEAIAGERIIAKKNWQAQNRIKDLKCGYISHVVHRLVEEVIKDDNNRISPHAYIVLEDLNTEMKRGRQKIEKQVYQNLEVALAKKLNFVVDKEAKQGELGSVSKALQLTPPISNYQDIEGKKQFGVMLYTRANYTSITDPATGWRKTIYIRNGKEEDIKKQVLEKFSDFGFDGKDYFFEYTEANAGHTWRMYSGKNGEPLLRFQNKKQMQKDKNVWVPEPINVVEILDNLFADFDKAKSFKEQINGGVKLKKIDGRNETAWQSLRYALDIIQQIRNSGIKETDDNFLYSPVRSANGEHFDTHFPEKNGELSAIRDADANGAYNIARKGLIMDAHYRYWIEQGKPEIKKGETALSLYVSDIEWDMWLLDKEMWKRHLGEFALKKK

SEQ ID NO: 692 - protein, 1372 aa, unidentified
  REGION 1..1372: note = Description of Unknown: uncultivated organism sequence
  REGION 1..1372: note = Category: MG57 effectors
  REGION 1..1372: note = Description: MG57-2 effector
MKTKTITIMKEKEQYSDFTNLYQLSKTLRFELKPVGKTAETFKQWLSEMNNSDKEENLFAKDKKIKNAYMVIKPIIDKLHERFIEKSLTSKEAKEIDFSPYFEAYKQKNVLDTFEEGLRKKIGETYTVAGGFQYLTDKRILNYLSANVEELAKQNGIDEKTLANHIEQFKGFGGYLSGYNQNRMNYYTTKEEQSTAVATRIVHENLPTFCDNILRFEKSREGYLSICQYLKDNNREIKIKNAQGEETEAETITEAIFQIKHFNSCLAQSQIEEYNRIIGNYNFLINLYNQARREEKEFKKLDEFESLYKQIGCGEKKSLFESLHDDSDLKALLQKIKEAGDTFFKECCDETEISTVSAFIKFLKECDNWEGIYMSSAAVNKISNLYFTNWHSIKDKLKESNANACITYDKDREEPVKLRDAVELSELFAVLNKESLEHLFKESLFKDNKLDTELTPSHNLINLLCSDVKQNIDYFWEHSEGITDLINDKNQSNEETQKIKQIKEWLDAAMNAMRIVRYFAVRKSKMKGNMPNVTIEQALSNLLYNDDAQWFKWYDLVRNYLTKKPQDDVKENKLKLNFGNSTLMNGWDMNKERDNTAVIIRRNNLYYLGIMDKNYNKILDADKIKSDDKSSYYEKMDYKQIALPTGVGGFVRKCFDTAQQYGWSCPKDCLNEDEKIIIKDDEARKNLTKIIDCYKDFFDKYEKDGFKYRNFNFRFLKSTEYEKLSDFFKDVERQRYMIKFRNISADYIDDLVNEGKLYLFQIYNKDFSTGRNERNGSKGKPNMHTLYWKTLFDETNLNDVVYKLNGQAEIFMREPIAENSPVKHGVGSKLVNKRDKDGNTIPEQIYKEIYLFANNKVKKENLSAEAKNYIESEKVKIKEAKYEIVKDNRFYGETKYMFHCPITINFKAGSSSGVNEKITDALQQSDNLQFIGIDRGEKHLVYSCTIDKYGKIIKCNHHDNINGTDYVQKLEAVANERLIAKKNWQQQNRIKDLKSGYISHVVHRLVEETIKDDKTIAPHAYIVLEDLNSEMKRGRQKIEKQVYQNLELALAKKFNFVVDKTAKQGELGSVSMALQLTPPVTNYKDIEGKKRFGIMLYTRANYTSITDPATGWRKTIYIKNGKDEEIKAQIIDKFSNFGFDEKDYYFEYTEENAGHTWRMYSGKDGKPLPRFQNKKQMLQDKNIWVPEQINVKEILDKLFANFDKGRSFKEQVNEEVKLEKIEGRSETAWQSLRYALNMIQQIRNSGVEKTDDNFLYSPVRNENGEHFDTRNHENNGDLSPIVDADANGAFNIARKGLIMDAHIKKWIKEGKPTTKEGDSKTPDLDLFISDREWDLWLLDREEWKKYLPVFASKSKKDADKTTSTKSPKRKKK

SEQ ID NO: 693 - protein, 1353 aa, unidentified
  REGION 1..1353: note = Description of Unknown: uncultivated organism sequence
  REGION 1..1353: note = Category: MG57 effectors
  REGION 1..1353: note = Description: MG57-3 effector
MKKKLDDFTNLYSLSKTLRFELKPEAETNKRFDDWIKELEANNETTVENLIAKDYKIFNAYKALKPILDSIHEEYITIALQSDTAKNIDFLTFYEAYSDKSKDTKNIESDLRNEIEKSFEVAEEDFFDAIKSVEPKVKKSTKASVLTDKYILSYIEKNMKNFVSNTLSEEELEKHLNAFKGFFTYFSGYNINRANYYDCKEEKNTAVATRIVNENLPIFCNNKIRFEKYRQQYSIIYSELKNLGVETKIVDNNGKLQESEPISDSVFDIKYFNYCLSQVEIEKYNQIIGNANFLINLFNQQKSKEQKFAKLPLFEKLRKQIGCGTRKNLFFALKKDKEPELTEKERNSEEILSVEKLLKITAEAGERIFNGHNNTEYSVKKLIDFLQTQTNWDGFYWSDASVSYISNKFFANWHDLLDKLKDNKACASFVKKRDEQVKLNEAVELSGLFQVLDKEANEQAFKKSVLDNYRCIINLKESVSSNLINIICSDLQNFLNEFNKNKTAILTLEKYKKKNAYNTEYDSNIRLIKEWYDSIKGILRIVGLFHAKKTKMKGCLANPEIENFVESILNPENVSWNKWYDGIRNYLTKKPQDDVKENMLKLNFGSSSLLGGWSDGQEKVKISTILKHENQVYLCILKNKQFFDTSKDNNPVYKGDGGFRLILRNLKFQTLAGKGFIGAFGQGYSEMGKETPKKAMDCLKSFIKDNYIGKYPILQSVIINEYKNKKDFDLAIQEKLKECYECKFIPIDWNKIIEAEKNGDLFIFQISSKDSKENSRGRKDLQTLYWESVLSENSPHQLCAGAEIFMRKPVDKKSPVIHKKGSILINKRFSDETTIPDELYKKLMAFVASIKQPFENEQAVKDLLFKSELSKIYAKEYLDKVKLRIAEYDIEKDKRFYGETKYFFHCPIKLNYNLKTYGKPEYAFTEINQKVNDVFTSLESPYFIGLDRGEKHLVYLCEIDNSCNIIDCRSLNNINGTNYMLKLEEKAGSRQKSRQEWQRIDNISNLKDGYVSHVVHAITEKVVNEPSYIVLEDLSRKMMQGRQKIEKSLYQKFEVALAKKLNFVVEKEIPNGEPGSVSSALQLTPPLNNYKDIENKRQFGIMLYTRANYTSVTDPVTGWRKTIYLKKGSAESIRQQIIDTFSEIGFDGKDYYFEYIELNAHKTWRMYSGKDGVSLPRFINEKKLQEDKNLWIPVEVDIVEILNQLFHCFDKNKSLLEQIKDGKELNKLCNRNETAWESLIFAINMIQQIRNNGCTEQDENFLYSPVRNENGVHFDTRKQDNTKYPADADANGAYNIARKGIIMHEHILQWRKEGSKKGDVDLFVSDEEWDLWLLDRKRWQEKLPYFASKSAKK

SEQ ID NO: 694 - protein, 1357 aa, unidentified
  REGION 1..1357: note = Description of Unknown: uncultivated organism sequence
  REGION 1..1357: note = Category: MG57 effectors
  REGION 1..1357: note = Description: MG57-4 effector
MKKKLDDFTNLYSLSKTLRFELKPEAETNKRFDDWIKELEANNETTAENLIAKDYKIFNAYKALKPILDSIHEEYITIALQSDTAKNIDFSTFYEAYSDKSKDTKNIESDLRNEIEKSFEVAEEDFFDAIKSVEPKVKKSTKASVLTDKYILSYIEKNMKNFVSNTLSEEELEKHLKAFKGFFTYFSGYNINRANYYDCKEEKNTAVATRIVNENLPIFCNNKIRFEKYRQQYSIIYSELKTLGVETKIVDNNGKLQESEPISDSVFDIKYFNYCLSQVEIEKYNQIIGNANFLINLFNQQKSKEQGFVKLPLFEKLRKQIGCGTRKNLFFALKKDKESELTEKERNSEEILSVEKLLKTTAESGERIFNGHNNTEYSVKKLIDFLQTQTNWDGFYWSDASVSYISNRFFANWHDLLDKLKDNRACASFDKKREEQVKLNEAVELSGLFKVLDKETNEQAFKESVFDNYKNIIDVKESVSSNLINIICSDLQNFLNEFNKNKTSILTLEKYKEKNAYNTEDDSNIRLIKEWYDSIKGILRIVGLFHAKKTKMKGSLANPEIESFVESILNPENVFWNKWYDGIRNYLTKKPQDDVKENMLKLNFGSSSLLGGWSDGQEKVKISTILKHENQVYLCILKNKQFFDTSKDNNPVYKGDGGFRLILRNLKFQTLAGKGFIGAFGQGYSEMGKETPKKAIDCLKSFIKDNYIGKYPILQSVIINEYKNKKDFDLAIQEKLKECYECKFILIDWNKIMEAEKNGDLFIFQISSKDFKENSRGRKDLQTLYWESVLSENSSHQLCAGAEIFMRKPVAEKSPVIHTKGSILINKRFSDGTTIPDELYKKLMAFVASIKQPFENEQAVKDLLFNSELSRIYAKEYLDKIKFRIAEYDIEKDKRFYGKTKYFFHCPIKLNYNLKTYGKPEYAFTEINQKVNDVFTSLESPYFIGLDRGEKHLVYLCEIDNSCNIIDCRSLNNINGTNYMLKLEEKAGSRQKSRQEWQRIDNISNLKDGYVSHVVHAITEKVVNEPSYIVLEDLSRKMMQGRQKIEKSLYQKFEVALAKKLNFVVEKEIPNGEPGSVSSALQLTPPLNNYKDIENKRQFGIMLYTRANYTSVTDPVTGWRKTIYLKKGSAESIRQQIIDTFSEIGFDGKDYYFEYIELNAHKTWRMYSGKDGVSLPRFINEKKLQEDKNLWIPVEVDIVEILNQLFHCFDKNESLLEQIKDGKELNKLCNRNETAWESLIFAINMIQQIRNNGCTEQDENFLYSPVRNENGVHFDTRKQDNTKYPADADANGAYNIARKGIIMHEHIVQWKKDGSKKGDVDLFVSEEEWDLWLLDKNKWQEKLPYFASKSAKKKNEY

SEQ ID NO: 695 - protein, 1410 aa, unidentified
  REGION 1..1410: note = Description of Unknown: uncultivated organism sequence
  REGION 1..1410: note = Category: MG57 effectors
  REGION 1..1410: note = Description: MG57-5 effector
MEEFTNLYQLSKTLRFELKPVGKTAETFKQWLEELKNDELVVDNDGNLFAKDKSIKDAYLAIKPIMDRLHEQFIEMSLLSEEAKQIDFSDYFEKYQKNNVPEKLEGGLREIIGNTYKVAGNYLSEEISIVLGKEFKTKKDRPYECLTDAKMYNYLSAHVKDLAEQNGIDEEDLKKHIEQFKGFWGYLDGYNQNRENYYKVDKEASTAVATRIVHENLPTFCSNAIRFEKRKEEYLCIYRYLHDNSRETKIKNAKGEEIDVEAISDVIFQINHFNECLAQSQIEEYNRIIGNYNMLINLYNQLRCGEKDFKKVDEFEKLRKQIGCGKNKSMFETLQDDCDVKNLLRKASKAGKMMFGVASDNIEIKTVPDFIKFLRECDNWDGIYMSKTAIDKISSLYFANWHSIKDKLKESKADACITYEKKREEPIKLRDAVELSGLFAVLDSEQSEHFFKDSLFKDDDTNNYRGILNIDLKPSSNLINLLCFDIEQNIKAFLDESDNIVALEKYKDENNQAGEEDQTIKKLKEWFDAATSAMRIVRYFAVRKSKMKGNNIPNATMEQALSNLLYSDDVQWFKWYDLIRNYLTKKPQDDVKENMLKLNFGNETLMDGWDMNKEHDNSTVILRKNGKNGWYYLGIMDTKHKDVLDKEKVRTTGECYEKMDYKQIALHSGVGGFVRKCFGTAQNFGWRCPNNCLNEEGKIIIKDDEAQANLKEIIDCHKDFFDKYEKDGFKYKDFNFDFRESNKYGKLSEFYRDVEQQGYKITFRNVSVDYINDLVSEGKLYLFKINNKDFSPGKNGGKGSIGKPNLHTMYWRMLFDENNLKDVVFTLNGKSEIFMRKPVAKESPTKHSIGSKLVNKQYKDGDTKKTIPEKIYREIYSYANGETKDISAEAKKYIDEKKAIIKDVKHEIIKDNRFYGDDIEGTKYMFHCPITINFKANKYKDPKYAYPEVNKKITDSLQQSDNLQFIGIDRGEKHLVYSCTIDKNGRIIKDKCHHHDNINGTDYVQKLEAVADDRTIAKENWQAQRKIKDLRDGYISHVVHQLVEEAIKDDGKIAPHAYIVLEDLNTEMKRGRQKFEKQVYQNLETALAKKLNFVVDKDAKQGELGSESNALQLTPPINNYQDIEGKKQFGVMLYTRSNYTSVTDPATGWRKTIYIKNGKEEDIKKQILEKFSDFGFDGKDYYFEYTESNAGHLWRMYSGNNGEPLPRFLYKKQILKDKNNWVPERIDVVKILDKLFANFDKAKSFKSQIENGVELQKDEERNETAWQSLRFALDLIQQIRNSGEKDSEDDNFLFSPVRNDKGEHFDTHNYKNNAELSEIKDADANGAYNIARKGLIMDAHIKYWIEKGRPKISAKKDEKTSDLDLFISDREWDLWLLDKKLWKKELPTFASKSAKYDSDTPQTAKKRKKR

SEQ ID NO: 696 - protein, 1358 aa, unidentified
  REGION 1..1358: note = Description of Unknown: uncultivated organism sequence
  REGION 1..1358: note = Category: MG57 effectors
  REGION 1..1358: note = Description: MG57-6 effector
MEEKEKVQYSDFTNLYQLSKTLRFELKPIGKTKETFEGWLKENNSFNNEDNLFAQDKKIKDAYVVIKSIMDKLHEQFIEKSLTSEEAKNIDFSDFLDIYKYRGNDFPKDFEKKLREQIGNTYKVAGAYFSKEISEALNKEFKTKKPFECLTDAKMLNYLSANVKEIAEQNNIDQETLANHIEQFKGFWGYLSNYNKNRENYYTTDKEQSTAVATRIVHENLPTFCDNILRFEKSREGYLSICQYLKDNNREIKIKNAQGEETEAETITEAIFQIKHFNSCLAQSQIEEYNRIIGNYNFLINLYNQARREEKEFKKLDEFESLYKQIGCGEKKSLFESLHDDSDLKALLQKIKEAGDTFFKECCDETEISTVSAFIKFLKECDNWEGIYMSSAAVNKISNLYFTNWHSIKDKLKDNKACVTYDKNREEPIQLRDAVELSDLFKVLDDKEQSEHFFKESLSNDINEKECPSKNLINLLCFDIEQNISKFLANSENIINLLNGNKDNQASEEDKIKQIKEWLDAAIDTMRIVRYFAVRKSKMKGNLPNTTMEKALNNLLYNDDAQWFKWYDLVRNYLTKKPQDDAKENKLKLNFGNPSLLGGWSDGQEQTKAATLLKYNNELYLCILKIRNIFDTSKADNPIYTKAPFCACRLILRNLKFQTLAGKGFKSKYGIKYSEMGNEDQSQAIKCLKEIIRERYAKKYPPLEQIINQEYSDKKSFDNEVKEALKECYVCEFVPINWDVVSKKQNSTDLFLFKIHCKDYLPKATGKKDLQTMYWEDVLSDSSNHQLCGGAEIFMREPVPKESPVKHGVGSKLVNKRDKDGNTIPEQIYKEIYLFANDKVKKENLSAEAKNYIESEKVKIKEAKYEIVKDNRFYGETKYMFHCPITINFKAGSSSGVNEKITDALQQSDNLQFIGIDRGEKHLVYSCTIDKYGKIIKCNHHDNINGTDYVQKLEAVANERLIAKKNWQQQNRIKDLKSGYISHVVHRLVEETIKDDKTIAPHAYIVLEDLNSEMKRGRQKIEKQVYQNLELALAKKFNFVVDKTAKQGELGSVSMALQLTPPVTNYKDIEGKKRFGIMLYTRANYTSITDPATGWRKTIYIKNGKDEEIKAQIIDKFSNFGFYGKDYYFEYTEENAGHTWRMYSGKDGKPLPRFQNKKQMLQDKNIWVPEQINVKEILDKLFANFDKGRSFKEQVNEEVKLEKIEGRSETAWQSFRYVLNMIQQIRNSGIEKKDDNFLYSPVRNENGEHFDTRNPQNNGGLELIVDADANGAFNIARKGLIMDAHIKHWINSGRPKIKKDGKETSDLDLFISDREWDLWLLDREEWKKYLPVFASKSKKDAEKLPLQSPQKERRNNKY

SEQ ID NO: 697 - protein, 1353 aa, unidentified
  REGION 1..1353: note = Description of Unknown: uncultivated organism sequence
  REGION 1..1353: note = Category: MG57 effectors
  REGION 1..1353: note = Description: MG57-7 effector
MEEKEKVQYSDFTNLYQLSKTLRFELKPIGKTKETFEGWLKENNSFNNEDNLFAQDKKIKDAYVVIKSIMDKLHEQFIEKSLTSEEAKNIDFSDFLDIYKYRGNDFPKDFEKKLREQIGNTYKVAGAYFSKEISEALNKEFKTKKPFECLTDAKMLNYLSANVKEIAEQNNIDQETLANHIEQFKGFWGYLSNYNKNRENYYTTDKEQSTAVATRIVHENLPTFCDNILRFEKSREGYLSICQYLKDNNREIKIKNAQGEETEAETITEAIFQIKHFNSCLAQSQIEEYNRIIGNYNFLINLYNQARREEKEFKKLDEFESLYKQIGCGEKKSLFESLHDDSDLKALLQKIKEAGDTFFKECCDETEISTVSAFIKFLKECDNWEGIYMSSAAVNKISNLYFTNWHSIKDKLKDNKACVTYDKNREEPIQLRDAVELSDLFKVLDDKEQSEHFFKESLSNDINEKECPSKNLINLLCFDIEQNISKFLANSENIINLLNGNKDNQASEEDKIKQIKEWLDAAIDTMRIVRYFAVRKSKMKGNLPNTTMEKALNNLLYNDDAQWFKWYDLVRNYLTKKPQDDAKENKLKLNFGNPSLLGGWSDGQEQTKAATLLKYNNELYLCILKIRNIFDTSKADNPIYTKAPFCACRLILRNLKFQTLAGKGFKSKYGIKYSEMGNEDQSQAIKCLKEIIRERYAKKYPPLEQIINQEYSDKKSFDNEVKEALKECYVCEFVPINWDVVSKKQNSTDLFLFKIHCKDYLPKATGKKDLQTMYWEDVLSDSSNHQLCGGAEIFMREPVPKESPVKHAKGSKLVNKRDKDGNTIPEQIYREIYLYANDKKQDISTEAKKYITDKKVIIKDVKHEIIKDRRFYGETKYMFHCPITINFKAGSSSGVNEKITDALQQSDNLQFIGIDRGEKHLVYSCTIDKEGKIVKCNHHDNINGTDYVQKLEAVANERLIAKKNWQQQNRIKDLKSGYISHVVHRLVEETIKDDKTIAPHAYIVLEDLNSEMKRGRQKIEKQVYQNLELALAKKFNFVVDKTAKQGELGSVSMALQLTPPVTNYKDIEGKKRFGIMLYTRANYTSITDPTTGWRKTIYIKNGKDEEIRKQILEKFTDFGFAGKDYYFEYIEANAGHSWRMYSGKDGKPLPRFQNKKQLQNDKNIWVPEPVNVVEILNNIFEDFDKRSSFKDQVKNNVELKKVEGRNETAWQSLRYALNMIQQIRNSGVEKTDDNFLYSPVRNENGEHFDTRNPQNNGGLELIVDADANGAFNIARKGLIMDAHIKHWINSGRPKIKKDGKETPDLDLFISDREWDLWLLDREEWKKYLPVFASKSKKDADKTTSTKSPKRKKK

SEQ ID NO: 698 - protein, 1450 aa, unidentified
  REGION 1..1450: note = Description of Unknown: uncultivated organism sequence
  REGION 1..1450: note = Category: MG57 effectors
  REGION 1..1450: note = Description: MG57-8 effector
MEQFTNLYQLSKTLKFKLEPEGNTKTTFEKWVNEMNSTSEDSNLFAKDEKIRDAYLVIKPIMDKLHEQFIEKSLTSDEAKHIDFSEFLAEFRDKKKRRSKKIQKIEERLRKDIGATYNVGGRFFSAEIEKAVEKLKEEKNNGEESEKKSKDEETDNKRKKTPYDCLTEKKIFSYLCANAKTLAKENGITERILNKHLEQFKKFWGYLDGYNQNRENYYEVKEEAATAVATRIVHENLPTFCSNALRFEKHREEYLGIYQFLKDNNCEAKIKNSQGKEVEAEAITETCFLIGHFNNCLAQSQIEEYNRIIGNYNYLINLYNQAPHDEKDFKKIDEFEKLKKQIGCGKKKTMFAALIKDKQNELTDEQKKKENKEGDILTVETLLNRAKDAGDVMFVKDDNKDNDKAEIITIPDFIQFLEGCDNWDGIYMSKAAINKISNRYFANWHSIVDLFIEIYNGKDKELKEKINACITYDKKREEPLKLRDAVELSGFFAVLDKVKSEHFFKEWLFKEDNTNEYCGDKALSPSKNLIKLLCHDMKYYTEEVFLKKSSEIVALKKYKDEKTQAGKEDENIKKIKEWFDAAADAMSIVRFFAVRRSKMKGSLPNVTMEQALSNLLYSEDIQWFKWRDLIRNYLTKKPQDDVKENKLKLNFGNPTLMKGWDLNKEPDNTTVILRKNDWYYLGIMNKEYNHILDNVKTSSNGECYEKMDYKQISLSSGVGGFVRKCFSSAQEYGWHCPDNCLNEDGKIIIKDDEAQPHLKAIIDCYKDFFDKYKKDGFEYKDYNFNFLESNEYEKLSDFFRDVEQQGYKISFRKVSVNYIDNLVKEGKLYLFKIYSKDFSTGKDGGNGSTGNENLHTKYWKRLFDENNLKDVVYKLNGKSEIFMRKPIAKEARIKHKKGSKLVNKRDINGEIIPEHIYKEIYSYVNNNTKISKEAKIYIDEKKAIIKDAKHEIVKDNRFYGETNSYFFHCPITINFKAKKYKEPQYAYPEVNAKITDALQQSDNLQFIGIDRGEKHLVYSCTIDKNGKIVKDKNNEWKCHHHDIITVIRKDKDGKIVEHKTNYVQKLEAVAGERIIAKKNWQAQRKIKDLRNGYISHVVHRLVEEVIKEDNKRIAPHAYIVLEDLSTEMKRGRQKFEKQVYQNLEVALAKKLNFVVDKEAEQGELGSVSKALQLTPPISNYQDIEGKKQFGIMLYTRANYTSITDPATGWRKTIYIRNGKEEDIKKQILDKFNDFGLEGKDYFFEYREANAGRIWRMYSGKNGEPLTRFRNKREKLTDKNVWVTEPINVVEILDKLFADFDKTKSFKKQIEDDGIELKKIEGRSETAWQSLRYVLDMIQQIRNSGIEKKDDNFLHSPVRGENGEHFDTRNHENNGELSAIKDADANGAYNIARKGLIMNAHYRYWVNQGRPEIKKGKTALSLYVSDAEWDMWLLDKEKWHEHLCEFALRTK

SEQ ID NO: 699 - protein, 1435 aa, unidentified
  REGION 1..1435: note = Description of Unknown: uncultivated organism sequence
  REGION 1..1435: note = Category: MG57 effectors
  REGION 1..1435: note = Description: MG57-9 effector
MKEFTNLYQLSKTLRFELKPIGKTTKTFQRWLEEMNKAELVGDNDGNLFLKDKKIKNAYLAIKPIMDKLHEQLIEMSLLSEEAKQIDFSVYFEAYKNKAVKVEMENGFRKAFAKPFQYAGQCFIEKISKAQKNGKEIKTKKDKQYECLTDAKMYNYLSAHIKDLAEQNGIDEQELKKHLEQFKGFWGYLDGYNQNRENYYEVDKEASTAVATRIVHENLPTFCSNALRFEDRREEYLGIYQYLKDNNHETKIKDSKGAEIEAEAISEEIFQINYFNECLAQSQIDEYNRIIGNYNYLINLYKQARRSEKDFKKIDEFEKLKKQIGCGKKKLMFAALIKDKQSELTEDQKKMENDGGAILTVKTLLQKAKSAGDTMFNKGEDTEEIKTVPEFIQFLQGCDDWNGIYMSKSAIRKISNMYFANWHNIEDIFIDWYNGTDKEKKEMAKACITYDKNRENPLKLRDAVELSGLFAVMDKDEQSEHFFKDSLFDNEDTNDYRGVLDKELTPSKNLINLLCFDIEQNIKVFLNNSGKIVALEKYKDENNQEGEEDQTINDIKDWFDAATDAMRIVRYFAVRKSKMKGNIPNATMEQALSNLLYGEEEQWFNWYDQIRNYLTKKPQDDVKENMLKLNFGNETLMDGWDMNKEHDNSTVILRKDGFYYLGIMDTTHKDVLDKEKVRTTGECYEKMDYKQIALHSGVGGFVRKCFGTAQNFGWRCPNNCLNEEGKIIIKDDEAQANLKEIIDCHKDFFDKYEKDGFKYKDFNFDFRESNKYEKLSEFYRDVEQQSYKITFRNVSVDYINNLVSEGQLYLFKIYNKDFSTGKNGGNGSTGKPNLHTIYWRMLFDKNNLKDVVFTLNGKSEIFMRKPVAKESPTKHSIGSKLVNKRYKDGDTKKTIPEKIYREIYSYANGETKDISAEAQKYIDEKKAIIKDVKHEIIKDNRFYGDDIEGTKYMFHCPITINFKANKYKEPKYAYPEVNKKITDSLQQSANLQFIGIDRGEKHLVYSCIVDKDCKILKCGHHDVINGTDYVQKLEAVADERIIAKKNWQSQSRIKDLRDGYISHVVHSLVKETIKDDGKIAPHAYIVLEDLSTEMKRGRQKFEKQVYQNLETALAKKLNFVVDKEAKQGELGSVTKALQLTPPINNYQDIEGKKQFGVMLYTRANYTSVTDPATGWRKTIYIKDGKEEEIKKQFFEKFSKFGFDGKDYYFEYTEANAGHTWRMFSGKDGKPLPRFRNKKQKLEDKNIWVPEQINVVEILNKLFTKFDKTKSFKTQIENGVELQKVEGRSETAWQSLRYALDLIQQIRNSGEKNSRDDNFLYSPVRNDNGEHFDTRNYKNNGELSEIRDADANGAYNIARKGLIMDKHIKYWINNGRPKTKVDGNEVSDLDLFISDREWDLWLLDREQWMKELSTFASKIAKYDSDAPQTAKRRKKR

SEQ ID NO: 700 - protein, 1364 aa, unidentified
  REGION 1..1364: note = Description of Unknown: uncultivated organism sequence
  REGION 1..1364: note = Category: MG57 effectors
  REGION 1..1364: note = Description: MG57-10 effector
MKQFTDLYQVSKTLRFELQPIGKTAETFKQWLEDLKSTEAVVDNNNLFAKDQGIKDAYSIIKPIMDKLHEQFIEMSLLSEVAKEIDFSQYFEAYQERNVSERLEAELREQIGKTYIVAGHFFTKEISDAIGKDFKIKKDKPYECLTDAKMTYYLSAKSQELAKQNDIDEKKLAMHIEQFKGFWGYLTGFNQNRENYYEVKKETSTAVATRIVHENLPTFCDNILRFEKRKEEYLNIFQFLKDNERETKIKNAQGEEVEIEPIAETFFQIEYFNKCLSQSQIEEYNRIICNFNYLVNLYNQARRGEDGFKKIDEFETLYKQIGCGKKKTYFETLQDISELKNLLQKARIAGDSMFNKESSKTEINTVPEFIKFLQECDNWQGIYMSSAAINKISNLYFANWHSIKDKLKEAKANACITYDKKREEPIKLRDAVELSELFDVLNTEQSEHFFKDSLFKNDETNEYRGVLDKALKPSQNLIKLLCHDIKRNIEAFLEDSDKIVALEKFKDESNPSGEEDKAIKRIKDWLDAAIGAMRIVRYFAVRKSKMKGSIPNVTMEQALGNLLYCEEAPWFKWYDLVRNYLTKKPQDDAKENKMKLNFGTSSLLGGWSDGQEMNKAATLLKYEDEMYLCILKTKNVFDTSKKDNPIYNVASSNASRLILRNLKFQTLAGKGFLGEYKVSYGEMGQSDPVKAIQCLQKIIEDRYVKKYPLLEKFVVNRYDDKSQFDKEIKEALNECYVCEFVPIDWNLVTEKQNNTELFLFKIHSKDYKSNATGKRDLQTMYWEDVLSDGSKHQLCAGAEIFMRKPVAKESPVRHRVGSKIVNKRDKDGNTIPEQIYREIYAYANGKTKDISTEAQKYINEKRAIIKDVKHDIDKDKRFYGETKFMFHCPIKLHFEAKDPKYAFAEVNAKITESLHQSNNLNYIGIDRGEKHLVYSCTIDQDGKILKCNHHDNINGTDYVQKLEAVADERIIAKKNWQAQNRIKDLKNGYISHVVHRLVEETIKDGGIISPHAYIVLEDLNTEMKRGRQKIEKQVYQNLELALAKKFNFVVDKNAEPGGLGSVSQALQLTPPVSNYQDIEGKKQFGVMLYTRANYTSITDPATGWRKTIYIKNGKEEDIRNEILDKFRDFGFDGKDYFFEYVEVHAGHTWRMYSGKDGKPLPRFQNNKQMIDDKNVWVPEQINVVDILDLLFAKFDKSKSFKKQIDQGVELTKIDGRSETAWQSLRYALNMIQQIRNSGLKNEDDNFLFSPVRNNKGEHFDTRNHQNNGELSLIVDADANGAFNIARKGLIMDAHIKHWIEIGRPMKSARRDERTSDLDLFISDKEWDLWLLNREAWEKELPLFSSRAAKEDFSKPKTGKSRKKK

SEQ ID NO: 701 - protein, 1414 aa, unidentified
  REGION 1..1414: note = Description of Unknown: uncultivated organism sequence
  REGION 1..1414: note = Category: MG57 effectors
  REGION 1..1414: note = Description: MG57-11 effector
MKTFNDLTGLYSLSKTLRFELKPVGKTEETFKQWLEEMPNDKIVVDNDGNLFQKDKKIKDAYLAIKPIMDRLHEQFIEMSLLSEKAKQIDFSEYFVRFIDKDISSDLEKKLRREIGGTYQVAGECISKEITNACVKESKNKKVKDFKTKKGKEYQCLTDAKILDYLSANARILAEQNGIDEKTLEKHINQLKGFWGYLTGYNQNRENYYEVEKEASTAVATRIVHENLPTFCSNISRFEKRKDEYVGIYQYLADNNRERKIKNSKGEEVDAEAISENVFQIGYFNECLAQSQIEEYNRIIGNYNMLINLYNQARRSEKDFKKIEEFEKLYKQIGCGVKKTMFETLQNESDVKSLLEKASEAGNAMFKTCSNSLEIKTVPDFISFLKECDNWDGIYMSKTAISKISNLYFANWHSIKDKLKEAKADACITYDKNREEPIKLRDAVELSGLFAVMDSERPEYTFKESLFKNDKTNDYRGVLDKELSSSQNLIRLLCSDIERNINDFLKDSNSIVALETYKNINSQADEENQTIKQIKDWFDAATDAMRIVRYFAVRKSKMKGKNLPNVTMEQALSNLLYSDEAQWFKWYDLIRNYLTKKPQDDAKENKLKLNFDSSSFLKESGWDNDYLKHGAFIVIKGNDYYLVVVNDKLEEDDINQLKTSSNNTAKRLVYKQQKMDFKNFPRWFIFSKGDNLAPAVEKYKLPIETILTDYKKYRELSQKGKESFIEEHPKFRSNLIAYFKKCALVHESLMPFKDMLEMVWRKTDEYKTLSDFYNDTINACYEITFEDIDFDKLRSMDKFYIFQIYNKDFSTGQNGGNGTTGKPNMHTIYWKMLFDEINLKNVVFKLDGQGAELFKRKPIGKESLVKHGLGFKLVNKRDKEGNTIPEQIYREIYMYVNDKKEVISVEAQKYIDEQKVIIKDVKHEIIKDKRFFGETKYLFHCPITINFKAKSANEPEVNSKILNVLHQLDNLHFIGIDRGEKHLVYSCTIDKDGKIIKCNHHDNINGTDYVQKLEAVADERIIAKKNWQEQNKIKDLKSGYISHVVHRLVEETIKDDGKIAPHAYIVLEDLNTEMKRGRQKIEKQVYQNLETALAKKLNFVVDKNAKQGELGSVSKALQLTPPISNYQDIENKKQFGVMLYTRANYTSVTDPATGWRKTIYVKNGKEEDIKNQILEKFDDFGFDGKDYYFEYTEAHVGRTWRLYSGKNGEALPRFQNRKQLLQDKNIWVPESINVVEILDKLFVDFDKSKSFKLQIKKGVELKKIEGKSETAWQSLRYALDLIQQIRNSGEKNSIDDNFLYSPVRNINGEHFDTRNHEGNGDLSKIVDADANGAYNIARKGLIMDAHIKHWIESGSPAKKGEKSPDLDLFISDKEWDMWLLNRDLWKKELPIFASRNAKEDAVKSNIGIRRAKKK

SEQ ID NO: 702 - protein, 1365 aa, unidentified
  REGION 1..1365: note = Description of Unknown: uncultivated organism sequence
  REGION 1..1365: note = Category: MG57 effectors
  REGION 1..1365: note = Description: MG57-12 effector
MKTLNDFTGLYSLSKTLRFELKPVGKTEETFKQWLEEMQSKEIVVDNDGNLFLKDKKIKDAYLAIKPIMDKLHEQFIEMSLLSEKANQIDFSEYFIKFRDKNVSSDLEKNLRSKIGDTYQVAGECISEEITNACKKEFKTKKGKEYQCLTDAKMLDYLSANVKDLAEQNGIDKQTLDNHIKQFKGFWGYLDGYNQNRENYYVVDKEASTAVATRIVHENLPTFCSNILRFEKREDEYVGIYQYLKGINRERKIKNSKGEEVDVEAISENVFQIEHFNECLAQSQIEEYNRIIGNYNMLINLYKQARRGEKDFKKIEEFEKLYKQIGCGEKETMFETLQNESDVKNLLEKASEAGKEMFKTCSKSLEIKTVPDFITFLKECDNWDGIYMSKTAISKISNLYFANWHSIKDKLKEAKKDACITYDKNREEPIKLRDAVELSGLFDVLDSERPEYTFKESLFKDDETNEYRDVLDKDRSSSQNLIRLLCFDIERNIRSFLNASDSIVALKKYKNINSQADEESQTIKQIKEWFDAATDAMRIVRYFAVRKSKMKGNMPNVTMEQALNNLLYSDEARWFKWYDLIRNYLTKKPQDDAKENKLKLNFGTSSLLGGWSDGQEKTKAATLLKFENELYLCILKTKNIFDTSKNNNPIYTTQSNASRLILRNLKFQTLAGKGFLGENGISYGDMGNDNPVKAIQCLQKIIKERYVKKYPLLEKFVVNKYTDKSKFDAEINETLKECYVCEFMPIDWSLVIEKQNNAELFLFKIHCKDYLSNAIGKKDLQTMYWEDVLSDGSKHQLCAGAEIFMRKPVAKESPIKHSVGSKLVNKRDKDGNTIPEQIYKEIYLYANGKTKDISAEAQRYIFEQKAVIKDVKHEIIKDKRFYGEAKYMFHCPIKLQFEAKDPKYVLPEVNRIITDALQQSNNLNFIGIDRGEKHLVYSCTIDKDGKIKECNHHDNINGTDYVQKLEAVADARVIAKKNWQEQNKIKDLKSGYISHVVHRLVEETIKDNDKIAPHAYIVLEDLNTEMKRGRQKIEKQVYQNLETALAKKLNFVVDKNAKQGELGSVSKALQLTPPINNYQDIENKKQFGVMLYTRANYTSVTDPATGWRKTIYIKNGKEEDIKSQILDKFDDFGFDGKDYYFEYTESNTGHTWRMYSGKNGKSLPRFQNRKQMMQDKNIWVSESIDVVEILNQLFSDFDKGKSFKEQIGQGVDLKKIEGRSEPAWQSLRYALDLIQQIRNSGLEKKDDNFLFSPVRNETGEHFDTRKHANNGGLSKIEDADANGAYNIARKGLIMDAHIKHWIERGRPTMKGEKTPDLDLFISDKEWDLWLLDREQWEKELHIFASRSEKEGEDNSLVAKKRKKKI

SEQ ID NO: 703 - protein, 1365 aa, unidentified
  REGION 1..1365: note = Description of Unknown: uncultivated organism sequence
  REGION 1..1365: note = Category: MG57 effectors
  REGION 1..1365: note = Description: MG57-13 effector
MKTLNEFTGLYSLSKTLRFELKPVGKTEETFKQWLEEMQSNEIVVDNDGNLFLKDKKIKDAYLAIKPIMDKLHEQFIEMSLLSEKAKHIDFSEYFTKFRDKNVSSDLEKNLRSKIGDTYQVAGECISEEITNVCEKEFKTKKGKEYQCLTDAKMLDYLSTNVKDLAEQNGIDEQTLANHIKQFKGFWGYLDGYNQNRENYYVVDKEASTAVATRIVHENLPTFCSNILRFEKREDEYVGIYQYLKGINRERKIKNSKGEEVDVEAISENVFQIEHFNECLAQSQIEEYNRIIGNYNMLINLYNQARRDEKDFKKIEEFEKLYKQIGCGEKETMFETLQNESDVKNLLEKASKAGEAMFRTSNNSLEIKTMPDFITFLKKCDDWDGIYMSKTAISKISNLYFANWHSIKDKLKEAKKDACITYDKNREEPIKLRDAVELSGLFDVLDSERPEYTFKESLFKDDETNEYRDVLDKDRSSSQNLIRLLCFDIERNIRSFLNASDSIVALEKYKDENNQIGEENQTIKQIKDWFDAAIDAMRIVRYFAVRKSKMKGNMPNVTMEQALNNLLYSDEARWFKWYDLIRNYLTKKPQDDAKENKLKLNFGTSSLLGGWSDGQEKTKAATLLKFENELYLCILKTKNIFDTSKNNNPIYTTQSNASRLILRNLKFQTLAGKGFLGENGISYGDMGNDNPVKAIQCLQKIIKERYVKKYPLLEKFVVNKYTDKSKFDAEINETLKECYVCEFMPIDWSLVIEKQNNAELFLFKIHCKDYLSNAIGKKDLQTMYWEDVLSDGSKHQLCAGAEIFMRKPVAKESPIKHSVGSKLVNKRDKDGNTIPEQIYKEIYLYANGKTKDISAEAQRYIFEQKAVIKDVKHEIIKDKRFYGEAKYMFHCPIKLQFEAKDPKYVLPEVNRIITDALQHSNNLHFIGIDRGEKHLVYSCTIDKDGKIIKCNHHDNINGTDYVQKLEAVADARVIAKKNWQEQNKIKDLKSGYISHVVHRLVEETIKDNDKIAPHAYIVLEDLNTEMKRGRQKIEKQVYQNLETALAKKLNFVVDKNAKQGELGSVSKALQLTPPINNYQDIENKKQFGVMLYTRANYTSVTDPATGWRKTIYIKNGKEEDIKSQILDKFDDFGFDGKDYYFEYTESNTGHTWRMYSGKNGKSLPRFQNRKQMMQDKNIWVPESIDVVEILNQLFSDFDKGKSFKEQIGQGVDLKKIEGRSEPAWQSLRYALDLIQQIRNSGLEKKDDNFLFSPVRNETGEHFDTRKHANNGGLSKIEDADANGAYNIARKGLIMDAHIKHWIERGRPTMKGEKTPDLDLFISDKEWDLWLLDREQWEKELHIFASRSAKEGEDNSLVAKKRKKKI

SEQ ID NO: 704 - protein, 1401 aa, unidentified
  REGION 1..1401: note = Description of Unknown: uncultivated organism sequence
  REGION 1..1401: note = Category: MG57 effectors
  REGION 1..1401: note = Description: MG57-14 effector
MKTLTNLYQVSKTLRFELQPIGKTSETFKQWLEDMNMNELVVDNDGNLFAKDKNIKEAYLAIKPIMDRLHEQLIEMSLLSEEAKQIDFSDYFEAYKNKAVKAEMEKGLRKAFAKPFQFAGQCFIDMISNDPKVGIEIKTKKDKQYECLTDAKMYNYLLANVKDLAEQNGIAEQKLAKHIEQFKGFWGYLDGYNQNRENYYEVDKETSTAVATRIVHENLPTFCSNILRFEKRLEEYLSIYQYLKDNNRETKIKDSKGEEIDVEAISDDIFQIKHFNECLAQSQIEEYNRIVGNYNMLINIYNQLRRSEKDFKKVDEFETLYKQIGCGKKKSMFETLQGDSDVKELLRKASEAGKQMFKDATDTIEIKTLPDFIKFLKECDNWDGIYMSKTAIDKISSLYFANWHSIKDKLKEAKADACITYDKKREDPIKLRDAVELSGLFAVLDTEQSEHFFKDSLFKDDESNDYRGVLDKALMPSKNLINLLCFDIEQNTKAFLNESNNIVALEKYKDENNQARVEDKTIKQIKDWFDAATDAMRIVRYFAVRKSKMKGNIPNTTMEQALSNLLYCDEARWFKWYDLIRNYLTKKPQDDAKENMLKLNFDNSTLMEGWDINKEHDNTTVILRKKGLYYLGIINKKYNNILDKDNAISDGECYEKMDYKQIALPMGVGAFVRKCFGTAQNFGWCCPQNCLNEEGKIIIKDDEAQPNLKAIVDCYKDFFDKYEKDGFKYKDFNFRFLESDKYKKLSEFFREVEPQGYKIAFRNVSVDYIEDLVENGKLYLFNIYNKDFEDKATGTPNLHTIYWKMLFDENNLKDVVYKLNGKAEVFMRNPVAKESPIKHSIGSKLVNKRDKDGNSIPEQIYREIYLYANGKTKAISVEAKKYIDEQKVVIKDVKHEIIKDKRFYGETKYMFHCPITINFKAKSSSGSEVNAKITDALQQSKNLNFIGIDRGEKHLVYSCTIDNDGKIIKGKCHDHDIISVIIKDKDGKDITHKTNYVQKLEAVADERIIAKKNWQAQNKIKDLKNGYISHVVHHLVEETIKVDGNISPHAYIVLEDLNTEMKRGRQKIEKQVYQNLELALAKKLNFVVDKNAKQGELGSVFQALQLTPPINNYQDIEGKKQFGVMLYTRANYTSVTDPATGWRKTIYIKNGKEEDIRKEILSKFDDFGFDGQDYFFEYTEANAGHIWRLYSGKNGKALPRFQNKKQMLQDKNVWVPEIINVVEILDNLFADFDKAKSFKKQIENGVELRKIEGRNETAWQSLRFALDIIQQIRNSGEKNSKDDNFLYSPVRKNGEHFDTRNYEYNGELSEIRDADANGAYNIARKGLIMDAHIKYWIDKGRPMMSSKKDKKTSDLDLFISDKEWDLWLLDKNQWRKELPTFASRSAKEGNTESKTGKRKKK

SEQ ID NO: 705 - protein, 1407 aa, unidentified
  REGION 1..1407: note = Description of Unknown: uncultivated organism sequence
  REGION 1..1407: note = Category: MG57 effectors
  REGION 1..1407: note = Description: MG57-15 effector
MNDLKQFTGLYSLSKTLRFELKPVGKTKETFKRWLDELKNTELVVDDGGNLFLKDKQIKDAYLAIKPIMDKLHDQFIEMSLLSKEARNIDFSDYYTAFKDRSKGLNDIEKKLRENIGATYNVAGNYFSAEISKALGKEFKIKKDKSYECLTDAKMYYYLSANIKDLAEQNNIEEQALAQYIEKFKGFWGYLDGYNQNRENYYEFGNEASTAVATRIVHENLPTFCSNVFRFEKRKEEYLDIYQYLKDNNRETRIKDSQGKEVEVEAISEIVFQIKHFNECLAQSQIEEYNRIIGNYNMLINIYNQLRSSDKDFKRIDEFETLYKQIGCGERKAMFETLQDDSDVKNLLKRASDAGSEMFNTYSDSSEIKTVLDFIKFLRGCDNWDGIYMSKTAISKISNLYFANWHSIKDKLKEAKASACITYEKNLEDPIKLRDAVELSGLFAVFDTEQSEHFFKESLFKDDETNEYRGVLDKALTPSKNLIRLLCFDIERNIKFFLQKSVEIVALEKYKDENNYAGDEDQTIRIIKDWLDAATDAMRIVRYFAVRKNKMKGNLPNTTMEQALGNLLYNDDAQWFKWYDLIRNYLTKKPQDDVKENKLKLNFDSSSFLKESGWDNDYSKSGAFIVIHDNAYYLVVLNNKLEEREINKLKTLSNNSAQRIVYKQQKMDFKNFPRLFIFSKGDNLAPAVNKYNLPIATIIDDYKKYRNLNGKDKDAFIEEHPKFRYNLIEYFKKCAPLHESLSPFKDQFEKVWRKTEDYNTLSEFYKDTANACYEISFENIDFQQLCSMDKCWLFQIYNKDFSIGKDGCNGSTGKPNLHTIYWKMLFDETNLKNVIFKLDGQGAEIFMREPVPKESPTKHPVGSKIVNKRDNDGNTIPEHIFREIYLYANGKTKDISNVARKYIGEGKAVIKDVKHEIIKDKRFYGEPKYIFHCPITINFKSKSANESEINSKITNALQQSDNLQFIGIDRGEKHLVYSCTIDKNCKIIKCDHHDNINGTNYVQKLEGVADDRIIAKKNWQAQSKIKDLRDGYISHVVHRLVDETIKDGDSIAPHAYIVLEDLNTEMKRGRQKFEKQVYQNLETALAKKLNFVVDKNAKQGELGSVSKALQLTPPINNYQDIEGRKQFGVMLYTRANYTSVTDPATGWRKTIYIKNGKEEDIKEQILDKFSDFGFDGKDYYFEYTESNVGHTWRLYSGNNGEPLPRFQNKKQMQQDKNVWVPEKNNVVEILDKLFVNFDKSKSFKAQIENGVELQKAEGRSETSWQSLRYALDLIQQIRNSGEKNSKDDNFLYSPVRDDKGEHFDSRHPERNGELSEIKDADANGAYNIARKGLIMDAHIKYWIEKGRPTMKKDGKEISDLDLFISDKEWDLWLLDRDQWKNTLPTFALRNAKEGDAKPPKRKGGKKK

SEQ ID NO: 706 - protein, 1391 aa, unidentified
  REGION 1..1391: note = Description of Unknown: uncultivated organism sequence
  REGION 1..1391: note = Category: MG57 effectors
  REGION 1..1391: note = Description: MG57-16 effector
MNNTDALTNLYSLSKTLRFELQPIGKTKETFDDWLKEMNGDNPVVDNDSNLFVKDQGIKDAYMAIKPIMDKLHERFIEKSLTSEESKRIDFSEYFARFKDKSKDITNELEKGLRERIGETYIVAGNYFSEEIDKATKKLQEEQPKGKSRKQKENGTKPQKAKKKKPFECLTDAQMLNYLYANVAELAKENNIDEKVLANHIKKFQGFWGYLSGYNTNRENYYTTDTEQSTAVATRIVNDNLPTFCTNVLRFEKCRDEYLGMYQYLKDHNRETKIKKPQGELVEAETIKETFFQIEHFNECLSQQQIEEYNRVIGNCNLLINLYNQSSRDEKDFKKVDEFETLYKQIGCGKKKSMFAALIKDKQSELSEEQKKEENEENAIYSVETLLRKAQKAGDKMFGNGKNESSINTLPAFIHFLKDCDNWNGIYMSSTAVNKISNRYFANWHSIEDKLKEAKADACITYNKNREEQIRLRDAVELSGLFAVLDTEQSEHLFKQSLFKEEATNDYRGVLDTTLTPSKNLINLLCFDMERNMKAFLEISDSINALKKYKDDNTSSGEENQAIKLIKEWFDAATHAMRIVRFFAVRKSKMKGNLPNVTMEQALSNLLYSDDAQWFMWYDLVRNYLTKKPQDDVKENKLKLNFDNPILLGGWSDGQEKVKSATLLKYMNEMYLCILKTRNIFDTSKENPIYIEHSDASRLILRNLKFQTLAGKGFKGENGITYGEMGKSDPQKAIQCLQKIIAERYVSKYPLLEEYVSNAYTDKSKFDAAITETLKQCYVCEFEPIDWNLVVEKQNNGELFLFKIHCKDYMPKVSGKKDLQTLYWEDVLSEGSKHQLCAGAEIFMRKPVAKAPRKKHSVGSKLVNKKDSDGNTIPERIYSEIYLYVNSKTESISAEAQRYIDEQKAVIKDVKHEIIKDKRFYGETKFMFHCPVKLNYESKGYKGPNYAYPEVNTAIRESLQQSDNLQFIGIDRGEKHLVYSCTLDKDCNIIACHDHDNINGTDYVQKLEDVANERIIAKKNWQAEDKIKDLKSGYISHVVHRLVEEVIKDGNTIEPHAYIVLEDLNTEMKRGRQKIEKQVYQNLETALAKKLNFVVDKDAQPNELGSVGKALQLTPPISNYQDIEGKKQFGVMLYTRANYTSVTDPATGWRKTIYLKNGKEEEIKKQVLEKFSDLGFDGRDYFFEYTEAHAGHTWRLYSGKDGQPLPRFQNKKQLQQDKNIWVPEQVNVVEILDNLFAHFDKTKSFKQQIEQGVELVKIERRKEIAWQSLRYALDLIQQIRNTGTEQKDDNFLYSPVRNSKGEHFDTRNHANNGKLSAIKDADANGAYNIARKGLIMDAHIKYWMACGQPSRKNTLDLFVSDKEWDLWLLDRKGWEQELPAFALRNANESKD

SEQ ID NO: 707 - protein, 1406 aa, unidentified
  REGION 1..1406: note = Description of Unknown: uncultivated organism sequence
  REGION 1..1406: note = Category: MG57 effectors
  REGION 1..1406: note = Description: MG57-17 effector
MTQFTNLYQISKTLRFELKPVGKTKETFKQWFEELKNAELIVDNDGNLFLKDKNIKEAYLTIKPIMDRLHEQFIEMSLLSEEAKQIDFSEYFEKYQAKSVSEKLEKGLREKIGNTYIVAGKYLSNEIGIVLDKELNTKKGKPYDCLTDAKMYNYLSANVKVLAEQNGIDEQVLDKHIKQFKGFWGYLTGYNHNRKNYYEVDKEATTAIATRIVHENLPIFCCNIMRFVKRREEYISIYQYLKEHNRETKIKDSKGNDMDVEAISEEVFQINHFNECLAQSQIEEYNRIISNYNMLINLYNQLRRSEKDFKKIDELETLYKQIGCGKKRTMFETLQDDSDVKRLLQKVSKAGDEMFRVRSNSLEIKTVPDFITFLKDCDNWDGIYMSKAAISKISNIYFANWHSIKDKLKRAKANSCITYDKNREEQIKLRDAVELSELFAVVDTEQTEHFFKESLFKDSDTNEYRGVIDKKITPSKNLIKLLCYDIERNKKVFLEKTDEIVTLKKYKEENNQTSEEDQTIKTIKDWFDAVTDAMRIVRYFSVRKSKMKGNLPNATMEQALSNLLYSDNAQWFKWYDLIRNYLTKKPQDDAKENKLKLNFDSSSFLRESGWDNDYSKNGAFIVIKDNDYYLVVIKEKLEEEDINKLKNLSDNSAKRVVYKQQKMDFKNFPRLFVFSKGDNLAPAVSKYNLPIDTIFDDYRKYRNLKGKEKDVFIEEHPKFRYNLIEYFKKCAPLHESLSSFKDKFEEVWKRTEDYNSLSEFYKDTANACYELSFEHINFEELCSSDKCHLFQIYNKDFSIGENGGNGSIGKPNLHTIYWNMLFDETNLKDVIFKLDGQGAEIFMREPVAKESPTKHPIGSKLVNKRDKDGNTIPAQLYREIYLYVNGKAKIISKEAQEYLDNEKVVIKEVKHEIIKDNRFYGDSAKYMFHCPITINFKAQPGNESEVNSIITNALQQSDNLNIIGIDRGEKHLVYSCTIDRNGKIIKGKCHHYDNINGTNYVQKLEAVADERIIAKKNWQAQDKIKDLKNGYISHVVHRLVKEAIKDGDIIDPHAYIVLEDLNAEMKRGRQKIEKQVYQNLETALAKKLNFVVDKNVTQCELGSARKALQLTPPISNYQDIEGKKQFGIMLYTRANYTSVTDPATGWRKTIYIKNGRDEEIKKQILDRFIDFGFDGKDYYFKYTEDNVGHTWQMYSGKNGEPLSRFQNRKQILKDKNIWVPEQVNVIKILDKLFAEFDKSESFKAQINNGSELQKDDERNETAWQSLRYALDMIQQIRNSGEKNSENDNFLCSPVRNNNGEHFDTRRHEKNGELSEIIDADANGAFNIARKGLIMDAHIKYWIGNGRPTTKRDGKVISDLDLFISDKEWDMWLLDRAQWVKQLPSFASRNVKDSNENPPTAKRGKKS

SEQ ID NO: 708 - protein, 1406 aa, unidentified
  REGION 1..1406: note = Description of Unknown: uncultivated organism sequence
  REGION 1..1406: note = Category: MG57 effectors
  REGION 1..1406: note = Description: MG57-18 effector
MTQFTNLYQISKTLRFELKPVGKTKETFKQWFEELKNAELIVDNDGNLFLKDKNIKEAYLTIKPIMDRLHEQFIEMSLLSEEAKQIDFSEYFEKYQAKSVSEKLEKGLREKIGNTYIVAGKYLSNEIGIVLDKELNTKKGKPYDCLTDAKMYNYLSANVKVLAEQNGIDEQVLDKHIKQFKGFWGYLTGYNHNRKNYYEVDKEATTAIATRIVHENLPIFCCNIMRFVKRREEYISIYQYLKEHNRETKIKDSKGNDMDVEAISEEVFQINHFNECLAQSQIEEYNRIISNYNMLINLYNQLRRSEKDFKKIDELETLYKQIGCGKKRTMFETLQDDSDVKRLLQKVSKAGDEMFRVRSNSLEIKTVPDFITFLKDCDNWDGIYMSKAAISKISNIYFANWHSIKDKLKRAKANSCITYDKNREEQIKLRDAVELSELFAVVDTEQTEHFFKESLFKDSDTNEYRGVIDKKITPSKNLIKLLCYDIERNKKVFLEKTDEIVTLKKYKEENNQTSEEDQTIKTIKDWFDAVTDAMRIVRYFSVRKSKMKGNLPNATMEQALSNLLYSDNAQWFKWYDLIRNYLTKKPQDDAKENKLKLNFDSSSFLRESGWDNDYSKNGAFIVIKDNDYYLVVIKEKLEEEDINKLKNLSDNSAKRVVYKQQKMNFKNFPRLFVFSKGDNLAPAVSKYNLPIDTIIDDYRKYRNLKGKEKDVFIEEHPKFRYNLIEYFKKCAPLHESLSSFKDKFEEVWKRTEDYNSLSEFYKDTANACYELSFEHINFEELCSSDKCHLFQIYNKDFSIGENGGNGSIGKPNLHTIYWNMLFDETNLKDVIFKLDGQGAEIFMREPVAKESPTQHPIGSKLVNKRDKDGNTIPAQLYREIYLYVNGKTKIISKEAQEYLDNEKVVIKEVKHEIIKDNRFYGDSAKYMFHCPITINFKAQPGNESEVNSIITNALQQSDNLKFIGIDRGEKHLVYSCTIDRNGKIIKGKCHHYDNINGTNYVQKLEAVADERIIAKKNWQAQDKIKDLKNGYISHVVHRLVKEAIKDGDIIDPHAYIVLEDLNAEMKRGRQKIEKQVYQNLETALAKKLNFVVDKNVTQCELGSVRKALQLTPPISNYQDIEGKKQFGIMLYTRANYTSVTDPATGWRKTIYIKNGRDEEIKKQILDRFIDFGFDGKDYYFKYTEDNVGHTWQMYSGKNGEPLSRFQNRKQILKDKNIWVPEQVNVIKILDKLFAEFDKSESFKAQINNGSELQKDDERNETAWQSLRYALDMIQQIRNSGEKNSENDNFLCSPVRNNNGEHFDTRRHEKNGELSEIIDADANGAFNIARKGLIMDAHIKYWIGNGRPTTKRDGKVISDLDLFISDKEWDMWLLDRAQWVKQLPSFASKNVKDGNENPPTAKRGKKS

SEQ ID NO: 709 - protein, 1401 aa, unidentified; identical to SEQ ID NO: 704
  REGION 1..1401: note = Description of Unknown: uncultivated organism sequence
  REGION 1..1401: note = Category: MG57 effectors
  REGION 1..1401: note = Description: MG57-19 effector

SEQ ID NO: 710 - protein, 431 aa, unidentified
  REGION 1..431: note = Description of Unknown: uncultivated organism sequence
  REGION 1..431: note = Category: MG57 effectors
  REGION 1..431: note = Description: MG57-20 effector
MKTKTITIMKEKEQYSDFTNLYQLSKTLRFELKPVGKTAETFKQWLSEMNNSDKEENLFAKDKKIKNAYMVIKPIIDKLHERFIEKSLTSKEAKEIDFSPYFEAYKQKNVLDTFEEGLRKKIGETYTVAGGFQYLTDKRILNYLSDNVQELAKQNGIDEKTLANHIEQFKGFGGYLSGYNQNRMNYYTTKEEQSTAVATRIVHENLPTFCDNILRFEKSREGYLSICQYLKDNNREIKIKNAQGEETEAETITEAIFQIKHFNSCLAQSQIEEYNRIIGNYNFLINLYNQARREEKEFKKLDEFESLYKQIGCGEKKSLFESLHDDSDLKALLQKIKEAGDTFFKECCDETEISTVSAFIKFLKECDNWEGIYMSSAAVNKISNLYFTNWHSIKDKLKESNANACITYDKDREEPVKLRDAMGGKTKSKIM

SEQ ID NO: 711 - protein, 1406 aa, unidentified
  REGION 1..1406: note = Description of Unknown: uncultivated organism sequence
  REGION 1..1406: note = Category: MG57 effectors
  REGION 1..1406: note = Description: MG57-21 effector
MKTFNDLTGLYSLSKTLRFELKPVGKTEETFKRWLEEMQNNEKVIDNDSNLFLKDKNIKDAYLAIKPIMDRLHEQFIEMSLLSEKAKQIDFSEYFIKFKDKNISSDLEKKLRREIGDTYQVAGECISEEITNACGKEFKIKKGKEYQCLTDAKILDYLSANVKNLAKFNCIDEKTLDKHINQLKGFWGYLTGYNQNRENYYEVEKEASTAVATRIVHENLPTFCSNILRLEKRKDEYVGIYQYLADNNREIKIKNSKGEEVDAEAISENVFQIGYFNECLAQSQIEEYNRIIGNYNMLINLYNQARRSEKNFKKIEEFEKLYKQIGCGVKKTMFETLQNESDVKSLLEKASEAGNAMFKTCSNSLEIKTVPDFVSFLKECDNWDGIYMSKTAISKISNLYFANWHSIKDKLKETKAEACITYDKNREEPIKLRDAVELSGLFAVMDLERPEYTFKESLFKNDETNDYRGVLDKELSSSQNLIRLLCSDIERNINDFLKDSDSIVALETYKNINSQADEENQTIKQIKDWFDAATDAMRIVRYFAVRKSKMKGKNLPNVTMEQALSNLLYSDEAQWFKWYDLIRNYLTKKPQDDAKENKLKLNFDSSSFFKESGWDNDYLKHGAFIVIKGNDYYLVVVNDKLEEDDINQLKTSSNNTAKRLVYKQQKMDFKNFPRWFIFSKGDNLAPAVEKYKLPIETILKDYQKYRELSQKGKESFIEEHPKFRSNLIAYFKKCALVHESLMPFKDMLEMVWRKTDEYKTLSDFYNDTINACYEITFEDIDFDKLRSMDKFYIFQIYNKDFSTGQNGGNGTTGKPNMHTIYWKMLFDEINLKNVVFKLDGQGAEIFMRKPIGKESLVKHGLGFKLVNKRDKEGNTIPEQIYREIYMYVNDKKEVISVEAQKYIDEQKVIIKDVKHEIIKDKRFFGETKYLFHCPITINFKAKSANEPEVNSKILNVLHQLDNLHFIGIDRGEKHLVYSCTIDKDGKIIKCNHHDNINGTDYVQKLEAVADERIIAKKNWQEQNKIKDLKSGYISHVVHRLVEETIKDDGKIAPHAYIVLEDLNTEMKRGRQKIEKQVYQNLETALAKKLNFVVDKNAQQGELGSVSKALQLTPPISNYQDIENKKQFGVMLYTRANYTSVTDPATGWRKTIYVKNGKEEDVKNQILEKFDDFGFDGKDYYFEYTEAHVGRTWRLYSGKNGEPLPRFQNRKQLLQDKNIWVPESINVVEILDKLFVDFDKSKSFKLQIKQGVELKKIEGKSETAWQSLRYALDLIQQIRNSGEKKSIDDNFLYSPVRNINGEHFDTRNHEGNGDLSKIVDADANGAYNIARKGLIMDAHIRHWIESGRPAKKGEKSPDLDLFISDKEWDLWLLNRDQWKKELPIFASRNAKEDAVKSNTGIRRAKKK

SEQ ID NO: 712 - protein, 1372 aa, unidentified
  REGION 1..1372: note = Description of Unknown: uncultivated organism sequence
  REGION 1..1372: note = Category: MG57 effectors
  REGION 1..1372: note = Description: MG57-22 effector
MKTKTITIMKEKEQYSDFTNLYQLSKTLRFELKPVGKTAETFKQWLSEMNNSDKEENLFAKDKKIKNAYMVIKPIIDKLHERFIEKSLTSKEAKEIDFSPYFEAYKQKNVLDTFEEGLRKKIGETYTVAGGFQYLTDKRILNYLSANVEELAKQNGIDEKTLANHIEQFKGFGGYLSGYNQNRMNYYTTKEEQSTSVATRIVHENLPIFCDNILRFEKSREGYLSICQYLKGNNREIKIKNAQGEETEAETITEAIFQIKHFNSCLAQSQIEEYNRIIGNYNFLINLYNQARREEKEFKKLDEFESLYKQIGCGEKKSLFESLHDDSDLKALLQKIKEAGDTFFKECCDETEISTVSAFIKFLKECDNWEGIYMSSAAVNKISNLYFTNWHSIKDKLKESNANACITYDKDREEPVKLRDAVELSELFAVLNKESLEHLFKESLFKDNKLDTELTPSHNLINLLCSDVKQNIDYFWEHSEGITDLINDKNQSNEETQKIKQIKEWLDAAMNAMRIVRYFAVRKSKMKGNMPNVTIEQALSNLLYNDDAQWFKWYDLVRNYLTKKPQDDVKENKLKLNFGNSTLMNGWDMNKERDNTAVIIRRNNLYYLGIMDKNYNKILDADKIKSDDKSSYYEKMDYKQIALPTGVGGFVRKCFDTAQQYGWSCPKDCLNEDEKIIIKDDEARKNLTKIIDCYKDFFDKYEKDGFKYRNFNFRFLKSTEYEKLSDFFKDVERQRYMIKFRNISADYIDDLVNEGKLYLFQIYNKDFSTGRNERNGSKGKPNMHTIYWKTLFDETNLNDVVYKLNGQAEIFMREPVAKESPVKHGVGSKLVNKRDKDGNTIPEQIYKEIYLFANNKVKKENLSAEAKNYIESEKVKIKEAKYEIVKDNRFYGETKYMFHCPITINFKAGSSSGVNEKITDALQQSDNLQFIGIDRGEKHLVYSCTIDKEGKIVKCNHHDNINGTDYVQKLEAVANERLIAKKNWQQQNRIKDLKSGYISHVVHRLVEETIKDDKTIAPHAYIVLEDLNSEMKRGRQKIEKQVYQNLELALAKKFNFVVDKTAKQGELGSVSMALQLTPPVTNYKDIEGKKRFGIMLYTRANYTSITDPATGWRKTIYIKNGKDEEIKAQIIDKFSNFGFYGKDYYFEYTEENAGHTWRMYSGKDGKPLPRFQNKKQMLQDKNIWVPEQINVKEILDKLFANFDKGRSFKEQVNEEVKLEKIEGRSETAWQSFRYVLNMIQQIRNSGIEKKDDNFLYSPVRNENGEHFDTRNPQNNGGLELIVDADANGAFNIARKGLIMDAHIKHWINSGRPKIKKDGKETSDLDLFISDREWDLWLLDREEWKKYLPVFASKSKKDADKTTSTKSPKRKKK

SEQ ID NO: 713 - protein, 765 aa, unidentified
  REGION 1..765: note = Description of Unknown: uncultivated organism sequence
  REGION 1..765: note = Category: MG57 effectors
  REGION 1..765: note = Description: MG57-23 effector
MKRFTNLYQLSKTLKFKLEPMDNTADTFKDWLEEMERDVCTDENLFAKDKNIKKAYMAIKPIMDRLHEQFIEMSLLSEDAKQIDFSEYFEAYRKKPITPAMEKELRKAFAKPFQCAGRCFIEEISKAQKDGKEIKTKKDKQYECLIDAKIYNYLSANVKEIAEQNGIDELTLDRHIKQFKGFWGYLDGYNQNRENYYEVEKEASTAVATRIVHENLPTFCDNAIRFEKRKEDYLCIYQYLKDNSRETKIKNSKGEEIEVETISDEIFHIKHFNECLAQSQIEEYNRIIGNYNYMINLYNQLRRGEKDFKIIDEFEKLYKQIGCGRKKSMFAVLIKDKHNELKEDQKKAEEDGEVILTVQTLLQRAKSAGDMMFKKGKDTAEIKTVPEFIQFLQGCKDWNGIYMSSAAVNKISNLYFANWHSVKDRLKEAKASACITYDKYREEPIKLRDAVELSGLFAVLDEEQSEHLFKESLFKDDDTNEYRGVLNKALTSSQNLINLLCSDIERNIKVFQEKTADILALDKYKDENNQAGEEDENIKLIKEWFDAATDAMRVVRYFAVRKSKMKGNLPNVTIEQALSNLLYNDDVQWFKWYDLVRNYLTKKPQDYAKDNKLKLNFDSSSFLKENGWDNDYSKSGAFIVIKDNNYYLVVVKDKMEEDELIKLKSPSNNAAKRVIYKQQKMDFKNFPRWFIFSKGDNLAPAVEKYNLPIDTILDDYKVYRTLSGSEKDKFIEGHPRFRYNLIEYFKKCATLHESLSPFKDKFETI

SEQ ID NO: 714 - protein, 1372 aa, unidentified
  REGION 1..1372: note = Description of Unknown: uncultivated organism sequence
  REGION 1..1372: note = Category: MG57 effectors
  REGION 1..1372: note = Description: MG57-24 effector
MKTKTITIMKEKEQYSDFTNLYQLSKTLRFELKPVGKTAETFKQWLSEMNNSDKEENLFAKDKKIKNAYMVIKPIIDKLHERFIEKSLTSNKAKKIDFSPYIEAYKQKNVLDTFEEGLRKKIGETYTVAGGFQYLTDKRILNYLSANVEELAKQNGIDEKTLANHIEQFKGFGGYLSGYNQNRMNYYTTKEEQSTAVATRIVHENLPTFCDNILRFEKSREGYLSICQYLKDNNREIKIKNAQGEETEAETITEAIFQIKHFNSCLAQSQIEEYNRIIGNYNFLINLYNQARREEKEFKKLDEFESLYKQIGCGEKKSLFESLHDDSDLKALLQKIKEAGDTFFKECCDETEISTVSAFIKFLKECDNWEGIYMSSAAVNKISNLYFTNWHSIKDKLKESNANACITYDKDREEPVKLRDAVELSELFAVLNKESLEHLFKESLFKDNKLDTELTPSHNLINLLCSDVKQNIDYFWEHSEGITDLINDKNQSNEETQKIKQIKEWLDAAMNAMRIVRYFAVRKSKMKGNMPNVTIEQALSNLLYNDDAQWFKWYDLVRNYLTKKPQDDVKENKLKLNFGNSTLMNGWDMNKERDNTAVIIRRNNLYYLGIMDKNYNKILDADKIKSDDKSSYYEKMDYKQIALPTGVGGFVRKCFDTAQQYGWSCPKDCLNEDEKIIIKDDEARKNLTKIIDCYKDFFDKYEKDGFKYRNFNFRFLKSTEYEKLSDFFKDVERQRYMIKFRNISADYIDDLVNEGKLYLFQIYNKDFSTGRNERNGSKGKPNMHTIYWKTLFDETNLNDVVYKLNGQAEIFMREPIAENSPVKHGVGSKLVNKRDKDGNTIPEQIYKEIYLFANNKVKKENLSAEAKNYIESEKVKIKEAKYEIVKDNRFYGETKYMFHCPITINFKAGSSSGVNEKITDALQQSDNLQFIGIDRGEKHLVYSCTIDKYGKIIKCNHHDNINGTDYVQKLEAVANERLIAKKNWQQQNRIKDLKSGYISHVVHRLVEETIKDDKTIAPHAYIVLEDLNSEMKRGRQKIEKQVYQNLELALAKKFNFVVDKTAKQGELGSVSMALQLTPPVTNYKDIEGKKRFGIMLYTRANYTSITDPATGWRKTIYIKNGKDEEIKVQIIDKFSNFGFDEKDYYFEYTEENAGHTWRMYSGKDGKPLPRFQNKKQMLQDKNIWVPEQINVKEILDKLFANFDKGRSFKEQVNEEVKLEKIEGRSETAWQSLRYALNMIQQIRNSGVEKTDDNFLYSPVRNENGEHFDTRNHENNGDLSPIVDADANGAFNIARKGLIMDAHIKKWIKEGKPTTKEGDSKTPDLDLFISDREWDLWLLDREEWKKYLPVFASKSKKDADKTTSTKSPKRKKK

SEQ ID NO: 715 - protein, 431 aa, unidentified
  REGION 1..431: note = Description of Unknown: uncultivated organism sequence
  REGION 1..431: note = Category: MG57 effectors
  REGION 1..431: note = Description: MG57-25 effector
MKTKTITIMKEKEQYSDFTNLYQLSKTLRFELKPVGKTAETFKQWLSEMNNSDKEENLFAKDKKIKNAYMVIKPIIDKLHERFIEKSLTSKEAKEIDFSPYFEAYKQKNVLDTFEEGLRKKIGETYTVAGGFQYLTDKRILNYLSANVEELAKQNGIDEKTLANHIEQFKGFGGYLSGYNQNRMNYYTTKEEQSTAVATRIVHENLPTFCDNILRFEKSREGYLSICQYLKDNNREIKIKNAQGEETEAETITEAIFQIKHFNSCLAQSQIEEYNRIIGNYNFLINLYNQARREEKEFKKLDEFESLYKQIGCGEKKSLFESLHDDSDLKALLQKIKEAGDTFFKECCDETEISTVSAFIKFLKECDNWEGIYMSSAAVNKISNLYFTNWHSIKDKLKESNANACITYDKDREEPVKLRDAMGGKTKSKIM

SEQ ID NO: 716 - protein, 1366 aa, unidentified
  REGION 1..1366: note = Description of Unknown: uncultivated organism sequence
  REGION 1..1366: note = Category: MG57 effectors
  REGION 1..1366: note = Description: MG57-26 effector
MKQFTNLYQVSKTLRFELQPIGKTKETFKGWLEKIDTAIPDVDDENLFLRDKKIKEAYLAIKPIMDSIHEEFIEKSLSSKEAKNIDFSDYYSLFKEKKVSSEFEKRLRKKISDTYSIAGDYFISEIEKTIANQKRKSNKKAAVAEEEKITKRKSKKPFECLTDVKMLFYLSANVKRLAEQHEIDEETLSRYIQTFKGFWGYLDGYNQNRENYYESEKETSTAVATRIVNENLPTFCNNILRFEKREKEYLNVFQYLKNNNRETKIKNSLGEEEDVVPIRASIFKIEHFNECLTQSQIEEYNRVIGNYNLLINLYNQLRSEETEYREIDEFEKLRKQIGCGKKPTNFDMLHDDSELKELLQKAGEAGEKMFGTENKQAEISTLPQFVKFLKDCNNWEGIYMSKAAINIISSLYFANWHSIEDKLYEAKAKACITYDKNREEPIQLRDAVELSELFAVLDTELTEHIFKDSLFKKDETNEYQNVLDKTLSPSKNLINLLCCDIEQYTKSFLVKTDKILALEKFKNDTHANEENETVKIIREWFVAATNAMRIVRFFAVRKSKMKGKIPNVAMEHALDNLLYCDNVQWFKWYDLVRNYLTKKPQDDVKENKLKLNFGTSSLLDGWSDGQEKTKAATLLKYNNELYLCILKTKNIFDTSKEDNPVYQTNLSVASRLILRNLKFQTLAGKGFLSENDISYSEMGAANPSQAILCLQKIIKERYVSKYPQLEKFVLKSYTDKGKFDAEISDALKDCYVCEYMPIDWNVIIEKQNSEELFLFKICCKDIKPGTYGRKDLQTMYWEDVLSEGSNHQLCAGAEIFMREPISKESPVRHRVGSKLVNKRDQDGNTIPEHIYREIYSYANGRVNVLSAEAKVFAEKSIIKDAKYEIIKDKRFYGDTKFMFHCPIKLFFKAKDPSRVFSEVNTLVNDALQESTNLHFIGIDRGEKHLVYSCAIDKDARIVKCIHHDIINGTDYVQKLEAVADERIIAKKNWQEENKIKDLKKGYISHVVHRLVEETIKDDGMISPHAYIILEDLSTSMKRGRQKIEKQVYQNLEMALAKKLNFVVDKTASQGELGSVSMALQLTPPVNTYQDIEGKKQFGVMLYTRANYTSITDPATGWRKTIYIKDGKEDNIRKDFISKFTDWGFDGLDYYFEYKEENVGHIWRMYSGINGEPLPRFQNRKQIMQDKNIWVSEQVNVVDILDNLFARFDKSKSLKEQLEHGVELQKINGRNETAWQSLRYAINVIQQIRNSGDKKSGNDNFLYSPVRNAKGEHFDTRNHHNNGELSEIKDADANGAFNIARKGLIMDAHIKYWNECGRPMKSDKKDEKTSDLDLFISDREWDMWLLDRSLWEKELPIFASLKAKKKQ

SEQ ID NO: 717 - protein, 1366 aa, unidentified
  REGION 1..1366: note = Description of Unknown: uncultivated organism sequence
  REGION 1..1366: note = Category: MG57 effectors
  REGION 1..1366: note = Description: MG57-27 effector
MKQFTNLYQVSKTLRFELQPIGKTKETFKGWLEKIDTAIPDVDDENLFLRDKKIKEAYLAIKPIMDSIHEEFIEKSLSSKEAKNIDFSDYYSLFKEKKVSSEFEKRLRKKISDTYSIAGDYFISEIEKTIANQKRKSNKKAAVAEEEKITKRKSKKPFECLTDVKMLFYLSANVKRLAEQHEIDEETLSRYIQTFKGFWGYLDGYNQNRENYYESEKETSTAVATRIVNENLPTFCNNILRFEKREKEYLNVFQYLKNNNRETKIKNSLGEEEDVVPIRASIFKIEHFNECLTQSQIEEYNRVIGNYNLLINLYNQLRSEETEYREIDEFEKLRKQIGCGKKPTNFDMLHDDSELKELLQKAGEAGEKMFGTENKQAEISTLPQFVKFLKDCNNWEGIYMSKAAINIISSLYFANWHSIEDKLYEAKAKACITYDKNREEPIQLRDAVELSELFAVLDTELSEHIFKDSLFKKDETNEYQNVLDKTLSPSKNLINLLCCDIEQYTKSFLVKTDKILALEKFKNDTHANEENETVKIIREWFVAATNAMRIVRFFAVRKSKMKGKIPNVAMEHALDNLLYCDNVQWFKWYDLVRNYLTKKPQDDVKENKLKLNFGTSSLLDGWSDGQEKTKAATLLKYNNELYLCILKTKNIFDTSKEDNPVYQTNLSVASRLILRNLKFQTLAGKGFLSENDISYSEMGAANPSQAILCLQKIIKERYVSKYPQLEKFVLKSYTDKGKFDAEISDALKDCYVCEYMPIDWNVIIEKQNSEELFLFKICCKDIKPGTYGRKDLQTMYWEDVLSEGSNHQLCAGAEIFMREPISKESPVRHRVGSKLVNKRDQDGNTIPEHIYREIYSYANGRVNVLSAEAKVFAEKSIIKDAKYEIIKDKRFYGDTKFMFHCPIKLFFKAKDPSRVFSEVNTLVNDVLQESTNLHFIGIDRGEKHLVYSCAIDKDARIVKCIHHDIINGTDYVQKLEAVADERIIAKKNWQEENKIKDLKKGYISHVVHRLVEETIKDDGMISPHAYIILEDLSTSMKRGRQKIEKQVYQNLEMALAKKLNFVVDKTASQGELGSVSMALQLTPPVNTYQDIEGKKQFGVMLYTRANYTSITDPATGWRKTIYIKDGKEDNIRKDFISKFTDWGFDGLDYYFEYKEENVGHIWRMYSGINGEPLPRFQNRKQIMQDKNIWVSEQVNVVDILDNLFARFDKSKSLKEQLEHGVELQKINGRNETAWQSLRYAINVIQQIRNSGDKKSGNDNFLYSPVRNAKGEHFDTRNHHNNGELSEIKDADANGAFNIARKGLIMDAHIKYWNECGRPMKSDKKDEKTSDLDLFISDREWDMWLLDRSLWEKELPIFASLKAKKKQ

SEQ ID NO: 718 - protein, 1366 aa, unidentified
  REGION 1..1366: note = Description of Unknown: uncultivated organism sequence
  REGION 1..1366: note = Category: MG57 effectors
  REGION 1..1366: note = Description: MG57-28 effector
MKQFTNLYQVSKTLRFELQPIGKTKETFKGWLEKIDTAIPDVDDENLFLRDKKIKEAYLAIKPIMDSIHEEFIEKSLSSKEAKNIDFSDYYSLFKEKKVSSEFEKRLRKKISDTYSIAGDYFISEIEKTIANQKRKSNKKAAVAEEEKITKRKSKKPFECLTDVKMLFYLSANVKRLAEQHEIDEETLSRYIQTFKGFWGYLDGYNQNRENYYESEKETSTAVATRIVNENLPTFCNNILRFEKREKEYLNVFQYLKNNNRETKIKNSLGEEEDVVPIRASIFKIEHFNECLTQSQIEEYNRVIGNYNLLINLYNQLRSEETEYREIDEFEKLRKQIGCGKKPTNFDMLHDDSELKELLQKAGEAGEKMFGTENKQAEISTLPQFVKFLKDCNNWEGIYMSKAAINIISSLYFANWHSIEDKLYEAKAKACITYDKNREEPIQLRDAVELSELFAVLDTELTEHIFKDSLFKKDETNEYQNVLDKTLSPSKNLINLLCCDIEQYTKSFLVKTDKILALEKFKNDTHANEENETVKIIREWFVAATNAMRIVRFFAVRKSKMKGKIPNVAMEHALDNLLYCDNVQWFKWYDLVRNYLTKKPQDDVKENKLKLNFGTSSLLDGWSDGQEKTKAATLLKYNNELYLCILKTKNIFDTSKEDNPVYQTNLSVASRLILRNLKFQTLAGKGFLSENDISYSEMGAANPSQAILCLQKIIKERYVSKYPQLEKFVLKSYTDKGKFDAEISDALKDCYVCEYMPIDWNVIIEKQNSEELFLFKICCKDIKPGTYGRKDLQTMYWEDVLSEGSNHQLCAGAEIFMREPISKESPVRHRVGSKLVNKRDQDGNTIPEHIYREIYSYANGRVNVLSAEAKVFAEKSIIKDAKYEIIKDKRFYGDTKFMFHCPIKLFFKAKDPSRVFSEVNTLVNDVLQESTNLHFIGIDRGEKHLVYSCAIDKDARIVKCIHHDIINGTDYVQKLEAVADERIIAKKNWQEENKIKDLKKGYISHVVHRLVEETIKDDGMISPHAYIILEDLSTSMKRGRQKIEKQVYQNLEMALAKKLNFVVDKTASQGELGSVSMALQLTPPVNTYQDIEGKKQFGVMLYTRANYTSITDPATGWRKTIYIKDGKEDNIRKDFISKFTDWGFDGLDYYFEYKEENVGHIWRMYSGINGEPLPRFQNRKQIMQDKNIWVSEQVNVVDILDNLFARFDKSKSLKEQLEHGVELQKINGRNETAWQSLRYAINVIQQIRNSGDKKSGNDNFLYSPVRNAKGEHFDTRNHHNNGELSEIKDADANGAFNIARKGLIMDAHIKYWNECGRPMKSDKKDEKTSDLDLFISDREWDMWLLDRSLWEKELPIFASLKAKKKQ

SEQ ID NO: 719 - protein, 1128 aa, unidentified
  REGION 1..1128: note = Description of Unknown: uncultivated organism sequence
  REGION 1..1128: note = Category: MG57 effectors
  REGION 1..1128: note = Description: MG57-29 effector
MEQFTNLYQLVKTLRFGLEPVGETKVTFEKWIEKLKNSEPVDDEDGNLFVKDERIRDAYLAIKPIMDRLHEKFIEESLTSNEARKIDFSEYFEAFKDEDKDVSAFEKKLRLDIGATYVVGGRYFSSEIEEAIKKPKEKKEKKEETKDEKTNKTKKKQPYECLTDANMLDYLSANVKKLAEQNGIDEQALSKHIEVFKGFWGYMSGYNQNRKNYYEVKKKATTAVATRIVHENLPIFCNNIRRFEKCRDEYIGIYQLLKDNNRETKIKNSHGVEVEAEAISEDMFQIAHFNNCLSQTQIDEYNRVIGDYNYMINLYKQARSDEKNSKKIDEFERLKKQIGCGKKKSMFVALIKDRKSELKDDDKKRENEDGVILTVETLLQRANIAGEAAFNEHDNESEINSIPGFIRFLKGCNNWSGIYMSKNAINKISSLYFANWHSLEEILVEWHKGNDKELKEKVKACITYDEKREEPLKLRDAVELSGLFAALDTALPEHFFKESLFKDDDTNEYRGVLDKTFTPSENLINMLCFDMKRYTEEFLENSKRILVKEKYKDENIKAGEEDQTIKEIKDWFDAATDAMRIVRYFAVRKSKMKGNIPNATMEQALSNLLYSDEAQWFKWYDLIRNYLTKKPQADVKENRLKLNFNNPTLMEGWDLNKESNYATVILRKNGFYYIGIMAKGHNNKFDEGTIDTDGECYEKMIYKQIPMPMGVVGFVRKCAGTAEKYGWHCPNNCLNEEGKIIGKDDEAHTHLKEIIDCYKDFFDKYEKDGYKYRDFNFTFLDSDKYEKLSDFFRDVEWQSYKVTFRNVSVVFINDKVKNGELYLFKLVSKDFSPGKNGGKGTIGTPNLQTLYWKKLFDEDNLKDVIYKLNGESEIFMRKPVAKESPVKHVLGSKLVNKRDKDDKTIPEQIYREIFLYENKKKKNISDDAKKYIDEQKAIVKDVKHEIVKDNRFYGETKYLFHCPITINFKAKKYKEPKDALAKVNEEITNSLQQSVKDLHFIGIDRGEKHLVYSCTIDENGKIIEGKCHDHDNINGTNYVQKLEAIADERTIARKNWQQQSKIKDLKRGYLSHVVHNLVEETIKDGDVIAPHAYIVLEDLSTEMKRGRQKIEKQVYQLLCLQSEIPMSR

SEQ ID NO: 720 - protein, 990 aa, unidentified
  REGION 1..990: note = Description of Unknown: uncultivated organism sequence
  REGION 1..990: note = Category: MG57 effectors
  REGION 1..990: note = Description: MG57-30 effector
MPAFIKFLQECGNWDGIYMSSAAINKISNLYFANWHSLKDKLKDAKANACITYDKKREEQIKLRDAVELSGLFAVLDTEPSEHFFKDSLFKDDDTNEYHNVLDKRLSPSKNLINLLCFDIERNIKAFLKDSDKIVALEKFKGEEETIKQIKDWLDTATDAMRVVRYFAVRKSKMKGSLPNSTMEQALSNLLYNDDAQWFKWYDLVRNYLTKKPQDDAKENKLKLNFGTSSLLGGWSDGQEKNKAATILKCDNDLYLCILKTKNIFDTSKEDNPIYKTNKSKASRLILKNLAFKTLAGKGFKGEYGVSYGDMGKDDPTKAIQCLQKFIKERYVNKYPLLEKFVANKYTDKRIFDAEINETLKECYVCEFVPIDWNIVTEKQNNEELFLFEIHSKDYQQGRKGKKDLQTMYWEDVLSDGSKHQLCAGAEIFMREPVEKESPIKHSVGSKLVNKRDNDGNTIPEQIYREIYLYANGKTKDISKEAQLYIDEQKAIIKEVKHEITKDKRFYGEQKYMFHCPIKLYFEAKDPKYASPEVNSKITKALQQSDNLQFIGIDRGEKHLVYSCSIDMNGKIVKCNHHDNINGTDYVQKLEAVADERIIAKKNWKAQNRIKDLKNGYISHVVHRLVEETIKDGDIIAPHAYIVLEDLNTEMKRGRQKFEKQVYQNLETALAKKLNFVVDKDAKQGELGSVSKALQFTPPISNYQDIEGKKQFGVMLYTRANYTSVTDPATGWRKTIYIKNGKEEDIKNQILEKFSDFGFDGKDYYFEYTEANAGHTWRLYSGKNGEPLPRFQNRKQLQQDKNIWVPEQINVVEILDNLFDNFDKRNSFKSQIGQGVELKKIEGRSETAWQSLRYALDLIQQIRNSGLKKEDDNFLCSPVRDENGKHFDTRNHANNGELSPIVDADANGAYNIARKGLIMDAHIKHWTDSGQPTKKGEKTPDLDLLISDEEWDLWLLDKEQWKKKLPTFASRKAKEDDKKSQTRKKSGMKQ

SEQ ID NO: 721 - protein, 976 aa, unidentified
  REGION 1..976: note = Description of Unknown: uncultivated organism sequence
  REGION 1..976: note = Category: MG57 effectors
  REGION 1..976: note = Description: MG57-31 effector
MLPFKIFFCFSYSKNFAFRIFDYNAVELSELFAVLNKESLEHLFKESLFKDNKLDTELTPSHNLINLLCSDVKQNIDYFWEHSEGITDLINDKNQSNEETQKIKQIKEWLDAAMNAMRIVRYFAVRKSKMKGNMPNVTIEQALSNLLYNDDAQWFKWYDLVRNYLTKKPQDDVKENKLKLNFGNSTLMNGWDMNKERDNTAVIIRRNNLYYLGIMDKNYNKILDADKIKSDDKSSYYEKMDYKQIALPTGVGGFVRKCFDTAQQYGWSCPKDCLNEDEKIIIKDDEARKNLTKIIDCYKDFFDKYEKDGFKYRNFNFRFLKSTEYEKLSDFFKDVERQRYMIKFRNISADYIDDLVNEGKLYLFQIYNKDFSTGRNERNGSKGKPNMHTIYWKTLFDETNLNDVVYKLNGQAEIFMREPIAENSPVKHGVGSKLVNKRDKDGNTIPEQIYKEIYLFANNKVKKENLSAEAKNYIESEKVKIKEAKYEIVKDNRFYGETKYMFHCPITINFKAGSSSGVNEKITDALQQSDNLQFIGIDRGEKHLVYSCTIDKYGKIIKCNHHDNINGTDYVQKLEAVANERLIAKKNWQQQNRIKDLKSGYISHVVHRLVEETIKDDKTIAPHAYIVLEDLNSEMKRGRQKIEKQVYQNLELALAKKFNFVVDKTAKQGELGSVSMALQLTPPVTNYKDIEGKKRFGIMLYTRANYTSITDPATGWRKTIYIKNGKDEEIKVQIIDKFSNFGFDEKDYYFEYTEENAGHTWRMYSGKDGKPLPRFQNKKQMLQDKNIWVPEQINVKEILDKLFANFDKGRSFKEQVNEEVKLEKIEGRSETAWQSLRYALNMIQQIRNSGVEKTDDNFLYSPVRNENGEHFDTRNHENNGDLSPIVDADANGAFNIARKGLIMDAHIKKWIKEGKPTTKEGDSKTPDLDLFISDREWDLWLLDREEWKKYLPVFASKSKKDADKTTSTKSPKRKKK

SEQ ID NO: 722 - protein, 1248 aa, unidentified
  REGION 1..1248: note = Description of Unknown: uncultivated organism sequence
  REGION 1..1248: note = Category: MG58 effectors
  REGION 1..1248: note = Description: MG58-1 effector
MVKEIFYLLFSKKMKSDFFSPFTNLYPIQKTLRRELKPLNENFQHDPALTALRNSEILQRDEQREKDYQAIKPLLDELHNQFITESLQSLEPQDRSDFVDFYQNYQKSKKNKANLSEKELKSLDEEFESRTKALRTAIGTSFSNTAELRKSNPDYVNEKGKPFLDQKSYKILTEAGVLWLLEKKYASDPEKLALIRRFGNFFTYFTGFNQNRENYYATDEKATAVAYRAINENLLTFANNCELFEKLSVLSLSEREKKIFNPDSYSEYLTQSGIDFYNEMFANIRSKANLYTQEHKTKLPQPKLLYKQIWSPRGNTIPFDLINKDEEFQKMLDTMIAETDQRIPEFKKLLEPIFEGKADLSQIFLSKTALNIISNRYFSSWHTLLEKGVELKLFKFKKNDEESFKLPAYLSLAELKELLEAVPFQTAEKSDTTEGNHHQASLLKLQRENLHLERSNSNWELLLKSMKSDFESFWTWEGEFWSYTSAKKALQSLSSLQSTNQEHKNLIKMLLDNTLYAYRMLKWFKVDTSKLGFVPEGEFYPSLDQILQDYPLPKWYDMIRNYLTRKPYSQAKLKLNFDCSTLLNGRDKNKETQNLSVILRKDGKFYLAIMKKDQNKFFEKSALYEGNLGTMEKMDYKLLPWANKMLPKCLMPGSDKKKYGASDQVLELYAKGSFKKSEKSFNLADLHTLIDFYKSALPKYEDWKVFNFQFQATENYQDISQFYREVEQQGYLLNWRKVNEELIKQGIKDWSLFLFQISSKDFEGKSKTPDLQTLYWQQLFEFSTNVKLNGEAEIFFRPWSMKKEKKNLKVDNYDVFKHKRYTEDKILFHVPITLWFGNNEVSPSAPSKFNQKLNQELIIPHFDDLHVIGLDRWEKHLAFYSVVSVKTGKIVKQGTLNLLNGTDYEAKLSQKAENRLHARQNRDTIEKIADLKNGYISQVVNKLVELVLEYNAVIVFEDLNAGFKRGRQKIEQSVYQKLELALAKKLNFIVKKEKAVGEPWSVTSAYQLAPQINTFWDIKWKQRGIMLYTRANYTSVTDPLTGWRKQHYFKKGSSKEMKAQFFKSFKNLTRDTNQEAYIFDDGTWKLYSNVERRRGKRGDHRERTQIKYDPSLELDTLFSKYQIEKSESLFGQLKNRELPQTFWTSFFRILDLIMQIRNTDDESRDIILSPIGNAQERFDSRKRYDQLPRDEKGVVIEESAFEYPTSGDANGAYNIARKGVMMLERIKENPEKPDLLIRDAEWDRKITN

SEQ ID NO: 723 - protein, 1253 aa, unidentified
  REGION 1..1253: note = Description of Unknown: uncultivated organism sequence
  REGION 1..1253: note = Category: MG58 effectors
  REGION 1..1253: note = Description: MG58-2 effector
MYTDYIDKLVGGFMDNAFSKFTNQYSFSKTLRFELVPQGRTADFLNGELESDQDRAESYQLLKPHFDNFHDGFIEQSLKAYSDSENRFEQLGDLLQKQQKFDKNSSNYEKLEKDIIKLQKSIRTNLSRFFTGFAKKLNQDYGLGDKSIISNAGAMVDFAKILWKDQPEKLVLLSKFDKFSGYFTGYCQNRTNYYVGDDKSTAVSNRIVNQNFTKYTQNFIEINKDEFKSFLKWFNQEDRYIYNQSTKQSQLTHINPETFSFAHYTEHLNQSGIETYNFNIGDINYWINQFNQTKPPKKVKKLLNLYKQIGQIPVDKKELFKFYETDEDLATDLLVTIENLPKYTENANTLFRNLADEEFNLEEINISARGTNSLANKYLIGWESVRELVNSNKKHDSSNKLIKLSEKPKSTTLGSLNEIINQFEPNQIFKPKYLNNLSDEPGQPSEILIWLIKESLLNALKESKDLAANLNLNKQSKLLGEKSITENIKTFLDSLLLSSQIMKTFQVDGALGDSDFYNELDQVLNEIDIFSIYNATRNYLTKKPYSQDKILLKFANSSLLDGWDINKESDNTSVILRDSTGYFLAIMKKSSNKFFDKAKNPLLYQVDSGDLEKMDYKLLPGPNKMIPKCIISVFWNKQEKQIVRDKPTTIKLAKSGISPSDEFIYKYNQGLHTKDPETKKIRDKKYLVEYIDYVKDALNKYEGWQGYIFNFKSSDQYQDTSEFYKDISDGGYSLNWSSIDLDVLNKAVDEGEIYLFKLKNKDLARKSKSNGKPNLHTMYWQNLFIDESSFKLNGSAEMFYRPKTIDKKQKVFTGSGIKKSGIFEKNRFTENKYLFHVPITINRKANNVIKFRDKINQAIIDEKITNVIGVDRGEKHLEFYCLLGKDGEIIEQGSLNVINGADYSKILDQKSSDRNEARKNWKTIDQIKDIKNGHTSLAIKQIIDLAVKHNALIVLEDLNTGFMRGRQKIEKSNYQQFELAMAKKLNYLVSKDTPAQQVGGTNKGLQLTPILNNYSDIEKVKQFGIILYTTAGYTSSTDPVTGWRKTVYLKSLNQDSMKNDISKFSQIYWDNKEKCYIFSYDTKNFNSKANSRVWSLYSSVERLRSERNKNGIWEKKQYSPTDVMRKALVNSGINPQSANLKEDILSMANSRSLKDIIFGFNLICQIRNSGTSVRDSDYILSPVKPFFDSRKQLDEQNLNENPNSNQLPTSGDSNGAYNIARKGQIMLSRVKQNPEKPDLFISDSDWDKYLAED

SEQ ID NO: 724 - protein, 1245 aa, unidentified
  REGION 1..1245: note = Description of Unknown: uncultivated organism sequence
  REGION 1..1245: note = Category: MG58 effectors
  REGION 1..1245: note = Description: MG58-3 effector
MFYLLFSKKMKSDFFAPFTNLYPIQKTLRRELKPLNENFQHDPALTALRNSEIPQRDQQREKDYQAIKPLLDELHNQFITESLQSLEPQDRSDFVDFYQNYQKSKKNKANLSEKELKNLDEEFESRTKALRTAIGTSFSNTAELRKSNPDYVNEKGKPFLDQKSYKILTEAGVLWLLEKKYASDPEKLALIRRFGNFFTYFTGFNQNRENYYATDEKSTAVAYRAINENLLTFANNCELFEKLSVLSLSEREKKIFNPDSYSEYLTQSGIDFYNEMLANIRSKANLYTQEHKTKLPQPKLLYKQIWSPRGNTIPFDLINNDEEFKKMLHTMIAETDQRIPEFNKLLESIFEENADLSQIFLSKTALNIISNRYFSSWHTLLEKGVELKLFKFKKNDEESFKLPAYLSLAELKELLEAVPFQTVEKSDTAEGTHHQVSLLKLQRENLHLESSHSNWELLLKSMKSDFESFWTWEGEFWSYTSAKNTLLSLSTLESTNQEHKNLIKMLLDNALYAYRMLKWFKIDTSKLGFVPEGEFYPSLDQLLQDYPLSKWYDMIRNYLTRKPYSEAKLKLNFDCSTLLNGRDKNKESQNLSVILRKDGKFYLAIMKKDQNKFFEKSALYEGNLGTMEKMDYKLLPWANKMLPKCLMPGSNKKKYGASDQVLELYAKGSFKKSEKSFNLPDLHTLIDFYKLALPKYEDWKVFNFQFQATENYQDISQFYREVEQQGYLLKWRKINEELIKQGIKDWSLFLFQMSSKDFEGKSKTPDLQTLYWQQLFESQTNVKLNGEAEIFFRPWSMKKEKKTLKVDNYDVFNHKRYTEDKILFHVPITLWFGNNEVSPSAPSKFNQKLNQELIIPHFDDLHMIGVDRWEKHLAFYSVISVKTGKIVKQGTLNLLNGTDYEAKLSQKAENRLHARQNRDTIEKIADLKNGYISQVVNKLIELVLEYNAVIVFEDLNAGFKRGRQKIEQSVYQKLELALAKKLNFIVKKEKAVGEPWSVTSAYQLAPQINTFWDIKWKQRGIMLYTRANYTSVTDPLTGWRKQHYFKKGSSEEMKAQFFESFKNLSRDAGQKAYIFDDGTWQLYSNVERRRGKRGDHRERTQIKYDPSLELDTLFSKYQIEKSDSLLDQLKNRDLPQTFWTSFFRILDLIMQIRNTDDEGRDIILSPIGNAEERFDSRKRYDQLPRDEKGLVIEESAFEYPTSGDANGAYNIARKGVMMLQRIKENPEKPDLLIRDAEWDKKITRK

SEQ ID NO: 725 - protein, 1287 aa, unidentified
  REGION 1..1287: note = Description of Unknown: uncultivated organism sequence
  REGION 1..1287: note = Category: MG58 effectors
  REGION 1..1287: note = Description: MG58-4 effector
MKSDFFAPFTNLYPIQKTLRRELKPLNENFEHDPSLSSLRNSDIPQRDEQREKDYQAIKPLLDELHNEFITKSLQSLEPQDRSDFILFYQTYQKSKKNKANLSEKELKSLDEEFESRTKALRAAIGTSFSNTAELRKSNPEYTNEKGKPFLTQKSYKILTEAGVLWLLEKKYASDPESLALIRRFGNFFTYFTGFNQNRENYYATDEKATAVAYRAINENLLTFANNCEVFEKLAVLSLSELEKKVFNPDSYSEYLTQSGIDFYNEMLANIRSKANLYTQEHKTKLPQPKLLYKQIWSPRGNTIPFDLITSEAEFQKMLHTMIRETDQRIPEFKKLLAQIFEEKADLSQIFLSKTALNIISNRYFSSWHTLLEKGVELKLFKFKKNDEESFKLPAYLSLAELKELLEAVPFQAAEKADTAEENHHQISLLKLQRENLHWENSHSNWELLLKSMKSDFESFWTWEGEFWSYTLAKEALQSLSTLESSNQEHKNLIKMLLDNALYAYRMLKWFKVDTSKLGFVPEGDFYPSLDQLLQDYPLPKWYDMIRNYLTRKPYSQAKLKLNFDCSTLLNGRDKNKETQNLSVILRKDGKFYLAIMKKDQNKFFEKSALYEGNLGAMEKMDFKFLPEASKMIPKCSTQLNEVRAAFKKGLPSFIINNEKNFRLPLEVSQRVYNLNNEMYRIENPNKSLISYKKMDKNEKKLYIKSFQKDFLRITWKEDVYKKSLLDWINFCKVFLLSFQSTQNFDFSWLKESSLYGSLEEFYADVDRACYFISWRNVNEELIKQGIKDCSLFLFQISSKDFEGKSKTPDLQTLYRNQIFAPQPNVKLNGEAEIFFRPWSMGKEKKTLKVDNYDVFKHKRYTEDKILFHVPITLWFWNNEVSPSAPSKFNQKLNQELIIPHFDDLHVIGVDRWEKHLAFYSVVSVKTGKIVKQGTLNLLNGTDYEAKLSQKAENRLYARQNRDTIEKIADLKNGYISQVVNKLVELALEYNAVIVFEDLNAGFKRGRQKIEQSVYQKLELALAKKLNFIVKKEKAVGKPWSVTSAYQLAPQINTFWDIKWKQRGIMLYTRANYTSVTDPLTGWRKQHYFKKGSSEEMKAQFFKSFKNLTRDAGQEAYIFDDGTWQLYSNVERRRGKRGDHRERTQIKYDPSLELDTLFSKNQIKKTESLFDQLKNRELPQTFWTSFFRIMDLIMQIRNTDDEGRDIILSPIGNAQERFDSRKRYNQLPCDKNGAVLEESAFEYPTSGDANGAYNIARKGVMMLERIKENPEKPNLLIRDAERDSWVK

SEQ ID NO: 726 - protein, 1234 aa, unidentified
  REGION 1..1234: note = Description of Unknown: uncultivated organism sequence
  REGION 1..1234: note = Category: MG58 effectors
  REGION 1..1234: note = Description: MG58-5 effector
MKSDFFAPFTNLYPIQKTLRRELKPLNENFEHDPSLSSLRNSEIPQRDEQREKDYQAIKPLLDELHNQFITESLQSLETQDRSDFVLFYQTYQKKKKNKADFSEKELKSLDEEFESRTKASRTAIGNSYAKLAELRKSNPDYVNEKGKPFLDQKSYKILTEAGVLWLLEKKYASDPEKLALIRRFGNFFTYFTGFNQNRENYYATDEKATAVAYRAINENLLTFANNCELFEKISVLSLSEREKKIFNPDSYSEYLTQSGIDFYNEMLANIRSKANLYTQEHKTKLPQPKLLYKQIWSPRGNTIPFDLINKDEEFQKMLHTMIAETDQRIPEFNKLLESIFEENADLSQIFLSKTSLNIISNRYFSSWHTLLEKGVELKLFKFKKNDEESFKLPAYLSLAELKELLEAVPFQTAEKSDTTEGNHHQASLLKLQRENLHLESSHSNWELLLKSMKSDFESFWTWEGEFWSYTSAKKALQSLSTLESSNQEHKNLIKMLLDNALCAYRILKWFKIDTSKLGFVPEGEFYPSLDQLLQDYPLPKWYDMIRNYLTRKPYSQAKLKLNFDCSTLLNGRDKNKETQNLSVILRKDGKFYLAIMKKDQNKFFEKSALYEGNLGTMEKMDYKLLPWANKMLPKCLMPGSDKKKYRASDQVLELYAKGSFKKSEKSFNLADLHTLIDFYKSALPKYEDWKVFNFQFQATENYQDISQFYREVEQQGYLLNWRKVNEELIKQGIKDWSLFLFQISSKDFEGKSKTPDLQTLYWQQLFKNQTNVKLNGEAEIFFRPWSMKKEKKTLKVDNYDVFKHKRYTEDKILFHVPITLWFGNNEVSPSAPSKFNQKLNQELIIPHFDDLHVIGVDRWEKHLAFYSVVSVKTGKIVKQGTLNLLNGTDYEAKLSQKAENRLHARQNRDTIEKIADLKNGYISQVVNKLVELVLEYNAVIVFEDLNAGFKRGRQKIEQSVYQKLELALAKKLNFIVKKEKAVGESWSVTSAYQLAPQINTFWDIKWKQRGIMLYTRANYTSVTDPLTGWRKQHYFKKGSSEEMKAQFFKSYKNLTRDAGQKAYIFDDGTWLLYSNVERRRGKRGDHRERTQIKYDPSLELDTLFSKYQIEKSHSLFDQLKNREFPQTFWTSFFRILDLIMQIRNTDDKGRDIILSPIGNAQERFDSRKRYDQLPCDEKGLIIEESEFEYPTSGDANGAYNIARKGMMMLERIKENPEKPDLLIRDAEWDSWSK

SEQ ID NO: 727 - protein, 1234 aa, unidentified
  REGION 1..1234: note = Description of Unknown: uncultivated organism sequence
  REGION 1..1234: note = Category: MG58 effectors
  REGION 1..1234: note = Description: MG58-6 effector
MKSDFFSPFTNLYPIQKTLRRELKPLNENFEYDPSLSLLRNSEIPQRDEQREKDYQAIKPLLDELHNQFIAESLQSLETQNRSDFVDFYQTYQKKKKNKVDLSEKELKMLNEEFESRTKALRTAIGNSYAKLAELRKSNPDYVNEKGKPFLTQKSYKILTEAGVLWLLEKKYASDPEKLALIRRFGNFFTYFTGFNQNRENYYATDEKATAVAYRAINENLLTFANNCELFEKLSVLSLSEREKKIFNPDSYSEYLTQSGIDFYNEMLANIRSKANLYTQEYKTKLPQPKLLYKQIWSPRGNTIPFDLINNDEEFKKMLHTMIAETDQRIPEFNKLLESIFEENADLSQIFLSKTSLNIISNRYFSSWHTLLEKGVELKLFKFKKNDEESFKLPAYLSLAELKELLEAVPFQTIEKADTAEGNHHQVSLLKLQRENLHLKNSHSNWELLLKSMKSDFESFWAWDEEFWSYTSAKNVIQSLSSLQSTNQEHKNLIKMLLDNALYAYRMLKWFKIDTSKLGFIPEGEFYPSLDQLLQDYPLPKWYDMIRNYLTRKPYSQAKLKLNFDCSTLLNGRDKNKETQNLSVILRKDGKFYLAIMKKDQNKFFEKSALYEGNLGTMEKMDYKLLPWANKMLPKCLMPGSDKKKYGASDQVLELYAKGSFKKSEKSFNLADLHTLIDFYKSALPKYEDWKVFNFQFQATENYQDISQFYREVEQQGYLLNWRKVNEELIKQGIKDWSLFLFQISSKDFEGKSKTPDLQTLYWQQLFESPTNVKLNGEAEIFFRPWSMKKEKKALKVDNYDVFKHKRYTEDKILFHVPITLWFGNNEVSPSAPSKFNQKLNQELIIPHFDDLHVIGVDRWEKHLAFYSVVSVKTGKIVKQGTLNLLNGTDYEAKLSQKAENRLHARQNRDTIEKIADLKNGYISQVVNKLVELVLEYNAVIVFEDLNAGFKRGRQKIEQSVYQKLELALAKKLNFIVKKEKTVGEPWSVTSAYQLAPQINTFWDIKWKQRGVMLYTRANYTSVTDPLTGWRKQHYFKKGSSEEMKAQFFKSFKNLTRDINQEAYIFDDGTWKLYSNVERRRGKRGDHRERTQIKYDPSLELDTLFFKNQIEKYDSLFDQLKNRELPQTFWTSFFRILDLIMQIRNTDDEGRDIILSPIGNVQERFDSRKRYDQLPRDEKGLIIEESEFEYPTSGDANGAYNIARKGVMMLERIKENPEKPDLLIRDAEWDSWAK

SEQ ID NO: 728 - protein, 1236 aa, unidentified
  REGION 1..1236: note = Description of Unknown: uncultivated organism sequence
  REGION 1..1236: note = Category: MG58 effectors
  REGION 1..1236: note = Description: MG58-7 effector
MKSDFFSPFTNLYPIQKTLRRELKPLNENFQHDPALTALRNSEILQRDEQREKDYQAIKPLLDELHNQFITESLQSLEPQDRSDFVDFYQNYQKSKKNKANLSEKELKSLDEEFESRTKALRTAIGTSFSNTAELRKSNPDYVNEKGKPFLTQKSYKILTEAGVLWLLEKKYASEPENLALIRRFGNFFTYFTGFNQNRENYYATDEKVTAVAYRAINENLLTFANNCELFEKLSVLSLSDLEKKIFNPDSYSEYLTQSGIDFYNEMLANIRSKANLYTQEHKTKLPQPKLLYKQIWSPRGNTIPFDLINKDEEFQKMLDTMIAETDQRIPEFKKLLVQIFEGKADLSQIFLSKTSLNTISNRYFSSWHTLLEKGVELKLFKFKKNDEESFKLPAYLSLAELKELLEAVPFQTAEKSDTAEGTHHQVSLLKLQRENLHLESSHSNWELLLKSMKSDFESFWTWEGEFWSYTSAKNTFLSLSTLESTNQEHKNLIKMLLDNALYAYRMLKWFKVDTSKLGFVPEGEFYPSLDQLLQDYSLPKWYDMIRNYLTRKPYSQAKLKLNFDCSTLLNGRDKNKETQNLSVILRKDGKFYLAIMKKDQNKFFEKSALYEGNLGTMEKMDYKLLPWANKMLPKCLMPGSDKKKYGASDQVLELYAKGSFKKSEKSFNLPDLHTLIDFYKSALPKYEDWKVFNFQFQATENYQDISQFYREVEQQGYLLNWRKVNEELIKQGIKDWSLFLFQISSKDFEGKSKTPDLQTLYWQQLFEFPTNVKLNGEAEIFFRPWSMKKEKKTLKVDNYDVFKHKRYTEDKILFHVPITLWFGNNEVSPSAPSKFNQKLNQELIIPHFDDLHVAWVDRGERNLWYFSIISVKTGKIVKQGTLNLLNGTDYEAKLSQKAENRLHARQNRDTIEKIADLKNGYISQVVNKLIELVLEYNAVIVFEDLNAGFKRGRQKIEQSVYQKLELALAKKLNFIVKKEKAVGEPWSVTSAYQLAPQINTFWDIKWKQRGIMLYTRANYTSVTDPLTGWRKQHYFKKDSSEEMKTQFFKSFKNLTRDAGQEAYILDDGTWKLYSNVERRRGKRGDHRERTQIKYDPSLELDTLFSKYQIEKSDSLLDQLKNRDLPQTFWTSFFRILDLIMQIRNTDDEGRDIILSPIGNAEERFDSRKRYDLLPRDEKGLVIEESAFEYPTSGDANGAYNIARKGVMMLQRIKENPEKPDLLIRDAEWDKKITRK

SEQ ID NO: 729 - protein, 1236 aa, unidentified
  REGION 1..1236: note = Description of Unknown: uncultivated organism sequence
  REGION 1..1236: note = Category: MG58 effectors
  REGION 1..1236: note = Description: MG58-8 effector
MKSDLFSPFTNLYPIQKTLRRELKPLNENFQHDLALSALRNSEIPQRDQQREKDYQAIKPLLDELHNQFITESLQSLEPQHRSDFVLFYQTYQKKKKNKADLPEKELKSLDEEFESRTKALRAAIGTSFSATAELRKSNPDYVNEKGKPFLDQKSYKILTESGVLWLLEKKYTSDPEKLALIRRFGNFFTYFTGFNQNRENYYATDEKSTAVAYRAINENLLTFANNCELFEKLAVLSLSELEKKVFNPDFYSEYLTQSGVDFYNEMLGNIRSKANLYTQEHKTKLPQPKLLYKQIWSPRGNTIPFDLINNDEEFKKMLHMMIAETDQRIPEFNRLLEPIFEGKADLSQVFLSKTSLNIISNRYFSSWHTLLEKGVELKLFKFKKNDEESFKLPAYLSLAELKELLEAVPFQTVEKSDTAEGTHHQVSLLKLQRENLHLESSHSNWELLLKSMKSDFESFWTWEGEFWSYTSAKNTLLSLSTLESTNQEHKNLIKMLLDNVLYAYRMLKWFKIDTSKLGFVPEGEFYLSLDQLLQDYPLPKWYDMIRNYLTRKPYSQAKLKLNFDCSTVLNGRDKNKETQNLSVILRKDGKFYLAIMKKDQNKFFEKSALYEGNLGTMEKMDYKLLPWANKMLPKCLMPGSDKKKYGASDQVLELYAKGSFKKSEKSFNLPDLHTLIDFYKSALPKYEDWKVFNFQFQATENYQDISQFYREVEQQGYLLNWRKVNEELIKQGIKDWTLFLFQISSKDFEGKSKTPDLQTLYWQQLFKNQTNVKLDGEAEIFFRPWSMKKEKKTLKVDNYDVFKHKRYTEDKILFHVPITLWFGNNEVSPSAPSKFNQKLNQELIIPYFDDLHVIGVDRWEKHLAFYSVVSVKTGKIVKQGTLNLLNGTDYEAKLSQKAENRLHARQNRDTIEKIADLKNGYISQVVNKLVELVLEYNAVIVFEDLNAGFKRGRQKIEQSVYQKLELALAKKLNFIVKKEKAVGEPWSVTSAYQLAPQINTFWDIKWKQRGIMLYTRANYTSVTDPLTGRRKHYYFKKGSSEEMKAQFFKSFKNLTRDASQEAYIFDDGTWQLYSNVERRRGKRGDHRERMQIKYDPSLELDTLFSKYQIEKSEALLDQLKNRELPQTFWTSFFRILDLIMQIRNTDDEGRDIILSPIGNAEERFDSRKRYDQLPYDENRVVIEESTFEYPTSGDANGAYNIARKGVMMLERIKENPEKPDLLIRDAEWDSWVWNF

SEQ ID NO: 730 - protein, 1234 aa, unidentified
  REGION 1..1234: note = Description of Unknown: uncultivated organism sequence
  REGION 1..1234: note = Category: MG58 effectors
  REGION 1..1234: note = Description: MG58-9 effector
MKSDLFSPFTNLYPIQKTLRRELKPLNENFQHDPALSALRNSEIPQRDQQREKDYQAIKPLLDELHNQFITESLQSLEPQDRSDFVLFYQTYQKKKKNKADLSEKDLKTLDEEFESRTKALRNAIGASFSVTAELRKSNPDYVNEKGKPFLDQKSYKILTESGVLWLLEKKYASDPEKLALIRRFGNFFTYFTGFNQNRENYYATDEKSTAVAYRAINENLLTFANNCELFEKLSMLSLSELEKKVFNPDSYSEYLAQSGIDFYNEMFANIRSKANLYTQEHKTKLPQPKLLYKQIWSPRGNTIPFDLITSEAEFQEMLHTMIRETDQRLPEFNKLLAQIFEEKADLSQIFLSKTALNIISNRYFSSWHTLLEKGVELKLFKFKKNDEESFKLPAYLSLAELKELLESVPFQTAENADTAQGSHHQVSLLKLQREKLYLENSHSNWELLLKSMKSDFESFWTWEGEFWSYTSAKKALQSLSTLESTNQEHKNLIKMLLDNALYAYRMLKWFRVDTSKLGFVPEGEFYPSLDQLLQDYPLPKWYDMIRNYLTRKPYSQAKLKLNFDCSTLLKGRDKNKETQNLSVILRKDGKFYLAIMKKDQNKFFEKSALYEGNLGTMEKMDYKLLPWANKMLPKCLMPGSDKKKYRASDQVLELYAKGSFKKSEKSFNLADLHTLIDFYKSALPKYEDWKVFNFQFQATENYQDISQFYREVEQQGYLLNWRKVNEKLIKQGIKDWSLFLFQISSKDFEGKSKTPDLQTLYWQQLFEFSTNVKLNGEAEIFFRPWSMKKEKKKLKVDNYDVFKHKRYTEDKILFHVPITLWFGNNEVSPSAPSKFNQKLNQELIIPHFDDLHVIGVDRWEKHLAFYSVVSVKTGKIVKQGTLNLLNGTDYEAKLSQKAENRLHARQNRDTIEKIADLKNGYISQVVNKLVELALEYNAVIVFEDLNAGFKRGRQKIEQSVYQKLELALAKKLNFIVKKEKAVGEPWSVTSAYQLAPQINTFWDIKWKQRGIMLYTRANYTSVTDPLTGWRKQHYFKKGSSEEMKAQFFKSFKNLSRDAGQKAYIFDDGTWQLYSNVERRRGKRGDHRERTQIKYDPSLELDTLFSKYQIEKSESLFDQFKNREFPQTFWTSFFRILDLIMQIRNTDDEGRDIILSPIGNAQERFDSRKRYDQLPRDEKGLVIEESAFEYPTSGDANGAYNIARKGVMMLERIKENPEKPDLLIRDAEWDSWII

SEQ ID NO: 731 - protein, 1234 aa, unidentified
  REGION 1..1234: note = Description of Unknown: uncultivated organism sequence
  REGION 1..1234: note = Category: MG58 effectors
  REGION 1..1234: note = Description: MG58-10 effector
MKSDLFSPFTNLYPIQKTLRRELKPLNENFQHDPALTALRNSEIPQRDEQREKDYQAIKPLLDELHNQFITKSLQSLEPQDRSDFILFYQTYQKKKKNKADLSEKELKSLDEEFKSRTKALRAAIGTSFSNTAELRKSNPDYTNGKGKSKKPKKSYKILTEAGVLWLLEKKYASDPEKLALIRRFGNFFTYFTGFNQNRENYYATDKKATAVAYRAINENLLTFANNRELFEKLAVLSLSELEKKIFNPDSYSEYLTQSGIDFYNEMLANIRSKANLYTQEHKTKLPQPKLLYKQIWSPRGNTIPFDLINNDEEFQEMLHMMITETDQRIPEFNKLLEQIFEEKTDLSQIFLSKTALNIISNRYFSSWHTLLEKGVELKLFKFKKNDEESFKLPAYLSLAELKELLEAVPFQTAEKSDTDEETHHQVSLLKLQRENLHWENSHSNWELLLKSMKSDFESFWTWEGEFWSYTSAKKALQSLLSLESTNQEHKNLIKMLLDNALYAYRMLKWFRVDTSKLGFVPEGEFYPSLDQLLQDYPLPKWYDMIRNYLTRKPYSQAKLKLNFDCSTLLNGRDKNKETQNLSVILRKDGKFYLAIMKKDQNKFFEKSALYKGNLGTMEKMDYKLLPWANKMLPKCLMPGSEKKKYGASDQVLALYAKGSFQKSEKSFNLPDLHTLIDFYKSALQKYEDWKVFNFQFQATENYQDISQFYREVEQQGYLLNWRKVNEELIKQGIKDWSLFLFQISSKDFEGKSKTPDLQTLYWCQLFESQTNVKLNGEAEIFFRPRSMKKEKKKLKVDNYDVFKHKRYTEDKILFHVPITLWFWNNEVSPSAPSKFNQKLNQELIIPHFDDLHVIGVDRWEKHLAFYSVVSVKTGKIVKQGTLNLLNGTNYEEKLSQKAENRLHARQNRDTIEKIADLKNGYISQVVNKLVELVLEYNAVIVFEDLNAGFKRGRQKIEQSVYQKLELALAKKLNFIVKKEKAVGEPWSVTSAYQLAPQINTFWDIKWKQRGIMLYTRANYTSVTDPLTGWRKQHYFKKGSSEEMKAQFFRSFKNLTRDAGQKAYIFDDGTWQLYSNVERRRGKRGDHRKRTQIKYDPSLELDTLFSKCQIEKSDSLFDQLKNRELPQTFWTSFFRILDLIMQIRNTDDEGRDVILSPIGNTQERFDSRQRYDQLPRDENGLVIEESVFEYPTSGDANGAYNIARKGVMMLQRIKENPEKPDLLIRDAEWDSWVW

SEQ ID NO: 732 - protein, 1236 aa, unidentified
  REGION 1..1236: note = Description of Unknown: uncultivated organism sequence
  REGION 1..1236: note = Category: MG58 effectors
  REGION 1..1236: note = Description: MG58-11 effector
MKSDLFSPFTNLYPIQKTLRRELKPLNESFEHDPSLSSLRNSDIPQRDEQREKDYQAIKPLLDELHNQFITESLQSLETQNRSDFVLFYQTYQKKKKNKAELSEKELKSLDEEFESRTKALRAAIGTSFSNTAELRKSNPDYVSEKGKPFLTQKSYKILTEAEVLWLLEKKYASDPEKLALICRFGNFFTYFTGFNQNRENYYATDEKATAVAYRAINENLLTFANNCEVFEKLAVLSLSELEKKVFNPDSYSEYLTQSGIDFYNEMLENIRSKANLYNQEHKTKLPQPKLLYKQIWSPRGNTIPFDLITSEAEFQKMLHMMIAETDQRIPEFKRLLAQIFEQKADLSQIFLSKTALNIISNRYFSSWHTLLEKGVELKLFKFKKNDEESFKLPAYLSLAELKELFEAVPFQTAEKSDTDEETHHQVSLLKLQRENLHWENSHSNWELLLKSMKSDFESFWTWEGEFWSYTLAKKALQSLSTLESTNQEHKNLIKMLLDNALYAYRMLKWFKVDTSKLGFVPEGEFYPSLDQLLQDYPLPKWYDMIRNYLTRKPYSQAKLKLNFDCSTLLNGRDKNKETQNLSVILRKDGKFYLAIMKKDQNKFFEKSVLYEGNLGTMEKMDYKLLPWANKMLPKCLMPGSDKKKYGASDQVLELYAKGSFKKSEKSFNLVDLHTLIDFYKSALPKYEDWKVFNFQFQATENYQDISQFYREVEQQGYLLNWRKVNEELIKQGIKDWSLFLFQISSKDFEGKSKTPDLQTLYWQQLFKNQTNVKLNGEAEIFFRPWSMKKEKKTLTVDNYDVFKHKRYTEDKILFHVPITLWFWNNEVSPSAPSKFNQKLNQELIIPHFDDLHVIGVDRWEKHLAFYSVVSVKTGKIVKQGTLNLLNGTDYEVKLSQKAENRLHARQNRDTIEKIADLKNGYISQVVNKLVELVLEYNAVIVFEDLNAGFKRGRQKIEQSVYQKLELALAKKLNFIVKKEKAVGEPWSVTSAYQLAPQINTFWDIKWKQRGIMLYTRANYTSVTDPLTGWRKQHYFKKGSSEEMKTQFFKNFKNLTRDAGQEAYIFDDGTWKLYSNVERRRGKRGDHRERTQIKYDPSLELDTLFSKYQIENSDSLLDQLKNRDLPQTFWTSFFRILDLIMQIRNTDDEGRDIILSPIGNAQERFDSRKRYNQLPRDEKGLVIEESAFEYPTSGDANGAYNIARKGVMMLQRIKENPEKPDLLIRDAEWDKKITRK

SEQ ID NO: 733 - protein, 1250 aa, unidentified
  REGION 1..1250: note = Description of Unknown: uncultivated organism sequence
  REGION 1..1250: note = Category: MG58 effectors
  REGION 1..1250: note = Description: MG58-12 effector
MLSFNWVLFFFFSKMSRSIFSPFTNLYPIQKTLRRELKPLNENFQHDPALSALRNSEIPQRDEQREKDYQAIKPLLDEFHNQFITESLHSLEPQDRSDFILFYQTYQKKKKNKAEISEKELKSLDEEFESRTKALRNAIGTSFSVTAELRKSNPDYVSEKGKPFLTQKSYKILTEAGVLWLLEKKYTSDPEKLALIRRFGNFFTYFTGFNQNRENYYATDEKSTAVAYRAINENLLTFANNCELFEKLSVLSLSELEKKTFNPDSYSEYLTQSGIVFYNEMLANIRSKANLYTQEHKAKLPQPKLLYKQIWSPRGDTIPFDLIASEAEFQETLHTMIRETDQRIPEFNKLLEQIFEEKVDLSQIFFSKTSLNIISNRYFSSWHTLLEKGVELKLFKFKKNDEESFKLPAYLSLAELKELLESAPFQMAEKADADEEKHHQASLFKLQRENLHLEKSHSNWELLLKSMKSDFESFWTWEGEFWSYTLAKKALQSLSALESTNQEHKNLIKMLLDNALYAYRMLKWFKVDTSKLGFVPEGEFYPSLDQLLQDYPLPKWYDMIRNYLTRKTYSQAKLKLNFDCSTLLNGRDKNKEIQNLSVILRKDGKFYLAIMKKDQNKFFENSALYEGNLGTMEKMDYKLLPWANKMLPKCLMPGSDKKKYGASDQVLELYAKGSFKKSEKSFNLADLHTLIDFYKLALPKYEDWKVFNFQFQATENYQDISQFYREVEQQGYLLNWRKVNEKLIKQGIKDWSLFLFQISSKDFEGKSKTPDLQTLYWQQLFEFSTNVKLNGEAEIFFRPWSMKKEKKKLKVDNYDVFKHKRYTEDKILFHVPITLWFGNNEVSPSAPSKFNQKLNQELIIPHFDDLHVIGVDRWEKHLAFYSVVSVKTGKIVKQGTLNLLNGTDYEAKLSQKAENRLYARQNRDTIEKIADLKNGYISQVVNKLVELVLEYNAVIVFEDLNAGFKRGRQKIEQSVYQKLELALAKKLNFIVKKEKAVGEPWSVTSAYQLAPQINTFWDIKWKQRGIMLYTRANYTSVTDPLTGWRKQYYFKKGSSEEMKAQFFKSFKNLTRDAGQEAYIFDDGTWLLYSNVERRRGKRGDHRERTQIKYDPSLELDTLFSKYQIEKSDSLFDQLKNRELPQTFWTSFFRIIDLIMQIRNTDDEGRDIILSPIGNPQERFDSRKRYNQLPRDEKGGIIEESAFEYPTSWDANGAYNIARKGVMMLERIKENPEKPDLLIRDAEWDKKITRK

SEQ ID NO: 734 - protein, 1236 aa, unidentified
  REGION 1..1236: note = Description of Unknown: uncultivated organism sequence
  REGION 1..1236: note = Category: MG58 effectors
  REGION 1..1236: note = Description: MG58-13 effector
MSRSIFSPFTNLYPIQKTLRRELKPLNENFQHDPALSALRNSEIPQRDEQREKDYQAIKPLLDEFHNQFITESLHSLEPQDRSDFILFYQTYQKKKKNKAEISEKELKSLDEEFESRTKALRNAIGTSFSVTAELRKSNPDYVSEKGKPFLTQKSYKILTEAGVLWLLEKKYTSDPEKLALIRRFGNFFTYFTGFNQNRENYYATDEKSTAVAYRAINENLLTFANNCELFEKLSVLSLSELEKKTFNPDSYSEYLTQSGIVFYNEMLANIRSKANLYTQEHKAKLPQPKLLYKQIWSPRGDTIPFDLIASEAEFQETLHTMIRETDQRIPEFNKLLEQIFEEKVDLSQIFFSKTSLNIISNRYFSSWHTLLEKGVELKLFKFKKNDEESFKLPAYLSLAELKELLESAPFQMAEKADADEEKHHQASLFKLQRENLHLEKSHSNWELLLKSMKSDFESFWTWEGEFWSYTLAKKALQSLSALESTNQEHKNLIKMLLDNALYAYRMLKWFKVDTSKLGFVPEGEFYPSLDQLLQDYPLPKWYDMIRNYLTRKTYSQAKLKLNFDCSTLLNGRDKNKEIQNLSVILRKDGKFYLAIMKKDQNKFFENSALYEGNLGTMEKMDYKLLPWANKMLPKCLMPGSDKKKYGASDQVLELYAKGSFKKSEKSFNLADLHTLIDFYKLALPKYEDWKVFNFQFQATENYQDISQFYREVEQQGYLLNWRKVNEKLIKQGIKDWSLFLFQISSKDFEGKSKTPDLQTLYWQQLFEFSTNVKLNGEAEIFFRPWSMKKEKKKLKVDNYDVFKHKRYTEDKILFHVPITLWFGNNEVSPSAPSKFNQKLNQELIIPHFDDLHVIGVDRWEKHLAFYSVVSVKTGKIVKQGTLNLLNGTDYEAKLSQKAENRLHARQNRDTIEKIADLKNGYISQVVNKLVELVLEYNAVIVFEDLNAGFKRGRQKIEQSVYQKLELALAKKLNFIVKKEKAVGEPWSVTSAYQLAPQINTFWDIKWKQRGIMLYTRANYTSVTDPLTGWRKQYYFKKGSSEEMKAQFFKSFKNLTRDAGQEAYIFDDGTWLLYSNVERRRGKRGDHRERTQIKYDPSLELDTLFSKYQIEKSDSLFDQLKNRELPQTFWTSFFRIIDLIMQIRNTDDEGRDIILSPIGNPQERFDSRKRYNQLPRDEKGGIIEESAFEYPTSWDANGAYNIARKGVMMLERIKENPEKPDLLIRDAEWDKKITRK

SEQ ID NO: 735 - protein, 178 aa, unidentified
  REGION 1..178: note = Description of Unknown: uncultivated organism sequence
  REGION 1..178: note = Category: MG58 effectors
  REGION 1..178: note = Description: MG58-14 effector
MVKEIFYLLFSKKMKSDFFSPFTNLYPIQKTLRRELKPLNENFQHDPALTALRNSEILQRDEQREKDYQAIKPLLDELHNQFITESLQSLEPQDRSDFVDFYQNYQKSKKNKANLSEKELKSLDEEFESRTKALRTAIGTSFSNTAELRKSNPDYVNEKGKPFLDQKSYKILTEAGVL

SEQ ID NO: 736 - protein, 129 aa, unidentified
  REGION 1..129: note = Description of Unknown: uncultivated organism sequence
  REGION 1..129: note = Category: MG58 effectors
  REGION 1..129: note = Description: MG58-15 effector
MEKKYASDPEKLALIHRFGNFFTYFTGFNQNRENYYATDEKVTAVAYRAINENLLTFANNCELFEKLSVLSLSDLEKKIFNPDSYSEYLTQSGIDFYNEMLANIRSKANLYTQEHKTKLPQPKLLYKQI

SEQ ID NO: 737 - protein, 178 aa, unidentified
  REGION 1..178: note = Description of Unknown: uncultivated organism sequence
  REGION 1..178: note = Category: MG58 effectors
  REGION 1..178: note = Description: MG58-16 effector
MVKEIFYLLFSKKMKSDFFAPFTNLYPIQKTLRRELKPLNENFQHDPALTALRNSEIPQRDQQREKDYQAIKPLLDELHNQFITESLQSLETQDRSDFVLFYQTYQKKKKNKADFSEKELKSLDEEFESRTKSLRTAIGNSYAKLAELRKSNPDYVNEKGKPFLDQKSYKILTEAGVL

SEQ ID NO: 738 - protein, 141 aa, unidentified
  REGION 1..141: note = Description of Unknown: uncultivated organism sequence
  REGION 1..141: note = Category: MG58 effectors
  REGION 1..141: note = Description: MG58-17 effector
MIAETDQRIPEFKKLLEPIFEGKADLSQIFLSKTALNIISNRYFSSWHTLLEKGVELKLFKFKKNDEESFKLPAYLSLTELKELLEAVPFQTAEKSGTAEGTHHQVSLLKLQRENLHLERSNSNWELLLKSMKSDFESFWT

SEQ ID NO: 739 - protein, 132 aa, unidentified
  REGION 1..132: note = Description of Unknown: uncultivated organism sequence
  REGION 1..132: note = Category: MG58 effectors
  REGION 1..132: note = Description: MG58-18 effector
MLLDNALYAYRMLKWFKVDTSKLGFVPEGEFYPSLDQLLQGYPLPKWYDMIRNYLTRKPYSQAKLKLNFDCSTLLNGRDKNKETQNLSVILRKDGKFYLAIMKKDQNKFFEKSALYEGNLGTMEKMDYKLLP

SEQ ID NO: 740 - protein, 141 aa, unidentified
  REGION 1..141: note = Description of Unknown: uncultivated organism sequence
  REGION 1..141: note = Category: MG58 effectors
  REGION 1..141: note = Description: MG58-19 effector
MIAETDQRIPEFNKLLESIFEENADLSQIFLSKTSLNIISNRYFSSWNTLLEKGVELKLFKFKKNDEESFKLPTYLSLAELKELLEAVPFQTAEKSDTAEGTHHQVSLLKLQRENLHLESSHSNWELLLKSMKSDFESFWT

SEQ ID NO: 741 - protein, 99 aa, unidentified
  REGION 1..99: note = Description of Unknown: uncultivated organism sequence
  REGION 1..99: note = Category: MG58 effectors
  REGION 1..99: note = Description: MG58-20 effector
MPGSDKKKYGASDQVLELYAKGSFKKSEKSFNLADLHTLIDFYKSALPKYEDWKVFNFQFQATENYQDISQFYREVEQQGYLLNWRKVNEELIKQGIKD

SEQ ID NO: 742 - protein, 132 aa, unidentified
  REGION 1..132: note = Description of Unknown: uncultivated organism sequence
  REGION 1..132: note = Category: MG58 effectors
  REGION 1..132: note = Description: MG58-21 effector
MLLDNTLYAYRMLKWFKVDTSKLGFVPEGEFYPSLDQLLQDYPLPKWYDMIRNYLTRKPYSQAKLKLNFDCSTLLNGRDKNKETQNLSVILRKDGKFYLAIMKKDQNKFFEKSALYEGNLGTMEKMDYKLLP

SEQ ID NO: 743 - protein, 105 aa, unidentified
  REGION 1..105: note = Description of Unknown: uncultivated organism sequence
  REGION 1..105: note = Category: MG58 effectors
  REGION 1..105: note = Description: MG58-22 effector
MLPKCLMPGSDKKKYGASDQVLELYAKGSFKKSEKSFNLADLHTLIDFYKSALPKYEDWKVFNFQFQATENYQDISQFYREVEQQGYLLNRRKVNEELIKQGIKD

SEQ ID NO: 744 - protein, 115 aa, unidentified
  REGION 1..115: note = Description of Unknown: uncultivated organism sequence
  REGION 1..115: note = Category: MG58 effectors
  REGION 1..115: note = Description: MG58-23 effector
MKTGKIVKQGTLNLLNGTDYEAKLSQKAENRLHARQNRDTIEKIADLKNGYISQVVNKLVELVLEYNALIVFEDLNAGFKRGRQKIEQSVYQKLELALAKKLNFIVKKEKAVGEP

SEQ ID NO: 745 - protein, 115 aa, unidentified
  REGION 1..115: note = Description of Unknown: uncultivated organism sequence
  REGION 1..115: note = Category: MG58 effectors
  REGION 1..115: note = Description: MG58-24 effector
MKTGKIVKQGTLNLLNGTDYEAKLSQKAENRLHARQNRDTIEKIADLKNGYISQVVNKLVELVLEYNAVIVFEDLNAGFKRGRQKIEQSVYQKLELALAKKLNFIVKKEKAVVEP

SEQ ID NO: 746 - protein, 867 aa, unidentified
  REGION 1..867: note = Description of Unknown: uncultivated organism sequence
  REGION 1..867: note = Category: MG58 effectors
  REGION 1..867: note = Description: MG58-25 effector
MKSDLFSPFTNLYPIQKTLRRELKPLNENFQHDPALTALRNSEIPQRDEQREKDYQAIKPLLDELHNQFITESLQSLETQDRSDFVLFYQTYQKKKKNKAALSEKDLKTLDEEFESRTKALRNAIGTSFLNTAELRKSNPDYVNEKGKPFLTQKSYKILTEAGVLWLLEKKYASDPENLALIRRFGNFFTYFTGFNQNRENYYATDEKSTAVAYRAINENLLTFANNCELFEKLSVLSLSELEKKTFNPDSYSEYLTQSGIVFYNEMLANIRSKANLYTQEHKAKLPQPKLLYKQIWSPRGDTIPFDLIASEAEFQETLHTMIRETDQRIPEFNKLLEQIFEEKVDLSQIFFSKTSLNIISNRYFSSWHTLLEKGVELKLFKFKKNDEESFKLPAYLSLAELKELLESVPFQMAEKADADEEKHHQASLFKLQRENLHLEKSHSNWELLLKSMKSDFESFWTWEGEFWSYTLAKKALQSLSALESTNQEHKNLIKMLLDNALYAYRMLKWFKIDMSKLGFVPEGEFYPSLDQLLQDYPLPKWYDMIRNYLTRKPYSQAKLKLNFDCSTLLNGRDKNKETQNLSVILRKDGKFYLAIMKKDQNKFFEKSALYEGNLGTMEKMDYKLLPWAHKMLPKCLMPGSDKKKYGASDQVLELYAKGSFKKSEKSFNLADLHTLIDFYKSALQKYEDWKVFNFQFQATENYQDISQFYREVEQQGYLLKWRKVNEELIKQGIKDWSLFLFQISSKDFEGKSKTPDLQTLYWQQLFESPTNVKLNGEAEIFFRPWSMKKEKKTLKVDNYDVFKHKRYTEDKIFFHVPITLWFWNNEVSPSAPSKFNQKLNQELIIPYFDDLHVIGVDRWEKHLETI

SEQ ID NO: 747 - protein, 1294 aa, unidentified
  REGION 1..1294: note = Description of Unknown: uncultivated organism sequence
  REGION 1..1294: note = Category: MG58 effectors
  REGION 1..1294: note = Description: MG58-26 effector
MVERESPKLRVASSILASPELSWKCWIKSVFFLAKTFYLLDFYNKKNMVKEIFYLLFSKKMKSDFFAPFTNLYPIQKTLRRELKPLNENFEHDPSLSSLRNSEIPQRDEQREKDYQAIKPLLDELHNQFITESLQSLETQDRSDFVLFYQTYQKKKKNKADFSEKELKSLDEEFESRTKASRTAIGNSYAKLAELRKSNPDYVNEKGKPFLDQKSYKILTEAGVLWLLEKKYASDPEKLALIRRFGNFFTYFTGFNQNRENYYATDEKATAVAYRAINENLLTFANNCELFEKISVLSLSEREKKIFNPDSYSEYLTQSGIDFYNEMLANIRSKANLYTQEHKTKLPQPKLLYKQIWSPRGNTIPFDLINKDEEFQKMLHTMIAETDQRIPEFNKLLESIFEENADLSQIFLSKTSLNIISNRYFSSWHTLLEKGVELKLFKFKKNDEESFKLPAYLSLAELKELLEAVPFQTAEKSDTTEGNHHQASLLKLQRENLHLESSHSNWELLLKSMKSDFESFWTWEGEFWSYTSAKKALQSLSTLESSNQEHKNLIKMLLDNALCAYRILKWFKIDTSKLGFVPEGEFYPSLDQLLQDYPLPKWYDMIRNYLTRKPYSQAKLKLNFDCSTLLNGRDKNKETQNLSVILRKDGKFYLAIMKKDQNKFFEKSALYEGNLGTMEKMDYKLLPWANKMLPKCLMPGSDKKKYRASDQVLELYAKGSFKKSEKSFNLADLHTLIDFYKSALPKYEDWKVFNFQFQATENYQDISQFYREVEQQGYLLNWRKVNEELIKQGIKDWSLFLFQISSKDFEGKSKTPDLQTLYWQQLFKNQTNVKLNGEAEIFFRPWSMKKEKKTLKVDNYDVFKHKRYTEDKILFHVPITLWFGNNEVSPSAPSKFNQKLNQELIIPHFDDLHVIGVDRWEKHLAFYSVVSVKTGKIVKQGTLNLLNGTDYEAKLSQKAENRLHARQNRDTIEKIADLKNGYISQVVNKLVELVLEYNAVIVFEDLNAGFKRGRQKIEQSVYQKLELALAKKLNFIVKKEKAVGESWSVTSAYQLAPQINTFWDIKWKQRGIMLYTRANYTSVTDPLTGWRKQHYFKKGSSEEMKAQFFKSYKNLTRDAGQKAYIFDDGTWLLYSNVERRRGKRGDHRERTQIKYDPSLELDTLFSKYQIEKSHSLFDQLKNREFPQTFWTSFFRILDLIMQIRNTDDKGRDIILSPIGNAQERFDSRKRYDQLPCDEKGLIIEESEFEYPTSGDANGAYNIARKGMMMLERIKENPEKPDLLIRDAEWDSWSK

SEQ ID NO: 748 - protein, 105 aa, unidentified
  REGION 1..105: note = Description of Unknown: uncultivated organism sequence
  REGION 1..105: note = Category: MG58 effectors
  REGION 1..105: note = Description: MG58-27 effector
MLPKCLMPGSNKKKYGASDQVLELYAKGSFKKSEKSFNLPDLHTLIDFYKLALPKYEDWKVFNFQFQATENYQDISQFYREVEQQGYLLKWRKINEELIKQGIKD

SEQ ID NO: 749 - protein, 132 aa, unidentified
  REGION 1..132: note = Description of Unknown: uncultivated organism sequence
  REGION 1..132: note = Category: MG58 effectors
  REGION 1..132: note = Description: MG58-28 effector
MLLDNALYAYRMLKWFKIDTSKLGFVPEGEFYPSLDQLLQDYPLSKWYDMIRNYLTRKPYSEAKLKLNFDCSTLLNGRDKNKESQNLSVILRKDGKFYLAIMKKDQNKFFEKSALYEGNLGTMEKMDYKLLP

SEQ ID NO: 750 - protein, 141 aa, unidentified
  REGION 1..141: note = Description of Unknown: uncultivated organism sequence
  REGION 1..141: note = Category: MG58 effectors
  REGION 1..141: note = Description: MG58-29 effector
MIAETDQRIPEFNKLLESIFEENADLSQIFLSKTALNIISNRYFSSWHTLLEKGVELKLFKFKKNDEESFKLPAYLSLAELKELLEAVPFQTVEKSDTAEGTHHQVSLLKLQRENLHLESSHSNWELLLKSMKSDFESFWT

SEQ ID NO: 751 - protein, 141 aa, unidentified
  REGION 1..141: note = Description of Unknown: uncultivated organism sequence
  REGION 1..141: note = Category: MG58 effectors
  REGION 1..141: note = Description: MG58-30 effector
MIAETDQRIPEFNKLLESIFEENADLSQISLSKTSLNIISNRYFSSWNTLLEKGVELKLFKFKKNDEESFKLPTYLSLAELKELLEAVPFQTAEKSDTAEGTHHQVSLLKLQRENLHLESSHSNWELLLKSMKSDFESFWT

SEQ ID NO: 752 - protein, 129 aa, unidentified
  REGION 1..129: note = Description of Unknown: uncultivated organism sequence
  REGION 1..129: note = Category: MG58 effectors
  REGION 1..129: note = Description: MG58-31 effector
MEKKYASDPEKLALIRRFGNFFTYFTGFNQNRENYYATDEKSTAVAYRAINENLLTFANNCELFEKLSVLSLSEREKKIFNPDSYSEYLTQSGIDFYNEMLANIRSKANLYTQEHKTKLPQPKLLYKQI

SEQ ID NO: 753 - protein, 165 aa, unidentified
  REGION 1..165: note = Description of Unknown: uncultivated organism sequence
  REGION 1..165: note = Category: MG58 effectors
  REGION 1..165: note = Description: MG58-32 effector
MTKPFFSQFTNLYPIQKTLRRELKPLNKNFEHDPSLSSLRNSEIPQRDEQREKDYQAIKPLLDKLHNQFITEGLQSLEPQDRSDFILFYQTYQKKKKNKANLSEKELKSLDEEFESRTKAFRAAIGTSFSNTAELRKSNPNYVNEKGKPFLTQKSYKILTEAGVL

SEQ ID NO: 754 - protein, 129 aa, unidentified
  REGION 1..129: note = Description of Unknown: uncultivated organism sequence
  REGION 1..129: note = Category: MG58 effectors
  REGION 1..129: note = Description: MG58-33 effector
MEKKYASEPENLALIRRFGNFFTYFTGFNQNRENYYATDEKVTAVAYRAINENLLTFANNCELFEKLSVLSLSDLEKKIFNPDSYSEYLTQSGIDFYNEMLANIRSKANLYTQEHKTKLPQPKLLYKQI

SEQ ID NO: 755 - protein, 165 aa, unidentified
  REGION 1..165: note = Description of Unknown: uncultivated organism sequence
  REGION 1..165: note = Category: MG58 effectors
  REGION 1..165: note = Description: MG58-34 effector
MTKPFFSQFINLYPIQKTLRRELKPLNENFQHDPSLSALRNSEIPQRDEQREKDYQAIKPLLDELHNEFITESLQSLEIQNRSGFVDFYQNYQKSKKNKAELSEKELKSLDEEFESRTKALRNAIGTSFSATAELRKSNPDYVNEKGKPFLTQKSYKILTEAGVL

SEQ ID NO: 756 - protein, 141 aa, unidentified
  REGION 1..141: note = Description of Unknown: uncultivated organism sequence
  REGION 1..141: note = Category: MG58 effectors
  REGION 1..141: note = Description: MG58-35 effector
MIAETDQRIPEFNKLLESIFEENADLSQIFLSKTSLNIISNRYFSSWHTLLEKGVELKLFKFKKNDEESFKLPAYLSLAELKELLEAVPFQTIEKADTAEGNHHQVSLLKLQRENLHLKNSHSNWELLLKSMKSDFESFWA

SEQ ID NO: 757 - protein, 117 aa, unidentified
  REGION 1..117: note = Description of Unknown: uncultivated organism sequence
  REGION 1..117: note = Category: MG58 effectors
  REGION 1..117: note = Description: MG58-36 effector
MIRETDQRIPELKKLLAQIFEEKADLSQIFLSKTALNIISNRYFSSWHTLLEKGVELKLFKFKKNDEESFKLPAYLSLAELKELLEAVPFQTAEKSDTDEETHHQVSLLKLQRENLH

SEQ ID NO: 758 - protein, 1234 aa, unidentified
  REGION 1..1234: note = Description of Unknown: uncultivated organism sequence
  REGION 1..1234: note = Category: MG58 effectors
  REGION 1..1234: note = Description: MG58-37 effector
MKSDFFAPFTNLYPIQKTLRRELKPLNENFEHDPSLSSLRNSEIPQRDEQREKDYQAIKPLLDELHNQFITESLQSLETQGRSDFVLFYQTYQKKKKNKVDLSEKDLKTLDEEFESRTKALRTAIGNSYAKLAELRKSNPDYVNEKGKPFLDQKSYKILTEAGVLWLLEKKYTSDPEKLALIRRFGNFFTYFTGFNQNRENYYATDEKSTAVAYRAINENLLTFANNCELFEKLSVLSLSEREKKIFNPDSYSEYLTQSGIDFYNEMLANIRSKANLYTQEHKTKLPQPKLLYKQIWSPRGNTIPFDLINKDEEFQKMLHTMIAETDQRIPEFNKLLESIFEENADLSQIFLSKTSLNIISNRYFSSWHTLLEKGVELKLFKFKKNDEESFKLPAYLSLAELKELLEAVPFQTAEKSDTTEGNHHQASLLKLQRENLHLESSHSNWELLLKSMKSDFESFWTWEGEFWSYTSAKKALQSLSTLESSNQEHKSLIKMLLDNALCAYRMLKWFKIDTSKLGFVPEGEFYPSLDQLLQDYPLPKWYDMIRNYLTRKPYSQAKLKLNFDCSTLLNGRDKNKETQNLSVILRKDGKFYLAIMKKDQNKFFEKSALYEGNLGTMEKMDYKLLPWANKMLPKCLMPGSDKKKYGASDQVLELYAKGSFKKSEKSFNLADLHTLIDFYKSALQKYEDWKVFNFQFQATENYQDISQFYREVEQQGYLLNWRKVNEELIKQGIKDWTLFLFQISSKDFEGKSKTPDLQTLYWQQLFKNQTNVKLNGEAEIFFRPWSMKKEKKKLKVDNYDVFKHKRYTEDKILFHVPITLWFGNNEVSPSAPSKFNQKLNQELIIPHFDDLHVIGVDRWEKHLAFYSVVSVKTGKIVKQGTLNLLNGTDYEAKLSQKAENRLHARQNRDTIEKIADLKNGYISQVVNKLVELVLEYNAVIVFEDLNAGFKRGRQKIEQSVYQKLELALAKKLNFIVKKEKAVGEPWSVTSAYQLAPQINTFWDIKWKQRGIMLYTRANYTSVTDPLTGWRKQHYFKKGSSEEMKAQFFKSFKNLTRDTNQEAYIFDDGTWKLYSNVERRRGKRGDHRERTQIKYDPSLELDTLFSKYQIEKSESLFGQLKNRELPQTFWTSFFRILDLIMQIRNTDDEGRDIILSPIGNAQERFDSRKRYNQLPRDENGLVLEESAFEYPTSGDANGAYNIARKGVMMLERIKENPEKPDLLIRDAEWDSWVK

SEQ ID NO: 759 - protein, 132 aa, unidentified
  REGION 1..132: note = Description of Unknown: uncultivated organism sequence
  REGION 1..132: note = Category: MG58 effectors
  REGION 1..132: note = Description: MG58-38 effector
MLLDNALYAYRMLKWFKIDTSKLGFIPEGEFYPSLDQLLQDYPLPKWYDMIRNYLTRKPYSQAKLKLNFDCSTLLNGRDKNKETQNLSVILRKDGKFYLAIMKKDQNKFFEKSALYEGNLGTMEKMDYKLLP

SEQ ID NO: 760 - protein, 1253 aa, unidentified
  REGION 1..1253: note = Description of Unknown: uncultivated organism sequence
  REGION 1..1253: note = Category: MG58 effectors
  REGION 1..1253: note = Description: MG58-39 effector
MYTDYIDKLVGGFMDNAFSKFTNQYSFSKTLRFELVPQGRTADFLNGELESDQDRAESYQLLKPHFDNFHDGFIEQSLKAYSDSENRFEQLGDLLQKQQKFDKNSSNYEKLEKDIIKLQKSIRTNLSRFFTGFAKKLNQDYGLGDKSIISNAGAMVDFAKILWKDQPEKLVLLSKFDKFSGYFTGYCQNRTNYYVGDDKSTAVSNRIVNQNFTKYTQNFIEINKDEFKSFLKWFNQEDRYIYNQSTKQGQLTHINPEMFSFAHYTEHLNQSGIETYNFNIGDINYWINQFNQTKPPKKVKKLLNLYKQIGQIPVDKKELFKFYETDEDLATDLLVTIENLPKYTENANTLFRNLADEEFNLEEINISARGTNSLANKYLIGWESVRELVNSNKKHDSSNKLIKLSEKPKSTTLGSLNEIINQFEPNQIFKPKYLNNLSDEPGQPSEILIWLIKESLLNALKESKDLAANLNLNKQSKLLGEKSITENIKTFLDSLLLSSQIMKTFQVDGALGDSDFYNELDQVLNEIDIFSIYNATRNYLTKKPYSQDKILLKFANSSLLDGWDINKESDNTSVILRDSTGYFLAIMKKSSNKFFDKAKNPLLYQVDSGDLEKMDYKLLPGPNKMIPKCIISVFWNKQEKQIVRDKPTTIKLAKSGISPSDEFIYKYNQGLHTKDPETKKIRDKKYLVEYIDYVKDALNKYEGWQGYIFNFKSSDQYQDTSEFYKDISDGGYSLNWSSIDLDVLNKAVDEGEIYLFKLKNKDLARKSKSNGKPNLHTMYWQNLFIDESSFKLNGSAEMFYRPKSIDKKQKVFTGSGIKKSGIFEKNRFTENKYLFHVPITINRKANNVIKFRDKINQAIIDEKITNVIGVDRGEKHLEFYCLLGKDGEIIEQGSLNVINGADYSKILDQKSSDRNEARKNWKTIDQIKDIKNGHTSLAIKQIIDLAVKHNALIVLEDLNTGFMRGRQKIEKSNYQQFELAMAKKLNYLVSKDTPAQQVGGTNKGLQLTPILNNYSDIEKVKQFGIILYTTAGYTSSTDPVTGWRKTVYLKSLNQDSMKNDISKFSQIYWDNKEKCYIFSYDTKNFNSKANSRVWSLYSSVERLRSERNKNGIWEKKQYSPTDVMRKALVNSGINPQSANLKEDILSMANSRSLKDIIFGFNLICQIRNSGTSVRDSDYILSPVKPFFDSRKQLDEQNLNENPNSNQLPTSGDSNGAYNIARKGQIMLSRVKQNPEKPDLFISDSDWDKYLAED

SEQ ID NO: 761 - protein, 132 aa, unidentified
  REGION 1..132: note = Description of Unknown: uncultivated organism sequence
  REGION 1..132: note = Category: MG58 effectors
  REGION 1..132: note = Description: MG58-40 effector
MLLDNALYAYRMLKWFKVDTSKLGFVPEGEFYPSLDLLLQNYPLSKWYDMIRNYLTRKPYSQAKLKLNFDCSTLLNGRDKNKETQNLSVILRKDGKFYLAIMKKDQNKFFEKSALYEGTLGTMEKMDYKLLP

SEQ ID NO: 762 - protein, 141 aa, unidentified
  REGION 1..141: note = Description of Unknown: uncultivated organism sequence
  REGION 1..141: note = Category: MG58 effectors
  REGION 1..141: note = Description: MG58-41 effector
MIRETDQRIPEFNKLLEQIFEEKADLSQIFLLKTALNIVSNRYFSSWHTLLEKGVELKLFKFKKNDEESFKLPAYLSLAELKELLEAVPFQTPEKSDTDEETHHQVSLLKLQRENLHLENSYSNWELLLKSMKSDFESFWT

SEQ ID NO: 763 - protein, 105 aa, unidentified
  REGION 1..105: note = Description of Unknown: uncultivated organism sequence
  REGION 1..105: note = Category: MG58 effectors
  REGION 1..105: note = Description: MG58-42 effector
MLPKCLMPGSDKKKYGASDQVLELYAKGSFKKSEKSFNLADLHTLIDFYKSALPKYEDWKVFNFQFQATENYQDISQFYREVEQQGYLLNWRKVNEELIKQGIKD

SEQ ID NO: 764 - protein, 1240 aa, unidentified
  REGION 1..1240: note = Description of Unknown: uncultivated organism sequence
  REGION 1..1240: note = Category: MG58 effectors
  REGION 1..1240: note = Description: MG58-43 effector
MKSDLFSPFINLYHIQKTLRRELKPLNENFEHDPSLTALRNSEIPQRDEQREKDYQAIKPLLDELHNQFITESLQSLETQNRSDFVDFYQNYQKSKKNKAHLSEKELKSLDEEFESRTKAFRAAIGTSFSNTAELRKSNPDYVNEKGKPLLTQKSYKILTEAGVLWLLEKKYASEPETLALIRRFGNFFTYFTGFNQNRENYYATDEKSTAVAYRAINENLLTFANNCELFEKFSVLSLSDLEKKIFNPDSYSEYLTQEWIDFYNEMLANIRSKANLYTQEHKTKLPQPKLLYKQIWSPRGNTIPFDLINNDKEFQEMLHTMIAETDQRIPEFNKLLEQIFEEKADLSQIFLSKTALNIISNRYFSSWHTLLEKGVELKLFKFKKNDEESFKLPAYLSLAELKELLEAVPFQTVEKSDTAEEKHHQVSLLKLQRENLYLENSHSNWELLLKSMKSDFESFWTWEGEFWSYTSAKNALQSLLSLESTNQEHKNLIKKLLDNALYAYRMLKWFRVDTSKLGFVPEGEFYPSLDQLLQDYPLPKWYDMIRNYLTRKPYSQAKLKLNFDCSTLLNGRDKNKETQNLSVILRKDGKFYLAIMKKDQNKFFEKSALYEGNLGTMEKMDYKLLPWANKMLPKCLMPGSDKKKYGASDQVLELYAKGSFKKSEKSFNLADLHTLIDFYKSALPKYEDWKVFNFQFQATENYQDISQFYREVEQQGYLLNWRKVNEELIKQGIKDWSLFLFQISSKDFEGKSKTPDLQTLYWCQLFESPTNVKLNGEAEIFFRPWSMKKEKKTLKVDNYDVFKHKRYTEDKILFHVPITLWFGNNEVSPSAPSKFNQKLNQELIIPHFDDLHVIGVDRWEKHLAFYSVVSVKTGKIVKQGTLNLLNGTDYEAKLSQKAENRLHARQNRDTIEKIADLKNGYISQVVNKLVELALEYNAVIVFEDLNAGFKRGRQKIEQSVYQKLELALAKKLNFIVKKEKAVGEPWSVTSAYQLAPQINTFWDIKWKQRGIMLYTRANYTSVTDPLTGWRKQHYFKKGSSEEMKAQFFKSFKNLTRDAGQEAYIFDDGTWQLYSNVERRRGKRGDHRERTQIKYDPSLELDTLFSKYQIEKSDSLFDQLKNREFPQTFWTSFFRILDLIMQIRNTDDKGRDIILSPIGNAKERFDSRKQYNQLPRDEKGMIIEESVFEYPTSGDANGAYNIARKGVMMLERIKENPEKPDLLIRDAEWDSWVKLNNIII

SEQ ID NO: 765 - protein, 105 aa, unidentified
  REGION 1..105: note = Description of Unknown: uncultivated organism sequence
  REGION 1..105: note = Category: MG58 effectors
  REGION 1..105: note = Description: MG58-44 effector
MLPKCLMPGSDKKKYGASDQVLELYAKGSFKKSEKSFNLADLHTLIDFYKLALPKYEDWKVFNFQFQATENYQDISQFYREVEQQGYLLNWRKVNEELIKQGIKD

SEQ ID NO: 766 - protein, 132 aa, unidentified
  REGION 1..132: note = Description of Unknown: uncultivated organism sequence
  REGION 1..132: note = Category: MG58 effectors
  REGION 1..132: note = Description: MG58-45 effector
MLLDNALYAYRMLKWFKVDTSKLGFVPEGEFYPSLDRLLQDYPLPKWYDMIRNYLTRKPYSEAKLKLNFDCSTLLNGRDKNKETQNLSVILRKDGKFYLAIMKKDQNKFFEKSALYEGNLRTMEKMDYKLLP

SEQ ID NO: 767 - protein, 115 aa, unidentified
  REGION 1..115: note = Description of Unknown: uncultivated organism sequence
  REGION 1..115: note = Category: MG58 effectors
  REGION 1..115: note = Description: MG58-46 effector
MKTGKIVKQGTLNLLNGTDYEAKLSQKAENRLHARQNRDTIEKIADLKNGYISQVVNKLVELVLEYNAVIVFEDLNAGFKRGRQKIEQSVYQKLELALAKKLNFIVKKEKTVGEP

SEQ ID NO: 768 - protein, 115 aa, unidentified
  REGION 1..115: note = Description of Unknown: uncultivated organism sequence
  REGION 1..115: note = Category: MG58 effectors
  REGION 1..115: note = Description: MG58-47 effector
MKTGKIVKQGTLNLLNGTDYEAKLSQKAENRLHARQNRDTIEKIADLKNGYISQVVNKLVELVLEYNAVIVFEDLNAGFKRGRQKIEQSVYQKLELALAKKLNFIVKKEKAVGEP

SEQ ID NO: 769 - protein, 34 aa, unidentified
  REGION 1..34: note = Description of Unknown: uncultivated organism sequence
  REGION 1..34: note = Category: MG58 effectors
  REGION 1..34: note = Description: MG58-48 effector
MKKEKKTLTVDNYDVFKHKRYTEDKILFHVPITL

SEQ ID NO: 770 - protein, 165 aa, unidentified
  REGION 1..165: note = Description of Unknown: uncultivated organism sequence
  REGION 1..165: note = Category: MG58 effectors
  REGION 1..165: note = Description: MG58-49 effector
MSRSIFSPFTNLYPIQKTLRRELKPLNENFQHDPALSALRNSEIPQRDEQREKDYQAIKPLLDELHNQFITESLQSLETQDRSDFVLFYQTYQKKKKNKAALSEKDLKTLDEEFESRTKALRTAIGNSYAKLAELRKSNPDYVNEKGKPFLNQKSYKILTEAGVL

SEQ ID NO: 771 - protein, 155 aa, unidentified
  REGION 1..155: note = Description of Unknown: uncultivated organism sequence
  REGION 1..155: note = Category: MG58 effectors
  REGION 1..155: note = Description: MG58-50 effector
MITSEAEFKKILHTVIRETDQRIPEVKKLLESIFEEKTDLSQIFLSKTAFNIISNRYFSSWHTLLEKGVELKLFKFKKNDEESFQLPAYLSLAELKELLESVPFETAEKVDAAEGNHHQVSLLKLQRENLHLENSHSNRELLLKSMKSDFESFWT

SEQ ID NO: 772 - protein, 1236 aa, unidentified
  REGION 1..1236: note = Description of Unknown: uncultivated organism sequence
  REGION 1..1236: note = Category: MG58 effectors
  REGION 1..1236: note = Description: MG58-51 effector
MKSDFFAPFTNLYPIQKTLRRELKPLNENFEHDPSLSSLRNSEIPQRDEQREKDYQAIKPLLDELHNQFITESLQSLEPQDRSDFVLFYQTYQKKKKNKAELSEKELKSLDEEFESRTKALRAAIGTSFSNTAELRKSNPDYVSEKGKPFLTQKSYKILTEAGVLWLLEKKYASDHEKIALIRRFGNFFTYFTGFNQNRENYYATDEKSTAVAYRAINENLLTFANNCELFEKLSVLSLSDLEKKIFNPDSYSEYLTQSGIDFYNEMLANIRSKANLYTQEHKVKLPQPKLLYKQIWSPRGNTIPFDLITSEEEFQEMLHAMIRETDQRIPEFNKLLEQIFEQKADLSQIFLSKTALNIISNRYFSSWHTLLEKGVELKLFKFKKNDEESFKLPAYLSLAELKELLEAVPFQTVEKSDTAEGNHHQVSLLKLQRENLHLEKSHSNWELLLKSMKSDFESFWTWEGEFWSYTSAKKALQSLSSLQSTNQEHKNLIKMLLDNTLYAYRMLKWFKVDTSKLGFVPEGEFYPSLDQLLQDYPLPKWYDMIRNYLTRKPYSQAKLKLNFDCSTLLNGRDKNKETQNLSVILRKDGKFYLAIMKKDQNKFFEKSALYEGNLGTMEKMDYKLLPWANKMLPKCLMPGSDKKKYGASDQVLELYAKGSFKKSEKSFNLADLHTLIDFYKSALPKYEDWKVFNFQFQATENYQDISQFYREVEQQGYLLKWRKVNEELIKQGIKDWSLFLFQISSKDFEGKSKTPDLQTLYWQQLFESQTNVKLNGEAEIFLRPWSMKKEKKTLKVDNYDVFKHKRYTEDKILFHVPITLWFGNNEVSPSAPSKFNQKLNQELIIPHFDDLHVIGVDRWEKHLAFYSVVSVKTGKIVKQGTLNLLNGTDYEAKLSQKAENRLHARQNRDTIEKIADLKNGYISQVVNKLVELALEYNAVIVFEDLNAGFKRGRQKIEQSVYQKLELALAKKLNFIVKKEKAVGEPWSVTSAYQLAPQINTFWDIKWKQRGIMLYTRANYTSVTDPLTGWRKQHYFKKGSSEEMKTQFFKNFKNLTRDAGQEAYIFDDGTWKLYSNVERRRGKRGDHRERTQIKYDPSLELDTLFSKYQIEKSDSLLDQLKNRDLPQTFWTSFFRILDSIMQIRNTDDEGRDIILSPIGNAQERFDSRKRYNQLPRDEKGLVIEESAFEYPTSGDANGAYNIARKGVMMLQRIKENPEKPDLLIRDAEWDKKITRK

SEQ ID NO: 773 - protein, 178 aa, unidentified
  REGION 1..178: note = Description of Unknown: uncultivated organism sequence
  REGION 1..178: note = Category: MG58 effectors
  REGION 1..178: note = Description: MG58-52 effector
MVKEIFYLLFSKKMKSDLFSPFTNLYPIQKTLRRELKPINENFEHDPFLTTLRNSKIPQRDKQREKDYQEIKPLLDKLHNQFITESLQSLETQDRSDSVLFYQTYQKKKKNKADLSEKDLKTLDEEFESRTKALRNAIGASFSVTAALRKSNPDYVNEKGKPFLDQKSYKILTEAGVL

SEQ ID NO: 774 - protein, 309 aa, unidentified
  REGION 1..309: note = Description of Unknown: uncultivated organism sequence
  REGION 1..309: note = Category: MG58 effectors
  REGION 1..309: note = Description: MG58-53 effector
MVKEIFYLLFSKKMKSDLFSPFTNLYPIQKTLRRELKPINENFEHDPFLTTLRNSKIPQRDKQREKDYQEIKPLLDKLHNQFITESLQSLETQDRSDFVLFYQTYQKKKKNKAALSEKDLKTLDEEFESRTKALRNAIGTSFLNTAELRKSNPDYVNEKGKPFLTQKSYKILTEAGVLWLLEKKYASDPENLALIRRFGNFFTYFTGFNQNRENYYATDEKSTAVAYRAINENLLTFANNCELFEKLSVLSLSELEKKTFNPDSYSEYLTQSGIVFYNEMLANIRSKANLYTQEHKAKLPQPKLLYKQI

SEQ ID NO: 775 - protein, 658 aa, unidentified
  REGION 1..658: note = Description of Unknown: uncultivated organism sequence
  REGION 1..658: note = Category: MG58 effectors
  REGION 1..658: note = Description: MG58-54 effector
MLDLSLEEKNIFNPDSYSDYLVQEGIQDYNTQIASIKSKINLYSGAHKTKLPQPKLLYKQIWSPRGNTIPFDLITSEAEFQKMLHTMIAETDQRIPEFKKLLAQIFEEKADLSQIFLSKTALNIISNRYFSSWHTLLEKGVELKLFKFKKNDEESFKLPAYLSLAELKELLEAVPFQTPEKSDTDEETHHQVSLLKLQRENLHLENSYSNWELLLKSMKSDFESFWTWEGEFWSYTLAKNALQSLSTLESTNQEHKNLIKMLLDNALYAYRMLKWFKVDTSKLGFVPEGEFYPSLDLIFQDYPLPKWYDMIRNYLTKKPYSQAKLKLNFDCSTLLNGRDKNKETQNLSVILRKDGKFYLAIMKKDQNKFFEKSALYEGNLGTMEKMDYKLLPWANKMLPKCLMPGSDKKKYGAFDQVLELYAKGSFKKSEKSFNLPDLHTLIDFYKSALPKYEDWKVFNFQFQATENYQDISQFYREVEQQGYLLNWRNVNEELIKQGIKDWSLFLFQISSKDFEGKSRTPDLQTLYRNQSFAPQTNVKLNGEAEIFFRPWSMKKEKKKLKVDNYDVFKHKRYTEDKILFHVPITLWFWNNEVSPSAPSKFNQKLNQELIIPHFDDLHVIGVDRWEKHLNLYKISTFVDIVEFSFLRLFRTYIRFLLL

SEQ ID NO: 776 - protein, 130 aa, unidentified
  REGION 1..130: note = Description of Unknown: uncultivated organism sequence
  REGION 1..130: note = Category: MG58 effectors
  REGION 1..130: note = Description: MG58-55 effector
MDNALYAYRMLKWFKVDTSKLGFLPEGEFYPSLDQLLQDYPLPKWYDMIRNYLTRKPYSQAKLKLNFDCSTLLNGRDKNKETQNLSVILRKDGKFYLAIMKKDQNKFFEKSALYEGNLGTMEKMDYKLLP

SEQ ID NO: 777 - protein, 1234 aa, unidentified
  REGION 1..1234: note = Description of Unknown: uncultivated organism sequence
  REGION 1..1234: note = Category: MG58 effectors
  REGION 1..1234: note = Description: MG58-56 effector
MTKPFFSQFINLYPIQKTLRRELKPLNENFQHDPSLSALRNSEIPQRDEQREKDYQAIKPLLDELHNEFITESLQSLEIQNRSGFVDFYQNYQKSKKNKAELSEKELKSLDEEFESRTKALRNAIGTSFSATAELRKSNPDYVNEKGKPFLTQKSYKILTEAGVLWLLEKKYASDPERLALIRRFGNFFTYFTGFNQNRENYYSTEEKSTAVAYRTINENLLTFANNCELFEKLSVPSLSELEKKIFNPDSYSEYLTQEWIDFYNEMLANIRSKANLYTQEHKTKLPQPKLLYKQIWSPRANTIPFDLIASEAEFQEMLHTMIRETDQRIPEFNKLLEQIFEEKADLSQIFLLKTALNIVSNRYFSSWHTLLEKGVELKLFKFKKNDEESFKLPAYLSLAELKELLEAVPFQTPEKSDTDEETHHQVSLLKLQRENLHLENSYSNWELLLKSMKSDFESFWTWEGEFWSYTSAKKALQSLSTLESTNQEHKNLIKMLLDNALYAYRMLKWFKVDTSKLGFVPEGEFYPSLDRLLQDYPLPKWYDMIRNYLTRKPYSEAKLKLNFDCSTLLNGRDKNKETQNLSVILRKDGKFYLAIMKKDQNKFFEKSALYEGNLRTMEKMDYKLLPWANKMLPKCLMPGSDKKKYGASDQVLELYAKGSFKKSEKSFNLADLHTLIDFYKSALPKYEDWKVFNFQFQATENYQDISQFYREVEQQGYLLNWRKVNEELIKQGIKDWSLFLFQISSKDFEGKSKTPDLQTLYWQELFESPTNVKLNGEAEIFFRPWSMKKEKKTLTVDNYDVFKHKRYTEDKILFHVPITLWFGNNEVSPSAPSKFNQKLNQELIIPHFDDLHVAWVDRGERNLWYFSIISVKTGKIVKQGTLNLLNGTDYEAKLSQKAENRLHARQNRDTIEKIADLKNGYISQVVNKLVELVLEYNAVIVFEDLNAGFKRGRQKIEQSVYQKLELALAKKLNFIVKKEKAVGEPWSVTSAYQLAPQINTFWDIKWKQRGIILYTRANYTSVTDPLTGWRKQHYFKKSSSEEMKAQFFKSFKNLTRDAGQEAYIFDDGTWQLYSNVERRRGKRGDHRERTQIKYDPSLELDTLFSKYQIEKSDSLFDQLKNRELPQTFWTSFFRILDLIMQIRNTDDEGRDIILSPIGNPQERFDSRKRYDQLPRDEKGLVIEESEFEYPTSGDANGAYNIARKGVMMLERIKENPEKPDLLVRDAEWDSWVI

SEQ ID NO: 778 - protein, 1237 aa, unidentified
  REGION 1..1237: note = Description of Unknown: uncultivated organism sequence
  REGION 1..1237: note = Category: MG58 effectors
  REGION 1..1237: note = Description: MG58-57 effector
MTKPLFSQFTNLYPIQKTLRRELKPLNENFEHDPALSALRNSEIPQRDEQREKDYQAIKPLLDELHNQFITESLQSLETQNRSGFIDFYQNYQKSKKNKADLSEKELKSIDEEFESRTKALRTAIGNSYAKLAELRKSNPDYVNEKGKPFLDQKSYKILTESGVLWLLEKKYASDPENLALIRRFGNFFTYFTGFNQNRENYYATDEKSTAVAYRAINENLLTFANNCGLFEALQVLDLSLEEKNIFNPDSYSDYLVQEGIQDYNTQIASIKSKINLYSGAHKTKLPQPKLLYKQIWSPRANTIPFDLIASEAEFQEMLHTMIRETDQRIPEFKKLLAQIFEEKADLSQIFLSKTALNIVSNRYFSSWHTLLEKGVELKLFKFKKNDEESFKLPAYLSLAELKELLEAVPFQTPEKSDTDEETHHQVSLLKLQRENLHLENSYSNWELLLKSMKSDFESFWTWEGEFWSYTSAKNALQSLSTLESANQEQKNLIKMLLDNALYAYRMLKWFKVDTSKLGFVPEGEFYPSLDQLLQDYPLPKWYDMIRNYLTRKPYSQAKLKLNFDCSTLLNGRDKNKETQNLSVILRKDGKFYLAIMKKDQNKFFEKSALYEGNLGAMEKMDYKLLPWANKMLPKCLMPGSDKKKYGASDQVLELYTKGSFKKSEKSFNLPDLHTLIDFYKSALPKYEDWKVFNFQFQATENYQDISQFYREVEQQGYLLNWRKVNEELIKQGIKEWSLFLFQISSKDFEGKSKTPDLQTLYWQQLFKNQTNVKLNGEAEIFFRPWSMKKEKKTLTVDNYDVFKHKRYTEDKILFHVPITLWFGNNEVSPSAPSKFNQKLNQELIIPHFDDLHVIGIDRWEKHLAFYSVVSVKTGKIVKQGTLNLLNGTDYEAKLSQKAENRLHARQNRDTIEKIADLKNGYISQVVNKLVELVLEYNAVIVFEDLNAGFKRGRQKIEQSVYQKLELALAKKLNFIVKKEKAVGEPWSVTSAYQLAPQINTFWDIKWKQRGIMLYTRANYTSVTDPLTGWRKQHYFKKGSSEEMKAQFFRSFKNLTRDAGQEAYIFDDGTWKIYSNVERRRGKRGDHRERTQIKYDPSLELDALFSKYQIEKSDSLLDQLKNRELPQTFWTSLFRILDLIMQIRNTDDEGRDIILSPIGNPQERFDSRKRYDQLSRDEKGVVIEESAFEYPTSGDANGAYNIARKGVMMLERIKKNPEKPDLLIRDAEWDKENNKLT

SEQ ID NO: 779 - protein, 1247 aa, unidentified
  REGION 1..1247: note = Description of Unknown: uncultivated organism sequence
  REGION 1..1247: note = Category: MG58 effectors
  REGION 1..1247: note = Description: MG58-59 effector
MVKEIFYLLFSKKMKSDFFSPFTNLYPIQKTLRRELKPLNENFEYDPSLSLLRNSEIPQRDEQREKDYQAIKPLLDELHNQFIAESLQSLETQNRSDFVDFYQTYQKKKKNKVDLSEKELKMLNEEFESRTKALRTAIGNSYAKLAELRKSNPDYVNEKGKPFLTQKSYKILTEAGVLWLLEKKYASDPEKLALIRRFGNFFTYFTGFNQNRENYYATDEKATAVAYRAINENLLTFANNCELFEKLSVLSLSEREKKIFNPDSYSEYLTQSGIDFYNEMLANIRSKANLYTQEYKTKLPQPKLLYKQIWSPRGNTIPFDLINNDEEFKKMLHTMIAETDQRIPEFNKLLESIFEENADLSQIFLSKTSLNIISNRYFSSWHTLLEKGVELKLFKFKKNDEESFKLPAYLSLAELKELLEAVPFQTIEKADTAEGNHHQVSLLKLQRENLHLKNSHSNWELLLKSMKSDFESFWAWDEEFWSYTSAKNVIQSLSSLQSTNQEHKNLIKMLLDNALYAYRMLKWFKIDTSKLGFIPEGEFYPSLDQLLQDYPLPKWYDMIRNYLTRKPYSQAKLKLNFDCSTLLNGRDKNKETQNLSVILRKDGKFYLAIMKKDQNKFFEKSALYEGNLGTMEKMDYKLLPWANKMLPKCLMPGSDKKKYGASDQVLELYAKGSFKKSEKSFNLADLHTLIDFYKSALPKYEDWKVFNFQFQATENYQDISQFYREVEQQGYLLNWRKVNEELIKQGIKDWSLFLFQISSKDFEGKSKTPDLQTLYWQQLFESPTNVKLNGEAEIFFRPWSMKKEKKALKVDNYDVFKHKRYTEDKILFHVPITLWFGNNEVSPSAPSKFNQKLNQELIIPHFDDLHVIGVDRWEKHLAFYSVVSVKTGKIVKQGTLNLLNGTDYEAKLSQKAENRLHARQNRDTIEKIADLKNGYISQVVNKLVELVLEYNAVIVFEDLNAGFKRGRQKIEQSVYQKLELALAKKLNFIVKKEKTVGEPWSVTSAYQLAPQINTFWDIKWKQRGVMLYTRANYTSVTDPLTGWRKQHYFKKGSSEEMKAQFFKSFKNLTRDINQEAYIFDDGTWKLYSNVERRRGKRGDHRERTQIKYDPSLELDTLFFKNQIEKYDSLFDQLKNRELPQTFWTSFFRILDLIMQIRNTDDEGRDIILSPIGNVQERFDSRKRYDQLPRDEKGLIIEESEFEYPTSGDANGAYNIARKGVMMLERIKENPEKPDLLIRDAEWDSWAK

SEQ ID NO: 780 - protein, 1281 aa, unidentified
  REGION 1..1281: note = Description of Unknown: uncultivated organism sequence
  REGION 1..1281: note = Category: MG59 effectors
  REGION 1..1281: note = Description: MG59-1 effector
MNLDSFTRKYKLAKTLRFELRPVGRTLETFKEQFFEGDKRRAEDYPIVKELLDGEHKALLERALSNPPSDLDWTALAQAHEDYRTSDKSKEAKDALAAKQAEFRKKIVALFKKDDAFSNLTAPTPKDIFAAMRQRYEDAGEEVPEALVTFSRFAGFFKGYQENRRNIYSDEAQATSAANRAVNENFPKFLEDVRIFRHIADAYPAILSGAEKELAPLLKGRTLASLFDPAAYGSFLSQSNIDFFNSVLGGFVPEEGEKTRGINEFVNLYRQQHEDARTDRSLSALHSLYKQILSDRETRSLVPRALETDEDVLVSLRAMLEERLLGLATESGRVNVLDDLQALLSKIPAADDIWIDGAEISRVSMNLLGSWNALGSLMESAAEVRFASESTEKKRLSAIDKWMKRSVYALSELADLRQETDTGSVIVDVSKLWKGPAAAQRFDAARAAVAAALPLLSSPIPENGPKLRERKDDVEIIKAALDAVLDVLHFVKPLHAGEGLDRDEAFYSAFDPLYTALDGFVPLYNKVRNYLTKKPGETERIKLMFDNPTLADGWDQNKEKDNTCVLFFRDGLYYLGVMNPEEKTDFSKLSGPKTPGCYRKMVYKLLPGPNKMLPKVFFSKKGLELFHPSANLLERYHAGAYKKGPSFDLAFCRRLIDFYKASIAAHPDWSKFGFRFSPTSSYNGIDEFYREVSEQGYRISFENIPVETVDRLVEEGKLCLFQLWNKDFSRASTGRPNLHTQYWNAVFAPENLQDVVIKLNGEAELFYRPRSIKEHVFRHKVGEKMVNRRGADGSPMPESVHGELFRHFNGSPEPLSDEARAWIESGNLVVKDVTHEIVKDRRYTEDKFSFHVPLTINFKQPDAPARFNEQVRDFLRGNPDVNVIGIDRGERNLIYLTLVDRQGNLLEQRSFNVVSRTRRDGVEMRTDYQSKLAQAEKDRAAARLTWSEIGAIKDLKEGYLSAVVHEIAKMMVERNAIVVLEDLNFGFKRGRFRIERQVYQKFEKALIDKLNYLVFKDRGLAEPGGTLRGYQLTDAFESFERIGKQTGFLFYVPAGYTSKIDPTTGFTNLFNTKRCTNAAGIRDFFAAFDSIRWDAARRAFAFAFDYRNFKTSQESHRTAWTVYSANRRLVFDKDARTEKEIDPTAILLDALKKHGVSVTDGFDLKALLADTEPSKANAGFFRNVFYAFDRTLQMRNSRAGEDYIESPVLNGRGEFFDSRKADATLPKDADANGAYHIALKGVQLLEENIAENRTANGSADLKIEHKDWFRFAQELAARKFK

SEQ ID NO: 781 - protein, 1245 aa, unidentified
  REGION 1..1245: note = Description of Unknown: uncultivated organism sequence
  REGION 1..1245: note = Category: MG59 effectors
  REGION 1..1245: note = Description: MG59-2 effector
MTAMTDFTKLYNLSHTLTFELHPIGKTAEKLQESGLLNQDFKRSQDYAEVKSVLDEIHKKFLQEVLSDCDLSWQELADALKIFRINKDRRALEGIQKKYRKSLADKFSKNKFFKILTEATPSKLFRYLLDQPDMVERKVETFGKFACYFKGYQENRKNIYSAEEQQTAAAYRAVNVNFQKYLRVVELYGDFVKNFPELTEDIKQRTAELTKEDLSQVLQIENYNKFIAQSGIEYLNSLIAQINLSVNWYRQAHNVRLSFAPLLFKQILSDREQAFVVERIEKDDDLYEKLKAFCEQHICSVEIRGETGDLFSRLKGLFATLNDDSDLYVDAASLSGIGNVLTGNWSCFRDAMDAYANETLKSKILREKYCKQPVYSFSEIKSWRIVRTDDDGNTTPVRLTDYWNGKKVQEMFATEKTLRNRVLEMVRVSHDKNFRERNHDVALVKEYLDAVQGILHLLKPLNVGSENGGGFYDALSPIIPLYNQVRNYVTQKPSDIGKIKLMFNNPTLADGWDFNKEKANTSVIFCRNGEYYLGIMNPKSKTDFDKLAVDDPANCYQKMVYKLLPGPNKMLPKVFFADKNIDFFAPSGDLLRRYEAKEHLKGEKFDLAYCHELINFFKESIARHKDWSKFGFKFSETSAYSGIDEFYREVAEQGYKMSFANIPVGTIDKLVEDGNLFLFQIWNKDFSEKSTGIPNKFTLYWKALFDRRNLSDVIFKLNGEAELFLREPAITEPVVHRPGEKLVNKTVVMEVGGDHQAIRNSIPDVVYTEIYKYVNGMEEGPLSSAAKEHLNKFPRLDWEPGMGLEATLKRTVVKDVKFQLVKDRRFAKRFFSFHVPITVNFKSPDPKGVRLNDRVWVFLKDNPDVNIIGIDRGERNLIYVNCIDQKGRILLQKSFNVVGGFDYHQKLDMREKERAQARKSWSEIGSIKELKSGYLSGVIYEIARMMIKYNAIVVMEDLNGGFKRSRTGIEKQVYQKFEKALIDKLNYLVFKNESDWSAPGGLLNGYQLTEHLESFSKLGRQCGWLFYVPAAYTSKIDPSTGFVSLFKLKDYTNSEKRKAFFENFKSIVYQAELDAFVFAFDYKKFKDVQSCWQSSWEVCSAKRRLVYSSRSQQIEEVNPTQLIKRALDKRDVALSDGFDLKHYISTVEAVDENAAFFKALLDAFGMTLQMRNSSKTEDYIESPVLNSKGLFFDSRKADENWPQDADSNGAYHIALKGLLCLKKGKVDLKLKDWFEFVQRRDFMVK

SEQ ID NO: 782 - protein, 1312 aa, unidentified
  REGION 1..1312: note = Description of Unknown: uncultivated organism sequence
  REGION 1..1312: note = Category: MG59 effectors
  REGION 1..1312: note = Description: MG59-3 effector
MKHHHALFAPISDSSGSAEAAPKSIRDFTGLFAVSETLQFELRPLDADFKPKSPELALADMDKYLEKDRERAGQYSNLKLILDEEHKKLIERVFSDVSASIRRLPASASGRKLLNDAGTGICWSKLAEAERQESFEKVQESFRKLIAELLNTDEKKKSLLEATPSKYIKGMLSSPDLSDSDRKTLSAFEKFACYLKGFQENRANLYSDEAKITAISNRIVNQNFPKFLIGCQIMKHIGEQYPEIIQSAERNLASILHGLSLKDVFRPDAFDRCLSQSGIDAYNNLLGGFTADGGAQKIQGINETINLYRQQHPDVVKKDKLFAPLPSLFKQILSERSSISYIPEMFDSDHAVCETIRTFLAEADLAKALQSITDLLSSIAPDDSGVFVTANELNWISNKVFGAWNMIERALDNYAETLKTKKEQEKWLKKKYYSLAELGALDFRAITTEDAAIPAVADFWRGQVFGQTAATLTNAVAEVQSVLNSPAYLPGNRDPLMRENADDVKRIKALFDSLLDLLHFLKPLRVDAPDANQVFYTGFNAVYDRLDTVVPLYNRVRNYLTRKPSEMKKTKLMFDCATLADGWDRNKESSNNAVLLLKDGNYYLAIIQPAKSRTDRKVDFASLESDRQGDCFRKMVYKYLPGPNKMLPKVIFSDRNRDLFAPSAELKRKYDAKMHTKGDNFDLGFCHELIDYFKACIAKHEDWSKFGFKFSDTAKYRGIDEFYNEISAQGYKMSFTPIPASSISDLIRQDKILLFQIYNKDFAPGATGRPNKFTLYWKQLFDEKNLNDVVFKLNGEAELFLRDPSIRKPFRHRKGEKLVNRTQKDGTPIPESVHRELCKLANGQLNESALSPEARSIWLSGQALVKTATHDIVKDRRFTVPKILFHVPITINFKSPDGKYGINQRVNDYLRGNSDVKIIGIDRGERNLIYITLVDQSGRILLQKSFNTIPQKRPDKTIELDYHAKLDLREKERDEARKNWTEINRIKDMKAGYLSQVVHEIARLMVEHNAIVVMEDLNAGFKRGRTAFEKQVYQNFERALITKLNYLVFKDAEESAPGFVRKGLQLANFFDSFEKLGKQSGFLFYVPPSYTSGIDPATGFVSLFQFGKYTNAAARKQFFESFESIRFDAGRNAFTFEFDYSKFPVPKNSEPSKVRRWTVFSVGDRIVHRMKDAQTVKPTAVILGELQKRGIQVTDGFDLLEYIRGTDADSRNASFFNAIFDAFRWTVQLRNSDKENDYILSPVLSPDGTFFDSRKATDGMPKDADANGAYHIAMKGLYLLQNRFPATDSKKIDLFISNRDWLDFMQTRSRAN

SEQ ID NO: 783 - protein, 1317 aa, unidentified
  REGION 1..1317: note = Description of Unknown: uncultivated organism sequence
  REGION 1..1317: note = Category: MG59 effectors
  REGION 1..1317: note = Description: MG59-4 effector
MKHHHALFAPNSDSSGSAEAAPKSIRDFTGLFAVSETLQFELRPLDADFNPKSPELALADMEKYLEKDRERAAQYSNLKSILDEEHKKLIERVFSDVSASIRRLPASAPGRKLLNETGTGILWSKLVEAEGQESFEKVQESFRKLIAELLNTDEKKKSLLEATPSKYIKDMLSSPDLADSDRKTLSAFEKFACYLKGFQENRTNLYSAEAKITAISNRIVNQNFPKFLIGCRIMAHIWKQYPEIIQSAEKNLASILHGRSLHDVFRPDGFDRCLSQSGIDAYNNLLGGFTAEGGAQKIQGINETINLYHQQHPEEVKKDKMFAQLPSLFKQILSERSTISYIPEMFDSDHAVCEAIRTFLAEADLTQTMQTISDLLNSITPADSGIFVAANELNWISSKVFGSWNQIERALDDYAETLKSKKEQEKCLKKKYYSLAELGTLDFRSLTAEDAAVPAVADFWHGQFFNQTADAVTNAVAEVQSVLNSPDYQPGNRDPLMRENADDVKKIKALFDSLLDLLHFLKPLRVDAPDADQVFYTGFNAVYDRLDTVVPLYNRVRNYLTRKPSEMKKTKLMFDCATLADGWDKNKESDNNAVILLKDENFYLAVIQPAQKKVDGKREQKVDFAKLETTDSGACFRKMIYKYLPTPSRMLPKVVFGKSNEALFHPSAELLRKYRADMHKKTSPNFDLGFCHELIDYFKACIAKHEDWSKFGFKFTDTAKYRGIDEFYNEISAQGYKMSFTSIPASSISDLIRQDKILLFQIYNKDFAPGATGRPNKFTLYWKQLFDENNLNDVVFKLNGEAELFLRDPSIRKPFRHRKGEKLVNRTQKDGTPIPEPVHIELCKLANGQLNENTLSPEALSIWQSGQAVVKAATHDIVKDRRFTVPKFLFHVPITINFKSPDGKYGINQRVNDYLRGNPDVKIIGIDRGERNLIYITLVDQSGRILLQKSFNTIPQKRPDKTIELDYHAKLDLREKERDAARKNWTEINRIRDLKAGYLSQVVHEIAKLMVEHNAIVVMEDLNAGFKRGRTAFEKQVYQNFERALITKLNYLVFKDAEESAPGFVRKGLQLANFFDSFEKLGKQSGFLFYVPPSYTSGIDPATGFVSLFQFGKYTNAAARKQFFESFESIRFKAGRSAFAFEFDYSRFPVPKNAEPSKVRRWTVFSVGDRIVHRMKDTQTVRPTCVILGELQKRGVQVTDGFDLLEYIRGTDEDSRNASFFNAVFDAFRWTVQLRNSDKENDYILSPFLSPDGTFFDSRKATDGMPKDADANGAYHIAMKGLYLLQNRFPSTDSKKIDLFISNRDWLDFMQTRSRAN

SEQ ID NO: 784 - protein, 1276 aa, unidentified
  REGION 1..1276: note = Description of Unknown: uncultivated organism sequence
  REGION 1..1276: note = Category: MG59 effectors
  REGION 1..1276: note = Description: MG59-5 effector
MNNSFTHQYSISKTLSFELRPIGRTEETVRSIFLPQDEKRAKDYFEVKELLDAEHKAFLNHALQNVPNLDWEDLENAHEAYRKSEKSAKDKKVLEEVQGKFRKEIARAFKADGERYAEITATTPSRIFARLIEQHENANEKIPDSLLSFVNFGGYFIWFQNNRKNIYSEEAQSTSAANRAINENFPRFLHDVKTFLHLVENYPSIIKDAENELLELLNGETFACLFDVSSYGRFLPQDGIDLFNQILGGYTKNDGTKIRGLNEFVNLYRQQHKEVQNDKGLLPLIPFYKQILSDRTTLSNRIKPFENDSEVIEILKYMLTDGLAFETESGRIKIGDALKKLFACISNSEGIWIDRRQLSNLSKMMFDSWGTIKTIMESEAVKMFSNEKTEKKKQSAIDKWMRRNAYSLHELFGMKIETDNEERFVDVAAFFQSDALMKHLKSIEEAKAKALVALSVENAENIPLREQEETKQKIQSALDSILELFQFIKPLYVDNSMERDESFYSQFDKIYSALDEFVPFFNKIRNYLTKKHDGSEPIRLMFGNPTLAAGWDKNKELDNTCVLFIKDGLYYLGIMNPKAKTDFSKFAVGDSQDCYQKMVYKFLPEPHKMLPKVFFSEKGKSIYNPPPSLIKKYQLGFHRHGETFDLEFCHELIDFFKKSIGAKTEWQTFNFKFSPTESYDGIDKFYNEIKEQGYKISFENIPVKVIDSLVDDGKLCLFKLWHRDFSDKFTGKPDPYTFYWKAAFSPENLRDYIIKLNGNARVFYRPASIKKPFSHKTGENMLNRRGKSGKAIPGEIYGELFRHFNGDKTPLSAEAQHWIDSGELTIKKATYEIVKDRRFTKDQFKLEVPIVINFKQPESPNNFNEKVNQYLRENTDVNIIGLDRGERNLIYLTVVNQNGDILEQRSLNSIGNTNPNGTEILTNYKEKLSDIEKERQQQRKSWQSLSAIADLKSGYISMVVHEIAKLMIKYNAIVVLEDLNVGFKQTRTKVERQVYQNFEIALIKKLNYLCFKDKKALEVGGVLAGLQLANKFETFEKVGKQTGFIFYVPAGYTSKIDPTTGFTNLFNTKKCTNAQATQRFFNSFDSIIWDEKSKSFALAFDYNNFKTGIKSPRSKWVVYSAIRRLVFSKEKKSTVELNPTQIIIDAVKKMGLALTDGFDLKAVLSNLEPSRENAWFFRSVFYAFDKTLHLRNSNEIEDYIESPVLNAAGEHFDSRNAPKSLPQDADANGAYHIALKGIMLINSIRSSEKPNLAIKNEDWFKFAQELAERKIGGIAK

SEQ ID NO: 785 - protein, 1255 aa, unidentified
  REGION 1..1255: note = Description of Unknown: uncultivated organism sequence
  REGION 1..1255: note = Category: MG59 effectors
  REGION 1..1255: note = Description: MG59-6 effector
MTKMTDFTKLYQLSHTLKFELRPIGKTSENLQNSGLLEEDFKRSQDYVEVKLVLDEVHKKFLQDVLSDCDLSWQELADALKIFQVNKDRKVLEDVQKKYRKLLVDRFNKNKFFKTLTEATPSKLFKSLLAEPDMAERKVETFKRFACYFKGYQETRKNIYSAEAQQTAAAYRAVNENFVKYLRVVELYENFRKNFPELAEEIGRRTAELTDGELSQILRIENYNRFIAQSGIEYLNSLIAQINSAVNLYRQAHNVKLSFVPLLFKQILSDREQAFSLERIEKDADLDEKLRAFCERHIGNVEIRGETGDLFSRLKVLLTTLNDDCELYIDAASLSAIGNALTGNWSCFRDAMAAYANETLKNKSLREKYCKQPVYSFSEIKSWRVVRTDDDGNVQPVCLSDYWHGEKTLELFAAEKILRNRILEMVRVPHDKNFRERKNDVALVKDYLDAVVEILHLLKPLNVGSENGGDLDLLGTLTEFYEALSPVIPLYNQIRNYVTQKPSDIGKIKLMFNNPTLADGWDLNKEKDYTAVIFCRNGMYYLGIMNPKSKTDFNSLATDSSSDCYQKMVYKQLQNPNQMLPKVFFSAEKIKFFAPSEELLRRYKAGEYKKGEKFDLAYCHELIDFFKRSIDRHEKWSKFEFKFSETSAYSGINEFYREVAEQGYKMSFVNIPVKAVDQLVEDGKLFLFQIWNKDFLEKSTGTPNKFTLYWKALFDRQNLSDVVFKLNGEAELFLREPAITEPVVHRSGEKLVNKTVVAAVDGNGVAIRNSIPDSVYMEIYNHVNGMEDGTLSPAAREHLNRFPRLDWEPGMGLEATVKRTVVKDVKFQLVKDKRFTERKFSFHVPITVNFKSPGLKGAKLNEMVWEFLKDNPDVNVIGIDRGERNLIYVNCIDQKGRILLQKSFNIVGGFDYHQKLDLREKERGQARKSWTEIGTIKELKAGYLSGVVYEIARLMVEYNAIVVMEDLNGGFKRSRTGIEKQIYQKFEKALIDKLNYLVFKNESDWHVPGGLLNGYQLTGPLESFAKLGKQCGWLFYVPAAYTSKIDPSTGFVSLFKLSNYTNTEKRKAFFENFESIVYQAERDAFVFAFDYKKFKDVQSCWKTSWEIYSAKRRLVYSSRSRQIGEINPTRFIKRALDKRGVVLSDGFDLKHYITSVEAVNENAAFFKDIFDAFGTTLQMRNSSGEEDYIESPVLNENGQFFDSRKAGKEWPRDADSNGAYHIALKGLLRMKSGQTAKLKRLDWFEFVQRRGFITE

SEQ ID NO: 786 - protein, 1255 aa, unidentified
  REGION 1..1255: note = Description of Unknown: uncultivated organism sequence
  REGION 1..1255: note = Category: MG59 effectors
  REGION 1..1255: note = Description: MG59-7 effector
MTKMTDFTKLYQLSHTLKFELRPIGKTSENLQNSGLLEEDFKRSQDYVEVKSVLDEVHKKFLQDVLSDCDLSWQELADALKIFQVNKDRKVLEDVQKKYRKLLADRFNKNKFFKTLTEATPSKLFKSLLAEPDMAERKVETFKRFACYFKGYQETRKNIYSAEAQQTAAAYRAVNENFVKYLRVVELYENFRKNFPELAEEIGRRTAELTDGELSQILRIENYNRFIAQSGIEYLNSLIAQINSAVNLYRQAHNVKLSFVPLLFKQILSDREQVFTLERIEKDADLDEKLRAFCEQHIGNVEIRGETGDLFSRLKVLLTTLNDDCELCIDAASLSAIGNALSGNWSCFRDAMTAYANETLKNKSLREKYCKQPVYSFSEIKSWRVVRTDDDGNVQPVCLSDYWHGEKALELFATEKILRNKILEMVRVPHDKNFRERKNDVALVKDYLDAVVEILHLLKPLNVGSENGGDLDLLGILTEFYEALSPVIPLYNQIRNYVTQKPSDIGKIKLMFSNPTLADGWDLNKEKDNTAVIFYRNGMYYLGIMNPKSKTDFDNLATDSSSDCYQKMVYKLLPGPNKMLPKVFFADKNIDFFAPSEELLRRYKAGEHLKGEKFDLAYCHKLIDFFKRSITRHEEWSKFDFQFSETSAYAGIDEFYREVAEQGYKMSFVNIPVKAVDQLVEDGKLFLFQIWNKDFSEKSTGTPNKFTLYWKALFDRQNLSDVVFKLNGEAELFLREPAITEPVVHRSGEKLVNKTVVAAVDGNGMAIRNSIPDAVYTEIYKHVNGMEEGTLSPAAREHLNRFPRLDWEPGMGLEATVKRTVVKDVKFQLVKDKRFTERKFSFHVPITVNFQSPGLKGAKLNEMVWEFLKDNPDVNVIGIDRGERNLIYVNCIDLKGRILLQKSFNIVGGFDYHQKLDMRERERGQARKSWNEIGTIKELKAGYLSGIVYEIARLMVEYNAIVVMEDLNGGFKRSRTGIEKQIYQKFEKALIDKLNYLVFKSESDWHVPGGLLNGYQLTGPLESFAKLGKQCGWLFYVPAAYTSKIDPSTGFVSLFKLSNYTNTEKRKAFFENFESIVYQTEQDAFVFAFDYKKFKDVESCWKTSWEVYSARRRLVYGRRSRQIEAINPTRLIKRALEQRGVVLSDGFDLKHYITSVEAVNENAAFFKDIFDAFGTTLQMRNSSGEEDYIESPVLNENGQFFDSRKAGKEWPRDADSNGAYHIALKGLLRMKSGQTAKLKRLDWFEFVQRRGFITE

SEQ ID NO: 787 - protein, 1255 aa, unidentified
  REGION 1..1255: note = Description of Unknown: uncultivated organism sequence
  REGION 1..1255: note = Category: MG59 effectors
  REGION 1..1255: note = Description: MG59-8 effector
MTKMTDFTKLYQLSHTLKFELRPIGKTSENLQNSGLLEEDFKRSQDYVEVKSVLDEVHKKFLQDVLSDCDLSWQELADALKIFQVNKDRKVLEDVQKKYRKLLADRFNKNKFFKTLTEATPSKLFKSLLAEPDMAERKVETFKRFACYFKGYQETRKNIYSAEAQQTAAAYRAVNENFVKYLRVVELYENFRKNFPELAEEIGRRTAELTDGELSQILRIENYNRFIAQSGIEYLNSLIAQINSAVNLYRQAHNVKLSFVPLLFKQILSDREQVFTLERIEKDADLDEKLRAFCERHIGNVEIRGETGDLFSRLKVLLTTLNDDCELYIDAASLSAIGNALTGNWSCFRDAMAAYANETLKNKSLREKYCKQPVYSFSEIKSWRVVRTDDDGNVQPVCLSDYWHGEKALELFATEKILRNKILEMVRVPHDKNFRERKNDVALVKEYLDAVVEILHLLKTLNVGSENGGDLDLLGTLTEFYEALSPVIPLYNQIRNYVTQKPSDIGKIKLMFNNPTLADGWDLNKEKDYTAVIFCRNGMYYLGIINPKSKTDFNSLATDSSTDCYQKMVYKQLQNPNQMLPKVFFSAEKIKFFAPSEELLRRYKAGEYKKGEKFDLAYCHELIDFFKRSIDRHEKWSKFEFKFSETSAYSGINEFYREVAEQGYKMSFVNIPVKAVDQLVEDGKLFLFQIWNKDFSEKSTGTPNKFTLYWKALFDRQNLSDVVFKLNGEAELFLREPAITEPVVHRPGEKLINKTVVVAIDGNGVAVRNSIPDSVYMEIYNHVNGMEDGTLSPAAREHLNRFPRLDWEPGMGLEATVKRTVVKDVKFQLVKDKRFTERKFSFHVPITVNFKSPGLKGAKLNEKVWEFLKDNPDVNVIGIDRGERNLIYVNCIDLKGRILLQKSFNIIGGFDYHQKLDLRERERGQARKSWNEIGTIKELKAGYLSGVVYEIARLMVEYNAIVVMEDLNGGFKRSRTGIEKQIYQKFEKALIDKLNYLVFKNESDWHVPGGLLNGYQLTGPLESFAKLGKQCGWLFYVPAAYTSKIDPSTGFVSLFKLSNYTNTEKRKAFFENFESIVYQTEQDAFVFAFDYKKFKDVESCWKTSWEVYSARRRLVYGRRSRQIEEINPTRLIKRALDKRGVVLSDGFDLKHYITSVEAVNENAAFFKDIFDAFGTTLQMRNSSGEEDYIESPVLNENGQFFDSRKAGKEWPRDADSNGAYHIALKGLLRMKSGQTAKLKRLDWFEFVQRRGFITE

SEQ ID NO: 788 - protein, 1255 aa, unidentified; identical to SEQ ID NO: 786
  REGION 1..1255: note = Description of Unknown: uncultivated organism sequence
  REGION 1..1255: note = Category: MG59 effectors
  REGION 1..1255: note = Description: MG59-9 effector

SEQ ID NO: 789 - protein, 1255 aa, unidentified; identical to SEQ ID NO: 786
  REGION 1..1255: note = Description of Unknown: uncultivated organism sequence
  REGION 1..1255: note = Category: MG59 effectors
  REGION 1..1255: note = Description: MG59-9 effector

SEQ ID NO: 790 - protein, 1280 aa, unidentified
  REGION 1..1280: note = Description of Unknown: uncultivated organism sequence
  REGION 1..1280: note = Category: MG59 effectors
  REGION 1..1280: note = Description: MG59-10 effector
MFKNFVGLYKMSKTLRFELKPVGATLANMKKSGVLERDFVRAEKYKMMKDILDLQHKALLERTLSSVDNFTRCMGEKERKKYAVILAENGVLNWEILAKAFEDFRTSSKDKESRDKLESVCASYRTLIAEIIKSDDKYKCLAASTPKDFIKEFLANEGSGDAAEKLAVETFNGFACYFTGFQENRSNIYSDKAQKTSAANRAVNENFPRYLKCCSLYDYVVKKYPDIIAEVELALGEKAKEFSASKCLTVGKYSDFLSQRGIEKINTLIGIFNQQINLKKQSDESARQDKKLGQMPVLYKQILSDRESASFSIEKFESDADVFSSIKNFGEFLKNNNVLTKLYNLIATVRIEDTIFVKRESLSEISNNLYGDWHELSAAIERVAEEKFSNITAKGHREKAIKQWISRNEYPLTDFVDAVRYDEKNNNWVTIDICDYWKNEKSKVLFELVESSWKALLPILDTDEKIGLRDRKDDVKAIKEYLDSILNVIRLVKPLSVGAELERDTDFYGQFDELYDILDDVVPLYNQARNYITSKPSEEKKLKLMFDSPTLADGWDQNQEEANKAVLLEKGGQFYLGIVNAKLGKKERPDFLKLRSRDSSNCYRKMVYKLLPGPNKMLPKVFFSNKGLPIYKPSPRLLERYKNGDYKKGATFDLQFCHQLIDFFKKSIAIHPDWSKFGFEFSPTSSYGGIDDFYREISNQGYKISFDSIDEKVIDSFVDSGALYLFKLHNKDFSSGSTGRQNLHTIYWRMLFASENLEDVIYKLNGEAELFYRRASIKNPYIHKFGKKLVNRIDREGKRIPDVAFGQLVKFADGEIAVGELSGVAKDLYDAGKVVMKDVKHEIIKDRRFAEDKFFFHVPITINAKANDKASRFNDFVNDAVRNFEDVNIIGIDRGERHLLYVTVIDNNGKILEQRSFNTIDIDRYDGKRIDVDYHAKLDQMEKDRDKARKSWSEIGKIKDLKSGYLSMVVHEIAKLMVKYNAIVVLEDLNGGFKRGRSAIEKQVYQKFEKAMIDKLNYLVFKDSEPLCLGGSLRGYQLADKFESFEKLGKQTGFIYYVPAAYTSKIDPTTGFTNIFDFKECTSAEGIKRFFNLFDSIKYSETDKAFIFAFDYNKFNTRFPSWNSKWEVYSASRRLVYSKDQKTDVEINPTDVIIDALVKRGVAITDEFNLGLYLKEMDATRENASLFKSVFYAFERTLQMRNSSAKTGEDYIESPVKNSSDGFFDSRKCGKELPENADANGAYHIALKGLMMVNELKTNETPKLAIKNEAWLEFVQRMRK

SEQ ID NO: 791 - protein, 1262 aa, unidentified
  REGION 1..1262: note = Description of Unknown: uncultivated organism sequence
  REGION 1..1262: note = Category: MG59 effectors
  REGION 1..1262: note = Description: MG59-11 effector
MAKNTKLSQFTGLYPVSKTLRFELKPMGKTLEKIKETGIIENDKKRHNDYFDAKKIIDKYHKYFIDAALSKFPRIDWNPLKEAIERSLDRSDASKKKLEKTQTEFRKKIAKALTTHDHYKELTASTPKELFLKVFPDHFGKQPAIDTFDGFSSYFTGFQENRQNIYSDEAISTAIPYRLVHDNFPKFLSNIEVYKTLKDNAPSVLSDAENELKDFLNGKSLANIFELNAYNDVLTQSGIDFFNQVIGGISGEGGEKKTRGINEFSNLYRQQHPEFAQKRLATKMIPLYKQILSDRETKSFILESYSTDSQVQESVKEFFESQILNCDIAGRKVNVLKELSSLIKRITEFDLGSIYVNQEELSNISLELFKSWNTINAILFKNAENRIGSAEKAANKKKIDAWMKNNEFSIATLNLAIAESDSEEISRVKIESYWNNFEAKVQSILCGDNRRNLDEFLSATFNENNALREDSKIIEKLKAFLDALIEIMHSIKPLISDAENRDLSFYNELTPLYDQLSLVVPLYNKIRNYATQKLTESEKFKLNFDNPTLADGWDQNKEDANTAILLLKNGLYYLGIMNAKNKPKIKDFKTSESEDCYDKMVYKLLPGPNKMLPKVFFSEKGLATFKPPKDILDGYNAGKHKKGDLFDIGFCHQLIDFFKESIAKHPDWKKFDFNFSDTSSYEDISGFYKEVTDQGYKITFSKIPTFQIDEWVNEGKLFLFQIYNKDFAPGAKGSPNLHTLYWKSVFSPENLKDVVVKLNGEAELFYRPSSVKKPYSHKVGEKLVNRIGKDGLPLPESVFGELFRYFNGKLDGELSDEAKRYLDVAVVKDVKHEIVKDRRYTQDKFEFHVPLTLNFKADSKNEYMNERVRQFLKDNPDVNIIGIDRGERHLLYMTLINQKGEILKQKSFNIVESVNYQAKLVQREKERDAARRSWSSVGKIKDLKEGFLSQVIHEITTTMIENNAIVVLEDLNFGFKRGRFCVERQVYQKFEKMLIDKLNYLVFKNKPEGDVGGVLKGYQLAEKFDSFQKLGKQSGFLFYIPAAYTSKIDPTTGFANLFNMTELTSAEKKKEFLSHFKDITYDGQNDRFSFSFDYKDFKCFQTDYIKKWTVYTQGKRIVYDKESKSAKEIFPVEIIKAALEKQNIALTDQLDVLSVINSVEASSKSASFFGDICYAFEKTLQMRNSIPNTDEDYLVSPVMNKRGEFYDSRSCGDTLPKNADANGAYHIALKGLYLIKNVFDAGGKDLKISHEDWFKFAQSRNC

SEQ ID NO: 792 - protein, 1271 aa, unidentified
  REGION 1..1271: note = Description of Unknown: uncultivated organism sequence
  REGION 1..1271: note = Category: MG59 effectors
  REGION 1..1271: note = Description: MG59-12 effector
MFEKFTGIYKVSKTLRFELKPIGKTAENMKKFNVLESDRVRDSQYERMKDILDAQHRALLERTLERVGKEEDVEDWVKLAEAYRKFRVGKKDKAARASLDKVLEAMRKSIVAAFGEDDLYKELVTESTPSKFIKRLVKDEMFKDSDEGRALDTFNGFACYFTGYQENRRNIYSDKPQTTATAYRAIDVNFPKFLDAVEVVRHIQDEYPKIIKLVEDELGDKLGGKRLATIFSVESYGSYLSQTGIDFFNLVLGGYAPKVGEKKRGLNEFINLELQQNECAASDAKLHKVAPLFKQILSDRESESFRFVAFEKDCDVIDAVKDFANRLEGDEIVGRLRKKLATLTKSEKIYVNGDASLTMVSKNLCGNWGALESCMRDAAEAKYKVLGTEKKIAKAVEEWMKSKAFALADLPDVTVADDKSEDGVKVYRVLDCWRGEPATAIFEALVTASAAVKGLPDNADDDEATLREDSKRVAVLKSYLDAVQDLLHLVKPLAVSAELDRDMNFYSEFDELYERLDEVVPLYNKVRNYVTKKVGEVEKMKLMFDCATLGDGWDLNKEQSNRCVILVKDGAYYLGIMRPRCKVSLDSLQSNSGADYKKMVYKYLPGPNKMLPKVVFSEKGKAKYKPSKELLDKYDKKCHIKSSPAFDIDFCHQLIDFFKDAINKNNDWSVFNFKFSPTKSYASIDGFYKEVTEQGYKIDFINVAIKDIDALVDRGDLFLFQIYNKDFAEGAKGRPNLHTLYWNAVFSPENLLNPIAQLNGGAELFCRPAAIKTPYAHEVGEKMLNRWTTAGEPIPETVFGELFKYINGRLSEIKLSAEAKSLLERKQLIIKPVKHRIVKDARYTCEKFFLHVPVAFNAFAGETYRFNDCVNAAVAANNNVNVIGLDRGERHLIYLTLINQKGEILLQKSFNTITGAAYDGHVREVDYQKKLTAMEKGRDAARKSWSEIGQIKDLKAGYISLVVHEIVSLMLKYDAIVVMEDLNFGFKRGRFKVERQVYQKFEKALIDKLNYLAFKDADTTSPGGVLKGYQLAAKFESFEKLGKQTGFVYYVPAGYTSKIDPTTGFTNLFNTKKCTSAAGIAEFFSRFDAITYDAGRNSFAFKFDYSNFKTSQTSWKKDWIVYSADRRLVFDVKTRVETEIHPTQIIFDALKKAGEKVADGYDLRAFLASVEPSKSNATIFRDIFYSFDRTLQMRNSCAATGEDYIASPVMNASGKFFDSRESGDDLPKNADANGAYHIALKGLYLVKNRLGKEKIDLKLTHEQWFEFVQNR

SEQ ID NO: 793 - protein, 1128 aa, unidentified
  REGION 1..1128: note = Description of Unknown: uncultivated organism sequence
  REGION 1..1128: note = Category: MG60 effectors
  REGION 1..1128: note = Description: MG60-1 effector
MVNLESFKNLYEVRKTVRFELKPYKKTREILKWDNNYQSLDSYIKHIKDWEFEDGFDWNDFCLWKYEDFLKESKKYYWFLLQINAEIQKWRNETTKKNIYFDFKKSKGIFKNIPSLKKIQWFEWLKSKLLEIQDEYQNYFNFFDQLQDKQHKNEKKSDISIHLRKIAYLNRNLFTIFNFFDIYKTHKEILDEYKEIIDYDFEKLNNSIIASHENEISGACFWKFTFNKFALFRREASPLKENFEANKQVLQKAVATMVENGEIVNDNWTIAGINTNQIHSLTLQKKNCYSLKFEEEIWTLQGRLEKFNFNRNLDEVISELDDINGQLLNQYIQNFVNGYKNDENVLEVSFYTDHEGNKIFDKSKKYDSYENGQKKEKFYPSLVKLDLEQFVEAQKRNQIKIQPGQTLKWYQYLNLLWKADLTDEEKEQKKIVNKFLQILFKQKFINPDYNTIKEFRDTLAKHRWKLRQNVRTSEREFIQEAMVRYYGQILEKNGCYFVALFDKDKLQNDIKNIVTDSQIKDKWMEGNYFKIYKYSQLSFSALEKLCLSKDWDLLSNSSLQKAWDKYKNQKKDIEWRCDFHKNWQDKSCTSCKSNEMQMRRSFLKAFKMHILQALEKLKNDEKYKWEDWSYLYWELKQKNSVEDIVSFINQKFYKLEEKYIEQEEVFKLADTWEILLFQVYSKDFNIFNSDFVSDEENLRDYEKDTWESQKTIGTSKREDGKQENLFTTYFKNIFKDDWETFLGQEWGIFFRKADSESDKKRFRSDKFFISLDILFNKGKQNNNAKLCESKEEKSKKHVKNTTLNIFNSIKNKDEITIMWIDRGSLSDELSVKNTKISMLWYVIITLRKEDKQYVLKEIKKSWDINWFIRGKGGGWKIVGKGQNMSSETNAKDYIDFKKILSNLKEEIQKELEKNNVKRNILKIIDKKEWITSLLISAISQLIQEYNVDYIALENLDNIYEDDKSFKKIMEERTLSTYLYQNLEVQLFKKLNYIYLKNEKVQDRQIFPICSIDEVKNLDSKNFFKIKESSNYDDYKMIWNIVFVKTSGTSSTCFNCENTIKKHGVVCKNCKISVKHDGSKLDLKDYKAKFVSKNILEKQNIQQDFNNDARAWLYIAKKAKEYLEYLFSH

SEQ ID NO: 794 - protein, 770 aa, unidentified
  REGION 1..770: note = Description of Unknown: uncultivated organism sequence
  REGION 1..770: note = Category: MG60 effectors
  REGION 1..770: note = Description: MG60-2 effector
LVKESKNNKNIKLFNLAYEWPLLNFVNENYRISNLEKKYLNLVQKLLIDLKDKDYKIWKNHKTWKYNLKNLSFLWDNFGLWDNSENKKIKNLEDLKIYFNDSWYKVIQKDVDLEKILKQVKAWELEIFQIKSKDMPFHKDFINDKNCWIIEEAKNEKSDGFKKDLNTLYFEQFFQDIAEWNKKTRIGADFKIRWINSSENNDYGSFWGKEKNQLRHLSNKENIEKFQNRFKRDRYSIEFSINLNATNHLTEEDFNTELSNKLKEKRETWSLRILSLDHGESSFLTYKIFEFSGENLEDIQIINTWWNFDNFQQEWNWPNRLQKNIQIDEKLVSYEGQEILDNYITKYHLMIQDQKRERQVEEAIKHFAKKSISKIKEIISADTVDKNKEWVSDMTKENVKKFIQYTIGYKEVFSLSNEENSIRNKNKGSNKSIENKKNGVEYSKRIEEFFQNKRLDVISLWEDTIRFDKINIFHILDYEFHFSYIKQEEWFIQKFPDQENIKEKIDTYLKQIQELLHDESKLIAFCNEVKKSFDWVSLADIDKLYNTPFYSYKTNFSLQLEQINNLKKWYVSALIGTISKWVRNWDVDVIALENNLLYYGVDNSKSFQKHMWAENHATFVEALINKLSFCLDKETNESYQFCYPIKVAERSQKFKNKNNGILIFVDEGITSLICPKCGQKLNRSKQDGDDHLHHNDKNPAWDKCQKEPFEIQKSKNIVGEYQGMRFHDWDDLATYNIAKKAKEYLESLPKKEDSEWSWKISGNITFTQSK

SEQ ID NO: 795 - protein, 1122 aa, unidentified
  REGION 1..1122: note = Description of Unknown: uncultivated organism sequence
  REGION 1..1122: note = Category: MG60 effectors
  REGION 1..1122: note = Description: MG60-3 effector
MEDLKNLFEVKKTVRFELKPYIETRKYLKWNNDYSTLNSYISHIKMEEFEKWFDWNEFCKSQYSDFLDKTEYISEFLEEVINELNKKNNDKKRKSIQFNFKWFKWVFKNIPSLKNIESFPRLKEKIEEMTESYKSSITFFDFKKDNDDKQSNQKQSDVSKELRKLAYLNRNFLTIFKYLWSNNGNETDEGILKKYEEVKNKLWENFKKLNSSIIASHQNETSGACIWKYTLNKYSLFRRETRKLKEKSRKSKKAIDKDVDFIIKNWIYDDKWFEIKLKKEDITNITLKTDFSDNFEKHIESLWLQYKLENFNFNRSLDEVIEELDLINAQLLNTYITYFKEEYEEFWESLLDIEFQTEFKIDNEWNNKPFNIYNNKSKPPKIRKLWYFSNEEGKYITLNQWQTLEWYEYLNLLDLEQKDLTDEEKYQKKLANKFLQIIFKQDFINRDYNNIKQFRDKLSKYRGKLRQDVKNSEREFISEGMIRYFWSILEKDWNYFLALTEKVDINWENKIDSIENIEIENTLNDNCIEWYFKIYKYHQLSFSAIEKLCLLKDWPDADNEKLIKYWDKYKYQKKDFKDYKDKSDFLSLFKKQIIDLVYLLKSDNKYNWYDFSSFLPKIEKFNSVEQIIEFIDHNFYKLEEKYISEEKLFKLADNKDILLFQIYNKDFNIYDEIFLSNEENIKEEKYSEKRKLLEIIDRKKDAKPNLFTLYWKDIFKNEAFLGQEWGVFFRKADLEKEEKRFRNNKFLVSFDVRFYKWKTIWDVKICDKKAQKTEKSYKKITLNYFNEIINKDKITILGIDRWSISSAINEKTKIAMLWFCVITLKKEKSNYILEDIVRTWDINWLIKETIKERNVNYIEFWKPVKKASGIKIDIDFKNVLLELKNNIMQEIEKKWQDRRDLQRILDKKIWLTSFLVNEIQKVIVEYDVNYVALENLDNIFNSTNKISFKKELEINTLSNYLYQNFETQLLNKLQLFTTKTNYNNKKQFIPNFKIDELKELPSNNWFLHTKTWKTIEHDFKDFKILWNTIFVWTAGTSSECFNCWEKIKKHWLICKNCNIDDRLKLKDYQENFVSKSILQNMDLQSDSKWKKLFNNDVRAWLVIAKKAKEYLEFLEKQKNNNS

SEQ ID NO: 796 - protein, 1165 aa, unidentified
  REGION 1..1165: note = Description of Unknown: uncultivated organism sequence
  REGION 1..1165: note = Category: MG60 effectors
  REGION 1..1165: note = Description: MG60-4 effector
MLQFADLKKKQITICQKLIPIGKTRENIDTFNAMANDEYVSDNKNEIKKLIKEMARFEIDEKLSNIKGSLDFTNLFTLMNKVDESENKEEILQELFFERAALAKTISSELNFKYTSAKTITEKLPKFISNNYDGDEKEKYLELVDKVKSRQAMFNRFEESIDFIAGELIKKNTLVYRLLVENSQIFLSNYKRIKEQDISSIITNLDVDDSIKTVLQNQCISFTPDNYNELLTQAKIDKYNYCISMINSELNVFCSVNKLSYSSYELKKLYKMILCEKDLLFEKINKFTDDEQVIDTYNDFITNVNDSNLFEKINSSAMDYDNIYIRPNFINAYSNITYGKWNIVSDCIKAHVEDLRLAGKNKITYEKYVENISIVKIDTIVNDYSSELGVKVNGRDYIEIIKEQLLHKYKEVTNDNISLKSDASIVSETIRKELDYALGTIRLLKLFDFENENFNSANEMALNEILDTLNPANLLYNMARNYITQKPSQKSKLNLVFDTNGFAGGWSESVESQKRVTLLKDDEGNKYLGIYNLNGCRANNTSVAAVVKNIQENLDTNSTKYYEKMIYSAVPDAAKDIPRLFINKSENNELIKKFKNKEHKENEEFKNELIEFIKRQIALHPTWSKYEFVYKDNYGSYKDFCNDINKQGYMLNWEKIDKSIIDNYVESGCIYLFRIHNNDYSKYKKTYSKVKAHTQYLDYLFSDENSKTKLIKLLGGAEVFYREPQIKNPYMHKKGSVLVNKKYKNGSPIGNEYKDLVIKAQTTALDNVFTKVSSRYIVKDNRYRKEQFELHFPILIGEERATDYEKICKNYIKNSNHTIVIGRGKNHLLYVSIYENNKVINAFPLDTVNGTNFKAKLEQIEELKNEQRKTWKNISSNRELLNGYVSAAIAPITDMVLKYKATVVIEIGDSSSKSRNLLPNRAYKIFKEALMKKLAFLTDKNKEMDEPGGLLHPYHLVNIDTRNPNRSINAAQNGIVMQVPAFYCALTDPESNLCNLTYAKTLKEKKQVLKKIGEIKYNKDEDIFTFIYDISKFNKDMKGVYECNSNGLRLIYNNNSEEKINLSQYLKNMLQCKSIDYKSGIINYDSEDKESIEAMFLIIRYTLQMLNKTFYISPVTNLTVQSNDCTESMINQNMYNRFLLLKDNLLLNKPTKYLSIKDVYSKLKP

SEQ ID NO: 797 - protein, 1165 aa, unidentified
  REGION 1..1165: note = Description of Unknown: uncultivated organism sequence
  REGION 1..1165: note = Category: MG60 effectors
  REGION 1..1165: note = Description: MG60-5 effector
MLQFADLKKKQITICQKLIPIGKTRENIDTFNAMANDEYVSDNKNEIKKLIKEMARFEIDEKLSNIKGSLDFTNLFTLMNKVDESENKEEILQELFFERAALAKTISSELNFKYTSAKTITEKLPKFISNNYDGDEKEKYLELVDKVKSRQAMFNRFEESIDFIAGELIKKSTLGYRLLVENSQIFLSNYKRIKEQDILSIMTNLDVDDSIKTVLQNQCISLTPDNYNELLTQAEIDKYNYCISMINSELNVFCSVNKLSYSSYELKKLYKMILCEKDLLFEKINKFTDDEQVIDTYNDFITNVNDSNLFEKINSSAMDYDNIYIRPNFINAYSNITYVKWNIVSDCIKAHVEDLRLAGKNKITYEKYVENISIVKIDTIVNDYSSELGVKVNGRDYIEIIKEQLLHQYKEVTNDNISLKSDASIVSETIRKELDYALGTIRLLKLFDFENENFNSANEMALNEILDTLNPANLLYNMARNYITQKPSQKSKLNLVFDTNGFAGGWSESVESQKRVTLLKDDEGNKYLGIYNLNGCRTNNTSVAAVVKNIQENLDTNSTKYYEKMIYSAVPDAAKDIPRLFINKSENNELIKKFKNKEHKENEEFKNELIEFIKRQIALHPTWSKYEFVYKDNYGSYEDFCNDINKQGYMLNWKKIDKSIIDNYVESGCIYLFRIHNNDYSKYKKTYSKVKAHTQYLDYLFSDENSKTKLIKLLGGAEVFYRKPQIKNPYMHKKGSVLVNKKYKNGSPIGNEYKDLVIKAQTTALDNVFTKVSSRYIVKDNRYRKEQFELHFPILIGEERATDYEKICKNYIKNSNHTIVIGRGKNHLLYVSIYENNKVINAFPLDTVNGTNFKAKLEQIEELKNEQRKTWKNISSNRELLNGYVSAAISPITDMVLKYKATVVIEIGDSSSKSRNLLPNRAYKIFKEALMKKLAFLTDKNKEMDEPGGLLHPYHFVNIDARNPNRSINAAQNGIVMQVPAFYCALTDPESNLCNLTYAKTLKEKKQVLKKIGEIKYNKDEDIFTFIYDISKFNKDMKGVYECNSNGLRLIYNNNSEEKINLSQYLKNMLQCKSIDYKSGIINYDSEDKESIEAMFLIIRYTLQMLNKTFYISPVTNLTVQSNDCTESMINQNMYNRFLLLKDNLLLNKPIKYLSIKDVYSKLKP

SEQ ID NO: 798 - protein, 1174 aa, unidentified
  REGION 1..1174: note = Description of Unknown: uncultivated organism sequence
  REGION 1..1174: note = Category: MG60 effectors
  REGION 1..1174: note = Description: MG60-6 effector
MNNLVKEQMAGLNKKTLTICQKLIPVGKTRENIDRFKAMEEDEFIKANREKVNVLIKKAAFEKIDNDLGSISKDIDFSDMFDLMGKYLECEGEGIEEISDKLFAERINLSTKLTSVFDFKFEGKDTIKVLLPEYLEKHDMDNKEELLELVEKVKSRQSMFNRYEGHIDSMLENVHKKGKFVYRILYENAIIFYNNIKKIKAFDYESVILNLEDEKNIKNNFLTKGFDSYNGFIRQSQINVYNYCVGAINYELNNYCQKNKLNYDKLELKKLNKMPLAETESFFEKIPTFDKDSDVIDAYNSVVCNINKEKITLDDKKAKSDEIIIKGSSIAKYSYNVYGNWKIVRDCLQLHCSDMVTAAKLKKSEKTLYDEYVNEGISVNLIHNIVTEYAPDLNISCTEVPLTQKIDTLMSGSFSECDYPKVSLKMNDCKEANYIRVTLDRILEARRLLCIYNTESVEFDMEFAELIESYLDILSPAILLYNMCRNYILAKPSARKKTSLTFNCTAFAQGWSEGVEYSKRVSLFKDEKENKYLAIYNALGCKESNMSVTGLVSEIYDNMTTEKQDDCYMKLVQNKTGNVSQALPRLFLNPTLSDEDRARFKAKEYNNDKEFLNHIINVVKTKIAEHETWKKYNFSFKDNYESYAEFVNDIQEQGYKTEWRYIKKSIIDDYVDGGMIYFFRIYNQDYSEFKSSDKLDIQTRYLNYLFSEENCDTDIVKLLANAEVFYREPQITNPYVHKQGSILVNKHYKDGKTVGVEYESIVKNIGDYNNVITKVAKHDIIKDKRYTVEQFELHMPLCIDNIRKETKKYDELSRKYIKESKNIITITKSRNHLLYVCVFDEKRNLLEQRSLDIANNVNYKEKIEIKEELKKINMESWKSVGSNQTIIEGYISCAIKDITDLVLKYDAVVVMEEESANADRNLLKNRNYKKFKTALINKLCYLVDNTKEDFEDGGTFKPYNLCNIEKEKDYKKIWNGIVIQVPAYYLSNKDVDSNFIELADTFANTNIQKKNVVKKFSDLRFNRNTKLFELKFESAKFKEDFKEVFICDSSGNRIVQNKKGVNEVNLTGTIKSELKKIGLEYATGENIFDYVDLKNKNHVTTLHKIIRLILQMYNVGANNSYFYSPVSHSLIRTDKDIYEVITCINLYERAMRVKKKISKDGKVKFKNLADIVIG

SEQ ID NO: 799 - protein, 1035 aa, unidentified
  REGION 1..1035: note = Description of Unknown: uncultivated organism sequence
  REGION 1..1035: note = Category: MG60 effectors
  REGION 1..1035: note = Description: MG60-7 effector
VKDSEIWYAIKIVSKLIIDNDFIKKDTELHNRLSQINRYNPNFWNFFELNTLNPFTVNRWKISEIINSYEISLNQYKETLVNLNKEAYTIANAILSDRYFENCRNQKESDGTVRYLFHIFSNCKNSSEKNVWQINHLILLVNKYESLKNGKKKYTNDEIELKIKRLNKELRQLAKVRSELLWYQIHLIDNFQTEKFSFLIQSWKYYFVWMKKMWWENNLSQFQEFIDGLESGDDKLLYLDSMTWGGFKRLFLSKQSDVVFTDGIRIKDLNRTILAKEEEILQLKKWIIEKIEKDINIYISKVTNDIFNEINSKEKIKFIEYLSQKWKKVDNLFKLWKKNRKQLIYGKELKEFGNSLYNFDSIKEQFNLDKLEKEYSDLVQKLLIKIKDKKYEIWKNNFKSLSFLWDNFKDRKFENLDDLKNYFNDSWYKVIVKNVNLEKILKQVKAWELEIFQIKSKDMPFHQDFINDKNCWIIEGVKTEKGGSFKKDLNTLYFEQFFQDIAEWNKNTRIGADFKIRWINSSENNDYKSFWKKEKNQLRHSNNKENIEKFKNRFKRDRYSIEFSINLNATNHLTEEDFNTKISNKLKEKRETWSLRILSLDHGESSFLTYKIYQVEGNKYSIINQWWNFDNFKEVQDWEDKTTKRQENMQIDEEKVLYKDQKILDSYITKYHAMIQDQKRERQVEEAIKHFARKSISKIKEIISADTIDKNKEWVSDTTKANVKKFIQRSIDKTWNKEKDSIVSVLGKFYFDYNKYSFKKYFPDQENIKEKIDTYLKEIQELLDDESKLIAFCNEVKKSFDWVSLADIDKLYNTPFYSYKTNFSLQLEQINNLKKWYVSALIGTISKWVRNWDVDVIALENNLLYYGVDNSKSFQKHMWAENHATFAEALINKLSFCLDKETSESYQFCYPIKVKDRKKLKDKNNGILFFVDQDTTSLICPQCEGKLKRDKADWEDYLYHNDENLAWDGCEEDPFEIKKSEGKKWEYNWIIFENWDDLATYNIGRKGVLMLEKIKENPEETDLLIRDNDWDGLVK

SEQ ID NO: 800 - protein, 1189 aa, unidentified; identical to SEQ ID NO: 690
  REGION 1..1189: note = Description of Unknown: uncultivated organism sequence
  REGION 1..1189: note = Category: MG60 effectors
  REGION 1..1189: note = Description: MG60-8 effector

SEQ ID NO: 801 - protein, 1144 aa, unidentified
  REGION 1..1144: note = Description of Unknown: uncultivated organism sequence
  REGION 1..1144: note = Category: MG60 effectors
  REGION 1..1144: note = Description: MG60-10 effector
MDKYQLTRTIRFKLKRFNGALQTEVDIAKKSTSDQELEKLLEELSMNMNSYNQRWSDFLYKLHEGKKNRRILNRIQVTPKWLELYARPFLYHKTSRPKHGKPLLTDYHGLPDYIENRLEEWQHLRETLDKLRTRPEHHQARRSEYALLIEKINIPQNFPFFYALADYAQDKDNEKYKNELIVIGERIYSLLSSLRKAYAPAQHTGIEIARASLNYFTINKKPKEYDDEIEQWLEEQNQEYTLADIKSKLSLNPIIIKPDIRDSLPDKATLGEWYSHLKTFKAEQRSALDNCMITSKSIEEWPILFKKINTNKAKELISLTSKITSNANKINNLYQILNDKKKSKRAKDVADKELKTIRNNQIQIKRKRGSIISKAPDFKNFVDAYATIAKENGKIKAKIRGLKKERQDSQLLNYWALLLENCKRHELLLIPRKNRKKVYKILEKLPKTNDKGEASVIYFKSLTLRALHKQIFSEDSTLKQNVVQQLKHDFPEMEGAYSMKDWEESKVVSLYQKVLKYCNDGTLSIDVGDFNIEELVSSSYSTIDKFRIALEKQCYIKRCLIDKSLYQELREREEFHLLSIESKDLNSSKPIQAMNEHTQLWKQFWSADNSKEFFPIRLNPEIKIRFREPKDTRIAKYRKKSGKYEKESGNYNPKKKNRYLHDQLTLEVTISENATGLRQELAFTKPHGLKEALDEYNQSFNKSYYPRNKLDDICFFGIDRGHTELATLLIIKKPNDNQASFQKFTTYRLIDLSHSRNYTTPERVEKTKYAKNNISDFIPDIENEDIFEKRETASLDLTTAKLIKGYIIENGDVNSYLNLKMLSAKRRIWEKHSISKIPEDISISLDQETGYFRFDTEIEEFKNPRKLYYFREELSDYLSEEDIKKELNSYLNKLRTKNQERDLLTLEKINHLRDAISSNITGILAYLLRKKEFIPGILVLEDLNTRLLESHFKDKSNEILGRRLEWKIYNKLSKMNLAPPQIKESTLLREDKKYKVKQFGSVLFVDETGTSNECPNCNKKPTDNFKEKSEKDEQKRLFELNKFQYKKYHCYHCGYDTKTNQMEFTDINNPDDLACFNIAKRGYEYILNPPKPKKTILKKTYSPKGKKQQGRKQAKNPPRTRKKPNKAATHNPFANLKDMMKKDN

SEQ ID NO: 802 - protein, 1143 aa, unidentified
  REGION 1..1143: note = Description of Unknown: uncultivated organism sequence
  REGION 1..1143: note = Category: MG60 effectors
  REGION 1..1143: note = Description: MG60-11 effector
MKTFAYKQQKSLTFGLVTKKNDPFIKDKKNNFTIQCREQEIKFNCDAGDRIYGDNLGGLQRIFHYMQNILHTIFTKEPYHRFTFSYEFTLVERKKLQTGRIAEKALKDKIWRKYEKQFQNLLNNISLFDEILEENENNFSKISHIVRIIRYINGDTQKIEHCISNYTYFGDKIEKKSALEEFKNFIQKNGDFGELLEFYSKLDKEQFEEYKIALNPVILNTHSEVNQQNWTQELDNLKMSLEALERKNNFNKNTKRFFEEDLEAYINYILYQKNFFKQSKNVEYKKNTQRIYEKYSNLSSNARYPEELVIDFIEGNEIDLENPYKVAQEELDKYLQQQESINSLKNLKSNINFVQLKTFLYQLTWKRAEIKENNKKSEEKLDYQKLSEYIVIIKGEINSRLKNTNYRYGEFIKSGGIKAQTAQKLGQKYGEYMQKLNFDKELKGYTHFGFIVKKGKRFFIKPYKKQDILNENQGFTLQNAENLLKEKVDVKGEYTAFLFQSLTLKGLLKLIFIKNAFNLDFRKEYKEIYQIWKQKKYIKDKSQSTKLIDFLIKILASNKGKELFPYVDNDFKKGDQYSKFQEFEKDLLKNSYKVKKYQCNFDENELIELDIVDRKFEYNDAVEPRLKRQNDIQILVEGFFSKQNFSFTRLLPEIKIFVRYQKLFDDMKKRVVSGMDNNGDKYKKEINEKKRFYKSVSKASFMLELNPCEIAGNPQKEKKEYQDYIIDLYKKRKDFHIISIDIGENSFATLGVYNSDLAPQKINVKWLPQQNENQNKDIIDITDLKIEKGEIVQINTKNSEKYKSYKNMFENILRSQIYLKDILEQVGEIDLKNENYNNIAKKIGESINRISELRFNTCNIIDEVKQAFPLLKNGLKQFLFSYIKSLHNGQDKAINITQYYHQIFEKLELQKVINFKDAFGANFVGVMKEILNRYPGIIVFESLHIGNNYDSYNDVIKKRLQNTTSEKSKEFRTFGTYIGMYIVQSLVNSFSKIIDIKNEKVNQLIYWEKNYETTIGKEKYSNNGILFFVDEKNTSSVCPICNGNFIQKIEKNGEVIEQENKYIKKLFGHGRGKEFENSMHHINDENDENYQKGKWKSGNLEKGDCDYHIGNKNYPEFEFIKSGDDLATYNIAKKAKEYLEKKQ

SEQ ID NO: 803 - protein, 1174 aa, unidentified
  REGION 1..1174: note = Description of Unknown: uncultivated organism sequence
  REGION 1..1174: note = Category: MG60 effectors
  REGION 1..1174: note = Description: MG60-12 effector
MQNYKITKTIRFKLEANPEQTEALLNQVEKSNQAFDLVFFTSKLKNFADGMRDYLMFQKGKEPEKWQFRKNFTIKKDWLKVYAKEELANIKQKQKEEQDKKSRRQPIQLNEGAKEIIQKSLGEVYAIYQELIQDVSKELNERARRERTGLLLKRLQEKNNLPLLCDLTEHISSGNETDNSIYELLKEKEMLQKELLQGIAEFLPAQSSGLPIAKATFNYYTINKKPTDYAQKIEEQLKELSISDYSKKIQINSKLFLGNDNFKKVMEDIRNRLKKDNITHLLFGHVPASISLGYEYRSLRQILKNIKAEQKKKFNELMMEDDFTYDKLKKEQDLYLFTSIKKEQFDEYLDKTRKIQELADKINDKSLSKEEKENLTSKKQTIAKKRGELLRDKFIDWKKFMEIYRSVAQKHGKILASLKGIEKEKVESQLLKYWALILKVNAQYKLVLIPRDKVQDAKKWIENHKNNKKTDTQELPQLYWFESLTFKSLQKLCWGHAETDNNEFRKNIISIIPKNKNNKPYTGEHEFEGKEQDKINFYKKVLQDKYTRDVVHLPFAQIDKEIISKNFDTLEDFKITLEKICYRRQVILNQDAEETLTKQFKAQILNITSLDLSRKSNESALKPHTQIWKNFWSDSNEKQHFDIRLNPEITITYRKPKPSRVHKYGKNSQNYDEKKKNRYLNPQFTLVTTMSEHCNAPQKNLSFITEEELKKEIDTFNQKFREKNQIKFAIGLDNGETELSTLGIFVPDFNKNTNEERLAQLRKVQEYGFEALTIKNLNYAERDYNGNPRKMIDNPSYFLNKSLYMRTFIKTEQEYERMFAEQFEKKHLLSLDLSAAKVICGHIVTNGDTRALFNLWMRHAERLIYFANDHIKEETAKKVLIKTIQELLPAEKEKLAESISKEKKYAKLSEQEKLRYFTWLFEDRKLYSFNEEENKKFNDILERKGNYAIGTVFSVTYLGEELVDVKSVFDIRLIFKKREEFYSILSEEEIMKELSRYNTNRTSHDLSNQELDLKLKTYKETIVANAIGVIDFLYKQYKQRFGGEGLIVKEDFDTSKIQEDLERFSGNIYRILERKLYQKFQNYGLVPPIKSLLSLRNQKVALDSIFNLGVVSFANPDKTSQQCPVCLEGKLYHGKKCDKCGFRATMMHSNDGIAGYNIAKRGFNNFQSLLPLKQ

SEQ ID NO: 804 - protein, 1147 aa, unidentified
  REGION 1..1147: note = Description of Unknown: uncultivated organism sequence
  REGION 1..1147: note = Category: MG60 effectors
  REGION 1..1147: note = Description: MG60-13 effector
MKTFAYKQQKSVTFGLIGKEGNPFVKEKKNNFKIKYREQEINFNCDARDRIYGDNLGGLQRIFHYMQNILHMIFAKEPYHRFTFSYEFTLVERKKLQTRRIAEKALKDKIWRKYEKQFQKLLNNISLFDEILEEKEDNFSKISHIVRIIRYINGDTQKLEHCISNYTYFGDKIEKKSALEEFKNFIQKNGDFGELLEFYSKLDKEQFEEYKIALNPAILNTHSEVNQQNWTQELDSLKRSLEALERKNNFNKNIKRFFEEDLEAYINYILYQKNFFKQSKNVEYKNKTQRIYEKYSNLSSNARYQEELVIDFIEGNEIDLENPYKVAQEELDKYLQQQESINSLKNLKSNINFVQLKTFLYQLTWKRAEIKENNKKSEEKLDYQKLSEYIVIIKGEINSRLENANYRYGEFIKRDGIKAQTAQKLGQKYGEYMQKLNFDKELKGYTHFGFIVRKGKRFFIRTYKKEDILNKNQGFTLQDAENLLKEKRDVKGEYTAFLFQSLTLKGLLKLIFIKNAFNLDFKEEYKIYQIWKQKKYIKDRFQSTKLIDFLIKILTSNKGKELFPYVDNYFKKGNQYSKFQEFEKDLLKNSYKVKKYQCNFDESELIELDIVDRKFEHNDAVEPRLKRQNDIQILVEGFFSKQNFSFIRLLPEIKIFVRYQKLFNDMKKRVVSGIDSNGDRYEKEINEKERFYKTISKASFMLELNPCRIGGTPQKEKKEYQDYIIDLYEKREDFHIISIDIGENSFATLGVYDRDLMPKKIDVKWLPQQNENQNKDIIDITDLKIEKGEIVQTNTKNSEKYKSYKNMFENILRYQIYLKDILEQVGEIELKKENYNNIAQKIEESINRISELRFNTGNIIDEVKQDFPLLKNGLKQLLFSYIQNLHNGQDKTINITQYYHQIFEKLELQKVINFKDAFGANFVGVMKEILNRYPGIIVFESLHTGNNYDSYNDVIKKRLQNTTSEKSKEFRTFGTYIGMYIVQSLVNSFSKIIDIKNEKVNQLIYWEKNYETTIGKEKYSNNGILFFVDEKNTSSVCPICNGNFIQKIKKNGEVIEQENKNIKKLFGHGRGKEFETSMHHINDENNKNYQRGKWKSGNLEKGDLCDYGIGNKNYPEFEFIKSGDDLATYNIAKKAKEYLESLSKKED

SEQ ID NO: 805 - protein, 1092 aa, unidentified
  REGION 1..1092: note = Description of Unknown: uncultivated organism sequence
  REGION 1..1092: note = Category: MG60 effectors
  REGION 1..1092: note = Description: MG60-14 effector
MLENLTNLYEVIKTLKFELKPSKFTLKRCDFDRAFEADPHALFEKLSSVHRFQEQILDLLKTSSKKIVIHKNLIKLIDADYFYQLKSKAISSNNTIAVLSQDFQEEFFNYIKEKFNRLHSTNYSLDYLLWADYLENPTTIDKKPTKSEIAFATKRYVHAIEKVEEILSNLIYKTNIDREIESLLANYYNNQDLKPLLKVAKSYLQSYSPTSFQVSKFGFNAKAIQKKVDVEKMEQEISLEKKMLDLEEKKIIATQIFDDYAKKFVQEKIKSDPKLLALRENQTASLDEIKRAKEYLKYLKEDFDYQKILKERSKARKEKRDSMIKFTDREYCELKLAKTDASVVYGRAKQAFFAKQQELYSQQALTHYARILRSENYFVAMIDRDDVSFLERLTNDKVNNEKFEILRYASLTARAVEKLIFEKNALKFNIYDKEYKECKMIREKRSYKEKNEDSRSKNEKQKENLKKLVLFLNSAIEQLNKKLEIFDWKPFLINDFDNFSEFQKYITENCYIARREAIDKQTIYDLDQKKLNFYQIFNKDFSVDPYCATTERDRSSTIKNINLQSKKNLFTLYWQSLYTENSTIRLNPESNLYFRPSRVRTEIDLCNDCEASKLRYRQNKIIGDFQLVFYPTKELPFDQLQQKILKNSEKSYAIGIDLGENSLATICLVDNEKKVVLDGNNKPIIKDLSMINNKDFVEVEDCFIDKPYERKQKLLIGTETKPYMLGRHFPKHLQNKVIAEMSQDMLFEVLQILESLAPEKLIVDKQNKVFDYNYAFEHLKAINKIRYHLQVFNHTNDEMRILEKDLLASIKIRFVKIVSYITQMAKKYNAIIVFENLDQEIGRIKRYLFSEQSYAKVSPKEERMYKGISPYQLMQDKIIQKCNYLLTKQEIKGMQISPRLKRQEDIKQLTLLKDKNCAWGKIIFVNEEDSSKECPNCGFVPKYSSNINIKDDIELMANKKDKKVFSFAGNQLLSERREAYQKISDIDKKKALLIETRVKTFLKSYMDIQGDPMICVNCGYDTRKTKRVEKYNLKSCDEIAAYIIAKRLEFMENKYKTQEVSISVGDSYNKPSDGEQDDSCVSGVKLSNISFS

SEQ ID NO: 806 - protein, 341 aa, unidentified
  REGION 1..341: note = Description of Unknown: uncultivated organism sequence
  REGION 1..341: note = Category: MG60 effectors
  REGION 1..341: note = Description: MG60-15 effector
MFENILRYQIYLKDILEQVGEIELKKENYNNIAQKIEESINRISELRFNTGNIIDEVKQDFPLLKNGLKQLLFSYIQNLHNGQDKTINITQYYHQIFEKLELQKVINFKDAFGANFVGVMKEILNRYPGIIVFESLHTGNNYDSYNDVIKKRLQNTTSEKSKEFRTFGTYIGMYIVQSLVNSFSKIIDIKNEKVNQLIYWEKNYETTIGKEKYSNNGILFFVDEKNTSSVCPICNGNFIQKIKKNGEVIEQENKNIKKLFGHGRGKEFETSMHHINDENNKNYQRGKWKSGNLEKGDLCDYGIGNKNYPEFEFIKSGDDLATYNIAKKAKEYLESLSKKED

SEQ ID NO: 807 - protein, 1123 aa, unidentified
  REGION 1..1123: note = Description of Unknown: uncultivated organism sequence
  REGION 1..1123: note = Category: MG60 effectors
  REGION 1..1123: note = Description: MG60-16 effector
MLENLTNLYEVIKTLKFELKPSKFTLKRCDFDRAFEADPHALFEKLRSVHRFQEQILDLLGKTSSKKIVIHKNLIKLIDADYFYQLKSKAISSNNTIAVLSQDFQEEFFNYIKEKFNRLHSTNYSLDYLLWADYLENPTTIDKKPTKSEIAFATKRYVHAIEKVEEILSNLIYKTGNIDREIESLLANYYNNQDLKPLLKVAKSYLQSYSPTSGFQVSKFGFNAKAIQKKVDVEKMEQEIGSLEKKMLDLEEKKIIATQIFDDYAKKFVQEKIKSDPKLLALRENQTASLDEIKRAKEYLKYLKEGDFDYQKILKERSKARKEKRDSMIKFTGDREYCELKLAKTDASVVYGRAKQAFFAKQQELYSQQALTHYARILRSEGNYFVAMIDRDDVSFLERLGTNDKVNNEKFEILRYASLTARAVEKLIFEKNALKFNIYDKEYKECKMIREKRSYKEKGNEDSRSKNEKQKENLKKLVLFLNSAIEQLNKKLEGGIFDWKPFLIGNDFDNFSEFQKYITENCYIARREAIDKQTIYDLDQKGKLNFYQIFNKDFSVDPYCATTERDRSSTIKNINLQSKKNLFTLYWQSLYTENSGTIRLNPESNLYFRPSRVRTEIDLCNDCEASKLRYRQNKIIGDFQLVFYPTKELPFDQLQQKILKNSEKSYAIGIDLGENSLATICLVDNEKKVVLDGNNKPIIKDLSMINNKGDFVEVEDCFIDGKPYERKQKLLIGGTETKPYMLGRHFPKHLQNKVIAEMSQDMLFEVLQILESLAPEKLGIVDKQGNKVFDYNYAFEHLKAINKIRYHLQVFNHTNDEMRILEKDLLASIKIRGGFVGKIVSYITQMAKKYNAIIVFENLDQEIGRIKGRYLFSEQSYAKVSPKEERMYKGISPYQLMQDKIIQKCNYLLTKQEIKGGMQISPRLKRQEDIKQLTLLKDKNCAWGKIIFVNEEDSSKECPNCGFVPGKYSSNINIKDDGIELMANKKDKKVFSFAENQLLSERREAYQKISDIDKKKALLIETRVGKTFLKSYMDIQGDPMICVNCGYDTRKTKRVEKYNLKSCDEIAAYIIAKRGLEFMENKGYETQEVSISVGGDSYNKPSDGEQDDSCVSGVKLSGNISFS

SEQ ID NO: 808 - protein, 1123 aa, unidentified
  REGION 1..1123: note = Description of Unknown: uncultivated organism sequence
  REGION 1..1123: note = Category: MG60 effectors
  REGION 1..1123: note = Description: MG60-17 effector
MLENLTNLYEVIKTLKFELKPSKFTLKRCDFDRAFEADPHALFEKLRSVHRFQEQILDLLGKTSSKKIVIHKNLIKLIDADYFYQLKSKAISSNNTIAVLSQDFQEEFFNYIKEKFNRLHSTNYSLDYLLWADYLENPTTIDKKPTKSEIAFATKRYVHAIEKVEEILSNLIYKTGNIDREIESLLANYYNNQDLKPLLKVAKSYLQSYSPTSGFQVSKFGFNAKAIQKKVDVEKMEQEIGSLEKKMLDLEEKKIIATQIFDDYAKKFVQEKIKSDPKLLALRENQTASLDEIKRAKEYLKYLKEGDFDYQKILKERSKARKEKRDSMIKFTGDREYCELKLAKTDASVVYGRAKQAFFAKQQELYSQQALTHYARILRSEGNYFVAMIDRDDVSFLERLGTNDKVNNEKFEILRYASLTARAVEKLIFEKNALKFNIYDKEYKECKMIREKRSYKEKGNEDSRSKNEKQKENLKKLVLFLNSAIEQLNKKLEGGIFDWKPFLIGNDFDNFSEFQKYITENCYIARREAIDKQTIYDLDQKGKLNFYQIFNKDFSVDPYCATTERDRSSTIKNINLQSKKNLFTLYWQSLYTENSGTIRLNPESNLYFRPSRVRTEIDLCNDCEASKLRYRQNKIIGDFQLVFYPTKELPFDQLQQKILKNSEKSYAIGIDLGENSLATICLVDNEKKVVLDGNNKPIIKDLSMINNKGDFVEVEDCFIDGKPYERKQKLLIGGTETKPYMLGRHFPKHLQNKVIAEMSQDMLFEVLQILESLAPEKLGIVDKQGNKVFDYNYAFEHLKAINKIRYHLQVFNHTNDEMRILEKDLLASIKIRGGFVGKIVSYITQMAKKYNAIIVFENLDQEIGRIKGRYLFSEQSYAKVSPKEERMYKGISPYQLMQDKIIQKCNYLLTKQEIKGGMQISPRLKRQEDIKQLTLLKDKNCAWGKIIFVNEEDSSKECPNCGFVPGKYSSNINIKDDGIELMANKKDKKVFSFAENQLLSERREAYQKISDIDKKKALLIETRVGKTFLKSYMDIQGDPMICVNCGYDTRKTKRVEKYNLKSCDEIAAYIIAKRGLEFMENKGYETQEVSISVGGDSYNKPSDGEQDDSCASGVKLSGNISFS

SEQ ID NO: 809 - protein, 1123 aa, unidentified
  REGION 1..1123: note = Description of Unknown: uncultivated organism sequence
  REGION 1..1123: note = Category: MG60 effectors
  REGION 1..1123: note = Description: MG60-18 effector
MLENLTNLYEVIKTLKFELKPSKFTLKRCDFDRAFEADPHALFEKLRSVHRFQEQILDLLGKTSSKKIIIHKNLIKLIDADYFYQLKSKAISSNNTIAVLSQDFQEEFFNYIKEKFNRLHSTNYSLDYLLWADYLENPTTIDKKPTKSEIAFATKRYVHAIEKVEEILSNLIYKTGNIDREIESLLANYYNNQDLKPLLKVAKSYLQSYSPTSGFQVSKFGFNAKAIQKKVDVEKMEQEIGSLEKKMLDLEEKKIIATQIFDDYAKKFVQEKIKSDPKLLALRENQTASLDEIKRAKEYLKYLKEGDFDYQKILKERSKARKEKRDSMIKFTGDREYCELKLAKTDASVVYGRAKQAFFAKQQELYSQQALTHYARILRSEGNYFVAMIDRDDVSFLERLGTNDKVNNEKFEILRYASLTARAVEKLIFEKNALKFNIYDKEYKECKMIREKRSYKEKGNEDSRSKNEKQKENLKKLVLFLNSAIEQLNKKLEGGIFDWKPFLIGNDFDNFSEFQKYIIENCYIARREAIDKQTIYDLDQKGKLNFYQIFNKDFSVDPYCATTERDRSSTIKNINLQSKKNLFTLYWQSLYTENSGTIRLNPESNLYFRPSRVRTEIDLCNDCEASKLRYRQNKIIGDFQLVFYPTKELPFDQLQQKILKNSEKSYAIGIDLGENSLATICLVDNEKKVVLDGNNKPIIKDLSMINNKGDFVEVEDCFIDGKPYERKQKLLIGGTETKPYMLGRHFPKHLQNKVIAEMSQDMLFEVLQILESLAPEKLGIVDKQGNKVFDYNYAFEHLKAINKIRYHLQVFNHTNDEMRILEKDLLASIKIRGGFVGKIVSYITQMAKKYNAIIVFENLDQEIGRIKGRYLFSEQSYAKVSPKEERMYKGISPYQLMQDKIIQKCNYLLTKQEIKGGMQISPRLKRQEDIKQLTLLKDKNCAWGKIIFVNEEDSSKECPNCGFVPGKYSSNINIKDDGIELMANKKDKKVFSFAENQLLSERREAYQKISDIDKKKALLIETRVGKTFLKSYMDIQGDPMICVNCGYDTRKTKRVEKYNLKSCDEIAAYIIAKRGLEFMENKGYETQEVSISVGGDSYNKPSDGEQDDSCVSGVKLSGNISFS

SEQ ID NO: 810 - protein, 552 aa, unidentified
  REGION 1..552: note = Description of Unknown: uncultivated organism sequence
  REGION 1..552: note = Category: MG60 effectors
  REGION 1..552: note = Description: MG60-19 effector
MEQHNFDFNEKDLVELDMVYRTFEHVKGVEPKLKRNDDFKLFVNGFFDKQDFDLIRMIPETKVFVRYQRNYDEPKKEKRGKKENIIPEERFYNTVIKGAFNFELKPLEADKNIAREKKKILKDILSKYENDDNFYITTIDIGENSLATLGVYDKNLKPQKLEYFSKDGEKITKEILDITNLKIKKGEIIEQDTDFSQKYKAYKYMFENIILWQIYLKEILEAIEEIEVIEQNYGEIKNRIGKAVNGSEIKNFVSKKKDDYDIKYIVGAFPELKEGLNNFLVNFIKKEYEGEKINFAEDKKVYHEIFQKLELQKVVDFKKAFGSNFVGVIKKIFRQYPGIIVFESLHTGDSYDGFNKIIKKKIKKVSSEKSHQFTSFGTYIGTKIVNLLFNKFTKDISENFNKIEQLVILDKNYENSVKLNSKEDKFINNGVLFFVHEKNTSKACPYCNERLTIENKEKGTLENIDDTKNLYGHGKGKEFEHSMCHINDVSDQNYENGKWTSGTLEGGKMCDFRIGNETYEKEFGFIHSGDELATYNIAKKAKEYLDFLKENN

SEQ ID NO: 811 - protein, 1112 aa, unidentified; identical to SEQ ID NO: 137
  REGION 1..1112: note = Description of Unknown: uncultivated organism sequence
  REGION 1..1112: note = Category: MG60 effectors
  REGION 1..1112: note = Description: MG60-20 effector

SEQ ID NO: 812 - protein, 1229 aa, unidentified
  REGION 1..1229: note = Description of Unknown: uncultivated organism sequence
  REGION 1..1229: note = Category: MG60 effectors
  REGION 1..1229: note = Description: MG60-21 effector
MQKTVFNDLKNIFKVTKTIELELKPIDKNNEIMEDKEINEIYGGFINEGCFLDREMPKVKDMIDNTIKRDIDYNLANVKINEDLLRNYYALHVQSISDDNADLLNEAKKKLYSDFGKQFVYNVKEGAKFINFLLSEYSHDETVYNILLPFKGKGTLFDDFIKTRKHIFSNEDKHGTVSFRLLDENINLYIYNIGVFNQALDIITKTSSFNKENANIWSTIEGYNSVLTQSSILSYNASIGEYNMAINEYNSKLGKETKKIPLFKALNKMILSDGESISFYNEVYTNNVAMFKDVRNIYTTLEKSFEKFADTLRGFNNFDLRYVYVSNKSIEGISSKMYGDYSLIGGLLKKNDFSKTESISIDNLNKCLCETDKKFDDYINIVFNWDNNGNSVFKLIKDSFNSLTCLKKGNDEAVLTDEDKVSLNEFMNLINDFKFFIKPFIISDTVLTDDDFYYTLNSLWETYKEYDKVYNKVRNWVTRKPYNDKQYRLYFGKSNLMNGFTHSQNQRQYNAYIFRKKNYIDEYDYYLGVSHNTKLFNETPSSEEDISEFECFNFFQTDNKGFYKIYKSCNNVKYKDEDCPKLFATFNDVIKRYNLSEGASHSKESESLEAYIKRLRNYYSEDFKSLLSIEESRGVYDMVFKHFKNTIAVQASKLSTFENLYKKCDDYTIDLLCEEIEKATKATIKEWTPISKNEMYEARNDINKPLYLMKITNKDLSFAEKLEKGLRQNKRGKDSLYTTYFKKLMNCEDGYKISVGKIFYRPKTEGLNERTFRHKANVAINNKNRNNAKKQSVFPYEIVKDKRFTRNMFKLQLSFDMNSELDSPQKANKIINETVIEKIKNGEIKHILGIDRGERNLLYATLIDFNGNIILQKALDKIGNVDYNELLTYREKDNKLRKKSWQTNGSIKELKNGFLSNAINEIVKIVFEYNAIIVMEDLTNGFKHSRSKVEKQVYENFEQSLTKKLSFCYLKGYNTESNGSRDAYQLSCPKDKIDNNSQNGIIFYVNPSYTSKIDPVSGFINVFNTRYENVKKAISFFEAFDDITYDENNENFIFNADLTKFKNNVTLPSGMKTNWKLSTHGERIRTYCDDKHANHWANENIILSDYFKKTFDELNINYQNNIKEQITSLKEKKDFEKLLDCMKLMLQMRNSIINSKVDYIISPVVDENGNYYDSRRSDGLLPIDADANGAFNIARKGLLTTRNLYNNTKKIMVDKKQWLNFVQNNFCKP

SEQ ID NO: 813 - protein, 771 aa, unidentified
  REGION 1..771: note = Description of Unknown: uncultivated organism sequence
  REGION 1..771: note = Category: MG60 effectors
  REGION 1..771: note = Description: MG60-22 effector
MANKRTDTTINLNKTVIMLTNMLPEVRAMFQAGIRQAQAYADLVNKWICSNLTNKIGEVLLPYIDNKNCVYYELCYKYKEAPLYTIFMKGKFDLNSRNNALYCAVVAQNIDNYSGNIFGFSQSDYRRNGYCKVVFSNYATKMSSLKPSIKKVTINEESTEETIQSQVIYEMFTNGRQWGKPEYFAEHLKYLEMKDNVSDKLMFRMKTLCEYYQTHTDLIDTMAMNAGVEALKQFEGLKLNRDKFSMTITTNSTSPYTLTRVAGTCAYNLHIPCRKRSYDIRLWGNRQTVRWVNGELVDIADIINQHGQTIIFTIKNGNVYVHIPYGLNFEKTEHEIKNVVGVDVNTKHMLMQTSIKDNGWVKGYVNIYKALVEDEEFVKYISKSDLKLYKDLSKYVSFCPLELNLLYTRYLSKKGLPFNEADNNAEKCVEKVLNNLVKQYEGDDVHVVNYIHNVKKLRALCKASFVLYKKYAELQKAFDDAQGYNDQSTETKETMDKRRWENPFIQTREAQELIAKMDNAVAGIIGCRDNIITYAYKVFGDNNYDTVGLENLTTSQFDNYSTVKSPKSLLSYYGLLGQQVDSDKYNAVMTESNKDWYDFKTDGDGNITDITLTAAGEAQKAKSLFNNKVLKNIHFADVKDKFIQLGNNGSIQTVLVPPSYTSQMDSKTHTIYVKETVDPKNKNKKKLKLVDKKLVRHGQEYHKNGLNADINAALNIAYIVENQEMREVMCLHPSKKDGVYDQPFLKATTKYPATVAGILLKMGKTTNWGEK

SEQ ID NO: 814 - protein, 1141 aa, unidentified
  REGION 1..1141: note = Description of Unknown: uncultivated organism sequence
  REGION 1..1141: note = Category: MG60 effectors
  REGION 1..1141: note = Description: MG60-23 effector
MINLENFKNLYEVRKSARFKIVPKKIFKQKEDRGSVYNTEDIVKQYKGIIKDLESILYYENFVPETQPLSNKLWDLFDFSKFESELEENEEISSLKNKESSDLIRIKHAWLQKYFTNDWHENKDSIISKRWDPKRNIEVKMKNWTTIWSVKFLKEFFESFFTDANKYFDVISKLLQVQDFERNRQSDIKLALQTIQWKDHLYKIYQLFEWGYIEHKNDNTSINELQEKLKVFKNNVNNYIENCRINDSFGLPLEYVSLNYYTRRKTQKDYDEEILKKSESLKKKFDWDLWELYWISKELEISDLYNNMKLFKANQKSAFLQLLQSQTPFSKLKNNFEYIDNKWERYSDYKIQLFDDITEENYNEMKDLTFQIEKSDDKKTRKELKEKRWKYFLFYCKKYEKFCDWYFYPKKGEDRKFFNWYKQVAMEFWKRKAEILSLEREKILAERERWYGFLSKDASNNYYINTFDIENTKNAYDFFSNQSQKQWEITYYILSSITLRALEKLCFSKSSNFYKWNIVQKIDGKFLKIQEVTGNKIFKSKRELEEEENLIEFFAEVLRLQNTLWIKFKSEKSLDNLKHCENMSDFEILLKQETYVLDEYKISKEDFEKALEKFKWNSFLIIDKDSDNHNKNSVFSQWWTRFWQKNNTENYILRINPELIISFRKWDTERFKGKISFHRRKNDAYMVSFSFSHFSDKSYITSEFIDDAERKENLKKFNDLYNENVTLEYIYWIDKWTNELVTLWIFKRWKNWLEKVDISEKIPVYRITKKGLKYFEDTETRDSNEKKKRYLSKNVSYFLKDLENNELFEKLDIDSCLWDLTYAKIIKWNIILNADIFTTVNLYKVTAKRFLNDAAFRGKIKNNTVLFDDENKSFYFEYENRWKLQKQNIFYWKDDFDYLPCDDIFQNLKEEVQNELNMYLTSISNEEDISMQRVNNYKNAISANIVWIITELQKHFNGYICYETLDAGQIEKKWFNTFIWNTLNEKIYNKLQLSLEVPPILKKFRTDIWAKETIQHWKIIYVNEKNTSSACPACNKTLLKIDENWILVDKDDKEVFKLFWHLTEFENAMHHINDENDENFQKWKWESGDLEKGGCDYHIGNENYPEFEFIKSWDDLATYNIAKKAKEYLESLSKKVIPQWS

SEQ ID NO: 815 - protein, 1203 aa, unidentified
  REGION 1..1203: note = Description of Unknown: uncultivated organism sequence
  REGION 1..1203: note = Category: MG60 effectors
  REGION 1..1203: note = Description: MG60-24 effector
MKHEITKTISAELKPFGNTNISDLKIYIDKDENLCVQRANAIKVLDERHKAFMSNTINTKLDFTTLESLMQRTGNEKEQNKERKSLCEQLIKFLKSRNEAEFKMLTASTPSKLINCIYKADNTIECLAPFANFSTYLSDYNTARKNIYAENNTSGSLGCRIITENFSIFIKNKHKYQKLVSEYASIIKDVVDNLPELHDFISKFASTNDYMTFSVQDNIVKYNAIVGEINKNINLYIQQHPDENKSPKKLHMKKLFKQILFDSESLFAVAPKITEEAELKELINTLWEEILQNGKVLDEVMELLKNIRQYDLSEIYITKNMATKLMYWKYNDSAYVRFIAKNITSNIVPISDVMEHIGLETYLQPMSGYKKDALLSYSAIKSFNEIMNNRVAVDRVHCFMNSLNDFRRIAEFITIDESLLSDDEFYDTYTELKGIMRLVSKAYDTVRNFINQRPKDISKKMKLVFGYADFMNGWDYDKIVNNVYGGAMFKKGNRIYIGLKPENDLFKKIRDVQEGEETMQFVKYKQLNPNQQIPRLFHKTEWIDKYTRQENPRANIQKILDKKVADKKYEYTEKESAALIKYYIYCLIESDYAEMYNLEFSDATEYKNINNFFETIKKSTYKIEFIDVALSQIEEWIDNKKIFMFSVHTKDYQPGAYGSKELFTMFLEQLFSEDNLKSNIIRLCGASTVMFRKQTIKNPYVHYKGSILLNKRDKDGNPIPSEIYLNLRDYLNGKLTKSELSKEEIAYLDRIKYKTAKEDIIKDRRYTEDKMFINLPITINKGCKLEINEFNKAIRKRAKYIISLDRGERNLLYYTVMDFKGNIIEEGSLNIIDGYNYQMKLSQLEKERKDEQRNWQATSQIKHIKNGYVGKAVYKICRLVIKYEGAIIAMESLNKTFCVKRDAAIGPSVYQYFQNALLKKLSYLVLKDRKPTEEGGILNGYQLTYCPDKIEDKLVQYGIVFFVNAGYTSKIDPVTGLTNQFKFDEYNTNEKATEFVKSFDYIRVNDNDVAEFGFKYSNFESFCGSNKNKKGKKEEADEAGKYCEREWNCIINGSRIISNKNKETKFWEYHNEDMRVELDKFCEKYNISKEHGTDIKSEMLLICESKPAMCKEFVSLIKKVMQLRNSNRNTGEDYIISPAMNRCGTYDSRNPGNAEKSLPTNGDSNGSRNIGIKCIMSLDMLKEQDKFFFNNEYYFCGLKKFSE

SEQ ID NO: 816 - protein, 1197 aa, unidentified
  REGION 1..1197: note = Description of Unknown: uncultivated organism sequence
  REGION 1..1197: note = Category: MG60 effectors
  REGION 1..1197: note = Description: MG60-25 effector
MFKQEITKTLSAALLPYGQTDVSSLQEVIDRDKKRHKYRKDIIKMIDERHKALLSKIKDAPLEFHRLEELLRKRNKDKKDTAARKELEAEQKALCQILIDWLSSNNRMEFAYLTASTPAKIVSEMFAKNPENKKLEVFDKFCTYLSDYSAARNTIYGTANKAGSVGCRLVTENFPIFIKNKDVYAKLSEEYPEILKTVAKNLPEQSGYIGAFASTDDYMMFSVQDGIKNYNAIVGETNKVINLYIQANPDTKTALKKLRMKNFYKQILFDDEALVAAAFPRIYSVKEFASLVHTIWEDVLDSGKVLDDMMVLLKNIRNYDTTGIFIKKNKIAFVSDKLYGEWNRIKDTIGETKDDYTALEALIFSDADFDNLFKDLNKFKSEAVLAYVEVNKFADDEMMSEDAVPHITELMYALNDFRKLVDIIAIPDDNVNSDPDFYNKYKEYSEKTAAIKSAYSTAYTFVTQRPEDISKKFRLSFDYSTFMKGWDIDKITKNEYGATMFSKDGRLFVGVTNKEKCPDFDDIHPANPGEETFRMLSYKKLGNSSRQIKHMFINDSTPDNIRKIVLGKKDDEAYEHSDMVKVIDYYKKCLVSRYSGIYDFNFSETSDYKTINDFFAEVDKFTYKVSFIDIPASQIDEWIAEKKLFMFIVHTKDYKVGAYGTKELFTIFFENLFTEDNLKNDVIRLAGGSSIVMRPKAVENPYRHKVGSILLNKRDKDGKPVPNKIYVSLSKYLNGRLKKKDLSRDALAYLDKVVWHKHQKEHIAVEDIVKDKRYTTDAFILHLPITINPGCRANEYEINEDARKNAKHTIGIDRGERNLLYVNVTDCRTNKVVEHRSLNEIEGYDYQLRLTQLEKERQDQQRNWRTQSQIKHLKKGYVGKAVHIICELMLKYENSIVVMEALPKEMMQKRGSAFGAVYSQFQQALLNKLSYLVVKDRKPLEKGGILNGYQFTIPPKTLEDKPRQYGSVLFVPPGYTSSIDPVTGFTNIFMYKKYDSSNKKAKNFTAKFDSIRINEDGIPELKFDYSNFKTFQKWPDRQWTCIIDGKRILRQKNQKTGVWEYEDVNVREAFNKLFGKYSKLEPGTDVKELIGKIRKTDADIDVKFVKLMKTVFRLRNSNPNTGEDYIISPALDVHGKTFDSRDQRNLELGLPVNGDSNGARNIALKGAMTLHNAGVTGKLVAVGNSEWMQNVQRFSSE

SEQ ID NO: 817 - protein, 1191 aa, unidentified
  REGION 1..1191: note = Description of Unknown: uncultivated organism sequence
  REGION 1..1191: note = Category: MG60 effectors
  REGION 1..1191: note = Description: MG60-26 effector
MLSNMHETTVNINKTSMNQFTNLFQVHKTVKFDLRPIGKTAELINSDGFLVSDDKEKAMAYLVVKCLIDEYYQKEVIAPILDNIKDNKEWNGLLEKYDKAKDGLERNAISKKLAGVIDKSKPTKPTAKALYTPLKDYVLTLKNAELQLILKDLQYDEVVIGGKTLRAAWNKELKEFVELAIDKFKNFTPYFETLATNIEQVFSGKKNGVAHRIVYQNLYTFIRNKKALDDLKIMVDEFSGEKEMLVGDFSYCLHQSGIDKYNKYIGQLVQRLKEYSDAHPKFSMWHKRFKKLNKQILSPQITPSWLPAAFTNDEMMVVAIRAFVNNTSPYLPALEEIIRQIATYDDHIFIYRKSLRSIAAQMTGDYTALDGSFEIPKSSSQKESLSLRWMSNEMKNKYFLYLNNSLSSALQSLKKSSSDAQDFLNLKKAGNNDYRRNNQASVCILRLMESYKQLYRLLRPLTGTGDENDRNEDFYGDFMPIVEALQPINNLFDSVRNWLTKASFSNDSYPVYLGKATLLDNWTNKVVFLKKDGKYFFLMLNGIQKDELQGGSTFDTIVYLPYSQAANRIDANLTRQFVFSKKPNASKGRNEPTMAKFVREHKAELAKEWERIKDGKYKVSDNKEEVEHAIRYFQKCLNMHPDYKNFDFGFLPAEEYDNYTSFVESLKGKLFRIEEKTASWESIIQLVEEGKVYLFQLYNKDYADNRASNSTSNLHTLYWESIFCQKNLLSYDFKLEEPKLYFREKADVVQKTGNIQSVPLRYQKPKIHLHIPILMNANAHKLKDLNLLVLEQIQNGYFSHIIGIDRGERNLLYYSVLDMNGNIVEQNSLNIINGINYHEKLMEKEVELDDERKKWKVRTGIRKLKEGYLGHAIHQLTNLIVEKNAILVLEDLSDSFKRGRQKKDMQIYQLFEKMLIEKLSFMVSKNVCNLNQEGCTFKALQLADPKIEMPKTGVKQNGIVFFVPPEYTSAIDPVTGFCNLFDRDRVKDIRNLLACFKSISYNSDKEWFEFEWDYQEVLQYTRLEQCANSFPWVTCSYGNRIEWSGSKSCHNLKCENVSLTSGFKALLGKYRVDYHSGANLKEMLRTINKKDDIKELKRLFFLMLSLRNKPDKDTDYILSPVQDVNGVFFDSRKMNKETKPQLPKNGDANGAYNIARKGLLSINKLNNGNNETLSIEEWVLSAKSNKVKLQT

SEQ ID NO: 818 - protein, 1200 aa, unidentified
  REGION 1..1200: note = Description of Unknown: uncultivated organism sequence
  REGION 1..1200: note = Category: MG60 effectors
  REGION 1..1200: note = Description: MG60-27 effector
MKKELAKTLSAELKPYGNTDINALKDIIANDETRFNARKEVIKLIDERHKAFLYHIKDVSLSFDKLEALVIEYNKDKKNNDVKKKLETFQKIMCDALINQLSSKYSEEFKRLIAPTPANIIAQLIAEYPDNENIRMFDRFCSYLIDYCTARRTMYSSKNVPNSAGHRLITENFSLFVKNKNAYTKLSNSYPSIVETVSKNLPELSEWSSSFANTSDYMEKFSVQDGITKYNAIVGEFNKAINLHIQNNPDDKKSLKSLRMKTLRKQILFDSESLFQTVAKIYTPAELKSTIQTLWEDVLENGNVLERMIALLGKFDQFDMKGVFFKKNKVGIISKQLFDGEPLKIRTALKEKYGKKDMEKRNYFPFQDIFDSEPESDIQKFFRDLNGYLSEARISFATINSSDDIMSESTLEYVKNFMDNLNDFRRISEVIAITDESTADTEFYNSYVELSEKMFVIKRAYNTVKNFVCQRPKDISKKFPLTFEYPEFMKGWDFDKTIKNIYGVMMFIKDGRIYIGVSNKKDAPNYKNIRPVSAGEESFRMVLYKQFKPNIQFPNMFNKDAPEDINKIFKSKKDKKSYDRKDTLKVIDYYKRRFIEKYVKIYDFKFSETSDYKNINDFYDEVSKFTYRISFIDVPTSQIDEWIDNKNLFMFVVSTKDYALGAHGSKELFTMYLESLFSEDNLKNDIIRLNGNSSIVMRPRVIDNPYKHKAGSVLLNKRDNDGNPIPNEIYTRLVKYLNGNLAKEELSENEASFLDKISHQKKSYDIVKDRRYTEDKFIIHLPITINHGCTISDKDFNTEIRKKFIANPDAHIIGIDRGERHILYVNVMDRNGKTVFEESLNVLDGYDYQMKLTQLEKQRRNQQRNWKTAGQIAHLKEGYVGKAVYEVCRLMLKYNAIVVMESLNKKFTTSRSAAFGPAVYAQFQRALLNKLNYLVLKERSPMEKGGILNGYQLAYLPKEGIGDNPVQFGSVFFVPAGYTSKIDPVTGFTSLFDFSEYETSNEKASKFTSSFDSIRINEENIPEVQFTYPKFKTHVKWPERKWSCAIKGERILSRKNQKTGYWEYNTVDVREEFDKLFENHGKKLEPGTDIKALMTEIRKSDASIDKEFVKLMKTVMHMRNSNPETGEDYILSPALDKYGKTFDSRNKENSSLGRPTNGDSNGARNIALKGLMMLNNEKDSGKFKCIKNEEWFRNIQKFSE

SEQ ID NO: 819 - protein, 1330 aa, unidentified
  REGION 1..1330: note = Description of Unknown: uncultivated organism sequence
  REGION 1..1330: note = Category: MG60 effectors
  REGION 1..1330: note = Description: MG60-28 effector
MEQFTNLYNVQRTLCFELEPVGVLPEKVQELLAIDKERNLLAPQVKEMMNELHKSFITRTLRNIMLIKDDEEEDISNAKSLIKIKDLLHSTCQLYAIPAKNDKDKDELEQKQAEFRNIISLLFTKDDFYAKLFGKDILDELHNHFTNDEGKLEILDKFKGFLGYFDTFRTNRKNMYVDAENETAIPFRIVNQNLPKFCDNLVAYQRLKSSDLAKCIATVYSDFEDMLNVESLDEYFCVDNYLNCLCQTDIQTYNYIIGGREQEGTKQLLKGLNQHINEFNQTHSKAERLPLFKPLFKQILSDKEKVSWLSEEFKTDRDMLQAIDQCYQDLAIILMGNEECSLPVLLKNISSFNQDGIYISNGKALNLISKRLYSGYSVITDALKQVWKANHERGRRESEENYEKKCNDTIKKTSSFSLSAINQALGITTGDGTNTIATYFAKFGSERECGKTYVQELSELYNEALSALHTKDKDIVNDDEKVGAIKALLDHLKCIQHFIEPLHMKNVEENADAEFYNIFDDIYEQLDNKLTGLYNRVRNRMSRKPYNDDKFQIFFENNSQVLRGWMDSKTENSDNGTQYGGYLFRKINEIGEYDYFLGVSKNVNLFRRFNEVAVADYSEYQRLNYCQLKSETFYGACYKSAVGNDFEQDKSRLTDMILKLCYKHGSENLQDAINKERRKSDPKKSKLSSPKSLLELIEKKDSECYEKILKNKSFLELDALVIESIKKTMASVNVKYLQNLANNDYDSFIQAMEVVDKGCKFGKIFDYFTISQSELDAALEDESKRLYLFKITNKDLSYSKNYKQRKSRGTDNLHTMFFKALMEGGYGTYDIGTGSLYYREMTPGLAKYKPTHPQNIPIDKKSDFFRKRGKQSVFEYDIQKDKRFTRNMFKFHLSINANYTCGNANKIMLNMLNTKVIDAIRNGRFKHIIGIDRGERHLLYVTVINLNGDIVEQFSMNIMESEKLIDGEPVVTNYKSLLDAKMNLRTEQKRTWRRQESIKDLKEGYLSQAVHKLTKLIVDKYQAIVVLENLSKGFMQTQIESAVYAKFEQMLITKLNLYIDKQKDKNAIGGLYHPLQLTSPYKSKSTASIQNGIIFYIPAWCTSKIDPVTGFVNYIRPKYENIQAAREFLSKFDDIRYNPEHDYFEFHIKDYTAFNPKAKSSRQDWIICTNGDRIRNFRDPNNNEWTSEKINLTREFKKLFESYKIDYNCNLLALILIQDKKDFFSNSNVKEPSLFPLLQLTLQLRNSFIKSDVDYILSPVADKNGCFYDSSKCGACLPNNADANGAFNIARKGLILVNRILSTPINEKLSLAISNEDWLNYAQSQQLSND

SEQ ID NO: 820 - protein, 767 aa, unidentified
  REGION 1..767: note = Description of Unknown: uncultivated organism sequence
  REGION 1..767: note = Category: MG60 effectors
  REGION 1..767: note = Description: MG60-29 effector
MAHKKQKEENEIIKTISLKVKDYAGYPIVEAMREYTKYYNKISQWINSNLLTINIGELSAFMPDECKTHNYYTYMMSPDWVNEPLYKMFMKGFHTQHCDNILFNVVKTLNIDEYTGNSLGLSASCFRRSGYFQNVVSNYKSKFANPHISIRRKNLSDLPTEDELLEQCIYEIQNGLSSKTKWEEQIEYLKERDDSKQIYLTRLNTLFTYYKANKDFVDEQMQIKSVESLANFGGCVRKNDKLSMNLVFSSNSPYKVVLNEKRNGYILSYSNNFSIELYGNRMGLLNGVEMFNIVDKHSNNITFKMDNDELFVNIPVSVNFVKKANETNKVVGVDVNLKHSIFATNIIDDGKLDGFVNIYRELLSDVDFVKSCHNDLLNFILDVEKYAFFMPLELGLLSSRVMNQCGYSTIGKYEKLFTTEEHFLRVLRQLEKRFQESGENQKRIYIENVIKMRAQLKAYVTLKYAYNKANKDYDLKMGFVDESTANKETMDQRRFENQFVNTDTAQEILGKMRRIANVITSCRNNIICYMYKIFENNGYGVVALEKLQSSQMKKEKRIPSLLSLLKKHKVEGYTINELKDKSVFKFIERGYYTFDFDDDNKITGVQFSDAGEAVNIETELHNLALKTIHFADAKDYFVTLSNNGSVSVALVPSQFTSQMDSTKHVLYAKKNNKGKLGIVSEHEVRPKQERHINGLNGDYNAACNIAYIFENDEWRNAFMKMNPNEYGKALFETNIESTSTIINTLKKINPDNIISFDECEKTKKVAA

SEQ ID NO: 821 - protein, 1180 aa, unidentified
  REGION 1..1180: note = Description of Unknown: uncultivated organism sequence
  REGION 1..1180: note = Category: MG60 effectors
  REGION 1..1180: note = Description: MG60-30 effector
MNQFTNLFQVHKTVKFDLRPIGKTAELINSDGFLVSDDKEKAMAYLVVKCLIDEYYQKEVIAPILDNIKDNKEWNGLLEKYDKAKDGLERNAISKKLAGVIDKSKPTKPTAKALYTPLKDYVLTLKNAELQLILKDLQYDEVVIGGKTLRAAWNKELKEFVELAIDKFKNFTPYFETLATNIEQVFSGKKNGVAHRIVYQNLYTFIRNKKALDDLKIMVDEFSGEKEMLVGDFSYCLHQSGIDKYNKYIGQLVQRLKEYSDAHPKFLMWHKRFKKLNKQILSPQITPSWLPAAFTNDEMMVVAIRAFVNNTSPYLPALEEIIRQIATYDDHIFIYRKSLRSISAQMTGDYITLDGSFEIPKSSSQKESLSLRWMSNEMKNKYFLYLNNSLSSALQSLKKASSDAQDFLNLKKAGNNDYRRNNQASVCILRLMESYKQLYRLLRPLTGTGDEDDRNEDFYGDFMPIVEALLPINNLFDSVRNWLTKASFSNDSYPIYLGKATLLDNWTNKVVFLKKDGKYFFLMLNGIQKDELQGGSTFDTIVYLPYSQAANRIDANLTRQFVFSKKPNASKGRNEPTMAKFVREHKAELANEWECIKDGKYKVSDSKEEVEHAIRYFQKCLNMHPDYKNFDFGFLPVEEYDNYTSFVESLKGKLFRIEEKTASWESIIQLVEEGKVYLFQLYNKDYADNRASNSTSNLHTLYWESIFCQKNLLSYDFKLEEPKLYFREKADVVQKTGNIHSVPLRYQKPKIHLHIPILMNANAHKSKDLNLLVLEQIQNGYFSHIIGIDRGERNLLYYSVLDMNGNIVEQNSLNIINGINYHEKLMEKEVELDDERKKWKVRTGIRKLKEGYLGHAIHQLTNLIVEKNAILVLEDLSDSFKRDRQKIDMQIYQLFEKMLIEKLSFMVSKNVCDVNQEKSTFRALQLADPKIEMSKTGIKQNGIVFFVPPEYTSAIDPVTGFCNLFDRDCVKDIRNLFACFKSISYNSGKDWFEFKWDYHDVMRYTRLAQCATPYSWVACSFGNRIEWSGSKSYHNLKCENVSLTSGFKALLDKYRVEYRSGENLKEMFGAINKKDDIKELKRLFFLTLSLRNKPDGDTDYILSPVQDVNGTFFDSRSVNKESLPQLPENGDANGAYNIARKGLLSINKLNNGNNEAISIEEWIQSAKYVKIKFTGPTLCV

SEQ ID NO: 822 - protein, 1321 aa, unidentified
  REGION 1..1321: note = Description of Unknown: uncultivated organism sequence
  REGION 1..1321: note = Category: MG60 effectors
  REGION 1..1321: note = Description: MG60-31 effector
MKQFTNLYNVQKTLCFELQPEGKLPETVHELLAKDEERYRLAPKVKEMMNDLHKSFITQTLQNIEVTKNGEKEEVSKAKSQIKELLYSIYHLYRRTNKSDEDKDELRQKQAELRYCLSLIFTKDSFYANLFSKSIIGELRNQFSDDRDKTEILDKFKGFWGYFDTFCTNRKNMYVADEQETAIPFRIANQNFPKFCDNLAVYQRIKSSVLVDCMTKVYSDFEDMLNVANLDEYFCIDNYLHCLCQTDIQAYNYIIGGREQEGTKVLLKGLNQYINEYNQTHSKMERLPLFKPLFKQILSGKEKVSWLPEEFKSDAEMLQAIDLCYKQLEVYLFDNENRSLSELLHNIGSFNPDGIYVQNGDSLNLISKRIYGNYSVISDALKQVWKRTHVKGKRESEEKYEKKCSDAIKRISAFSFSTINQALGIKSGNEKRTITDYFANFGSERESGKTYIQELSELYKDAKSALNTKDEDIINDDAKVGAIRGLLDQLKTILHFIEPLHMKNVEENSDADFYNIYDQIYEKLDKVTNLYNRVRNRLSRKPYNNNKYPIYFENNSKLLGGWPDSCTESSDNGTQYGGYLFRKLNEIGEYDYFLGISSNVKLFRRFKKVVPSDRSEFQRLNYYQLKSQTFYGGCYKTAIGHDFDEDKTKLIMCILKVCNHFASPELLDAINKEKLKDPKKSKLNSPKSFLDLIEKKDFECYEKIVVNKSFRKLDAIVTENIKKTMASVNIQFLQDAANNDYNSFLQAMDVVEKGCAAEKIFEFFPISQSELETALNSDSKRLFLFRITNKDLSYSQNYKQRKSRGTDNLHTMFFKALMEGGYGTYDLGTGSLYFREMTPGLAKGDPTHPKNVLIEKKSSFFRKQKKQSIFKYDIQKDRRYTRDMFKFHLSIKANYTCGNANETILNQKVIEAIRNGEVKHIIGIDRGERHLLYVTVIDLNGKLVDKFSMNIMESEKIIDGEKVKTDYKSLLDSRMNLRTEQKRTWRHQDNIKDLKEGYLSQVIHKLTKMIVDNQAIVVLENLSKGFMQTQIESSVYAKFEQMLITKLNLYIDKQKDKNQPGGLYKPLQLTSPYKSRTNARIQNGVVFYIPAWNTSKIDPVTGFVNFIHPKYENIMAAREFIGKFDNICYNVEQDYFEFHIKNYTAFNPKAKSSRQDWVICTKGKRIRNFRDPDNNNEWTSEEIDLTKEFKVLFDDYGIDYHSHLFDYILKQGKKDFFYNDNEKERKQSLFPLLKLMLQLRNSFIKSDIDYIISPVADKNGVFYDSRTCAAYLPDNADANGAFNIARKGLMLVKRILSTPIDKKISLTISNEEWLHYAQPKD

SEQ ID NO: 823 - protein, 1177 aa, unidentified
  REGION 1..1177: note = Description of Unknown: uncultivated organism sequence
  REGION 1..1177: note = Category: MG60 effectors
  REGION 1..1177: note = Description: MG60-32 effector
MEHLTNLFQVHKTVKFELRPIGKTEDLINKNGFLLSDDKERAMAYQVVKCLIDDYYQKEVIAPLLEKVKDNEDWNHNLVAYGDASDSNTRRAISQKLAAIIIKAKPNEPSANLLYTQLHNYLQKQNTGDLCHILKDLQYDEIAIKDRTLKAAWNYKLKDFVQDAIDKFNGFTLYFSALAVNMKQLFSRKKNGLAHRIIYQNLYTFVRNKRALDDLRVVIAEFRDEKDIAVTDFSNYLLQDGIDKYNKYIGQLIQRLKEYEDSHPNSSRWHRRFKQLNKQILSPRIAPDWLPAAFTNDEMMVVAICAFMKSVNPQLSALKEIINQIDTYNGPIFIYRKSLRSIAVQMTGDYKGLDDAFVIPKGYSKSESLSLQWTTPEVKQEFLGFLKDNLSAKLLSIQQASCEADEFLNLKKAEGNDYRRNNKASVSINKLMNAYKQLYNLLRPLTGTGDEEVRDEDFYGSYMPIVDALQPINELFDSVRNWLTKTAYSNESYPTYLGVATILKNWSSKAVYLKKDRKYYFCLASTKGEEKRDIHDILKKIWISNNCPKDAVIYLTRTQSPERITANLPRIFIRSKEADKVNSFVEKHPELKTEWEKLKGGGYKSPELKNEAISYFQKCLQLHDDYKYYKYHFRPAKEYDDYDSFVNSLKKEALFFFEEKPICWNELLQLVDDGKVYLFQLYNKDYADNRPGNSTPNLHTLYWEAVFSQQNRLSYDFKLEEPKLYFREKADVVQRTGDIHSVPLRYQTPKMHLHIPILMNANAQNTVDVNQLVLEQIQAGTFSHIIGIDRGERNLLYYSVLNMNGSIVEQESLNVINDVDYHKLLMEKEADLDDEQRKWKARSGIRKLKEGYLSHALHQLTNLIRKYNAILFVEDLDKAFKHSRQKIDMQIYQLFEKMLIEKLSFWVDKKVSDGNHAGSTFCALQLATPGLKQEEKGVRQNGILFFVPPEYTSAIDPVTGFCNLFDREHVKDVRRIFAHFKRVSYNVDKDWFEFEWDYQDVLQYTRLKECATPQPWVVCSMGERIEWTGSERYRNQKCESVDLTTEFKILFEKYNIQYVNGEDLKDAIASINKKEDINELKRLFFLTVSLRNKPNKDTDYILSPVCDANGVFFDSRLVNSEALAKLPVDGDANGAYNIGRKGLLSINKLKNGINEPLSLEEWVQSARQEIYQTTNQT

SEQ ID NO: 824 - protein, 782 aa, unidentified
  REGION 1..782: note = Description of Unknown: uncultivated organism sequence
  REGION 1..782: note = Category: MG60 effectors
  REGION 1..782: note = Description: MG60-33 effector
MAGHSKIKENHIMKAFLMKVKETRKNQWQSNFIRSEIAKFTNYYNGLSKFIADRLLDDMVTTLAPLIEEKKRDSEYYKYLTNGDWDGKPLYFIFKEGFNSTNADNILANSLVRVYCEQNYTGNGFGLSYSYYVVIGFAKEVIANYRSSFQKPKVKIKKKKLSENPTEDELIEQCIYTIYYEFNEKKDIKKWKDEIKFLKERGESKETRLKRIQTLFEFYKDKNHKELVDERVANLVVDNIKEFGGCKRDIGCPSMGIQIQHNFDISINEKRNGYTICFGPNKKNLTKLEVFGNRMVLLNGEEIVDLPNTHGEKLTLIDRGNAIYAALTAQVPFEKHMPDGNKTVGIDLNLKHSVFATSIVDNGKLAGYISIYKELLKDDEFVKYCPKDLLRFMKDASKYVFFAPIEIELLRSRVIYNKGYACVENYENVYKAEVAFVNVIKRLQSQCEANGDAQGALYMSYLSKMRAQLKNYINLKLAYYDHQSAYDLKMGFNDISAESKETIDERRKLFPFSKEKEAQEILAKMKNISNVIIACRNNIAVYMYKMFERNGYDFIGLEKLESSQMKKRQSRSFPTVKSLLNYHKLAGMTMDEIKKQEVSSNIKKGFYDLEFDADGKLYGAKYSNKGNVHFIEDEFYISGLKAIHFADMKDYFVRLSNNGKVSVALVPPSFTSQMDSVEHKFFMKKNANGKLIVADKKDVRSCQEKHKINGLNADYNAACNIGFIVEDDYMRESLLGSPTGGTYDTAYFDTKIQGSKGVYDKIKENGETYIAVLSDDVITAEE

SEQ ID NO: 825 - protein, 1318 aa, unidentified
  REGION 1..1318: note = Description of Unknown: uncultivated organism sequence
  REGION 1..1318: note = Category: MG60 effectors
  REGION 1..1318: note = Description: MG60-34 effector
MQQFTNLYNVQKTLCFELQPEGTLPEKVQELLANDKERYLLAPIVKEMMNELHKSFITQTLRNIVVEIKSDNEEIRNAKLLTKELLYTIYQLYKKANKSDEEKEELEQKQTELRICLSLVFTKDNFYGNLFNKEIMKELRNQVSNDEEKLNILDKFKGFFGYFDTFCTNRKNMYVADEQETAIPFRIANQNLPKFCDNLAVYQRLKSSSLSNCIATVYTDFEDMLNVASLDEYFCIDNYLHCLCQTDIQAYNYIIGGREQEGTNVLLKGLNQYINEYNQKNPKTERLPLFKPLFKQILSDKEKVSWLPEEFESDAEMLQAIKLCFKELEGFLCDKGSHSLPLLLQNIGSFKQDAIYIQNGEPLNLISKRLYGNYSVISDALKQVWKRDHVKGKRESEEKYEKKCSDAIKKISAFSFSTINQALGIMSGNEKRTIADYFANFGSERECGKTYIQELNELYKDAEPILNTKDKDIINDDTKVGAIKALLDQLKAILHFIEPLHMKNVEENSNTDFYNTYDQIYEQLDKVTSLYNQVRNRLSRKPYSNNKYPIYFENNSKLLGGWPDSCTETSDNGTQYGGYLFRKQNEIGEYDYFLGISANVKLFRRFKEVSPSDRSEYHRLNFYQLKTQTFYGGCYKTAIGHDFDEDKTKLITCILNNCNHYASSVLLDAINKEKSKVNSKLGSPKSLLELIEKKDMECYEKIVTDKQFRILDAMITGNIKKTMASVNIQFLQDAANNGYDSFIQAMNIVEKGCADERGFEYFPISQSELDAALTSNSKRLFLFKITNKDLSYSQNYKQRKSRGTDNLHTMFFKALMEGGYGTYTLGTGSLYFREETPGLAKDKPTHPQNVPIEKKSVFFRKQKKQSVFEYDIQKDRRFTRNMFKLHLSVKANYTCGNANETALNLKVIDAIRRGGIKHIIGIDRGERHLLYVTVIDFNGRLVDKFSMNIIESEKSIDGETVKTDYKNLLDSRMNLRTEQKRTWRRQENIKDLKEGYLSQVVHKLTKMIVDNQAIVVLENLSKGFMQTQIESSVYAKFEQMLITKLNLYIDKQKDKNQPGGLYMPLQLTSPYKSRANASIQNGVVFYIPAWNTSKIDPVTGFVNFLHPKYENIQNARDFISKFDNIYYDSDKGYFVFHISNYTAFNPKARCSRQNWDICTVGKRIRNYRDPDNNNEWKSEEIELTKEFKVLFDEYGIDYHSNLLDSILIQDNKSFFYNEDVRKPSLFPLIKLMVQLRNSFIKSDVDYISSPVADTKGIFYDSNNCGSHLPNNADANGAFNIARKGLMLVERITATPPEKKLSLIITNEEWLHYAQSQNK

SEQ ID NO: 826 - protein, 1197 aa, unidentified
  REGION 1..1197: note = Description of Unknown: uncultivated organism sequence
  REGION 1..1197: note = Category: MG60 effectors
  REGION 1..1197: note = Description: MG60-35 effector
MNKIEIQKTLRAELKPYGKTDVNSFKDVIERDRTRYESKREVMSMIDERHKTFLSCITDAPLDFTHLEDVLSKFNTNKKDTTLKKELESLQKEMCAELVEWIASNNKAEFTRLTAATPAGIITELSLQYPENKKLSLFTNFASYLIDYSNARSNMYSKANKHGSIAHRLITENFQIFVRNKTAYMQLLEKIPNFKSDVQEALPQFADVISAFASTDKYMMFASQDGIMRYNAVAGKINEIINLHIQENPDDKKSFKKLRTKQLYKQLLFDAESVLQKFRKIHDEDELREVMKTLWEETLDFGKTIEELDELLCTIDNYDKNGIFIKKRGLSGLSKYIHDDYLTVSKQLKKKYGKNAMKTHESFQLSDIAEKNVSLNDFFSDLKKYQSIALITYALINSSDDLLSDKSICDIHDFMENLNNFCRLSGIIATTDNPEADAQFYNNYDERAEKTSAIKNAFNAVKSFVCRRPKDIEMKFPLTFNYPHFMEGWDFDKIVNNVYGATLFTKDNRIYVGVLNRKAGMKFDDIRPAKPGEEFFHMVVYKQFGKPDKQLPNLFKSTAPEEIAILMDAKKEGRPYDMAKLIDYYKRCLKERYGNLYDLKFSETSEYKTFDDFTREVVQCTYHISFIDVPASQIDEWIETKKMYMFIVSTKDYAAGAHGSKELFTIFLENIFSKDNMHNDIIRLNGGARIMMRPKVLDKSFTHKKGSILLCKRDVLGNPIPSEAYDLLSRHLNGWTRSDEKNLAQKTMAEYKDIIRYKTAKYDIVKDKRYTRDMFTISLPITINAGYKIHYAEFNREVRRKFMKSDNAHIIGIDRGERNMLYITIIDKNGKTVLQKSLNMMDGYDFHMKLEQLENQRRDNQRNWKASGNIKHLKDGYSGKAVYEIYRLMLEYNAIIVMENLNEKFMTSRNAAFGTAVYTNFQNALINKLSYIVLKERKPMDEGGILNGYQFAYPVKEIGENVNQIGAVFFVPAGYTSKVDPITGFTSLIDFSDYESSDKKAAKFTNSFDSIRINEHGLLETKFKHDKFKTHIKNTGCEYTCIADGQRILTHKNQETGGWEYVDVDVRTEMNNMLEKYGISTSPGTDIKDEITKLRKNNPSIDKDFLTVMKTVMHMRNSNPHTGEDYIISPAVDKHGMTFDSRDIGNDAAGRPVNGDSNGARNIALKALIMLNNEQANGEFRSIKNTEWFSEIPKFSN

SEQ ID NO: 827 - protein, 758 aa, unidentified
  REGION 1..758: note = Description of Unknown: uncultivated organism sequence
  REGION 1..758: note = Category: MG60 effectors
  REGION 1..758: note = Description: MG60-36 effector
MLCQTGKSDTLFAYTVSPGKPERQGAGLAAEAVKEGKNMRIIKRSGTEVAFDITKIVAAVEKANKEVVETDRLSLEQIKEIAKKVTLTCSSMNRTFGVEEIQDLVENEIMEMQAFEVARKYITYRYKRALVRKANSTDEQILSLIECNNEEVKQENSNKNPVVNSVQRDYMAGEVSKDITKRFLLPEKIVKAHEAGIIHFHDSDYFAQHMHNCCLVNLEDMLQNGTVISETMIDRPKSFSTACNIATQSIAQIASSQYGGQSITLSHLAPFVDVSRKKYLKMVKEEYDAAGLQIDDSQIASIAELRVREEIKRGVQMIQYQVITLMTTNGQAPFVTVFMYLDEVPEGRTRDDLALVIEEMLTQRILGVKNEKGVYITPAFPKLIYVLEEDNVREGSKYWALTQLAAKCTAKRMVPDYISEKVMKKLKDGNCYPCMGCRSFLTVYHDESNRPKFYGRFNQGVVTLNLVDVACSSKGDMEQFWNILDERLQLCYEALMCRHNRLKGTPSDVAPILWQYGALARLKKGETIDKLLYNGYSTISLGYAGLCECTRYMTGLSHTNPEATPFALEVMQRLNDACAKWKAETNIDFSIYGTPLESTTYKFAKCLQKRFGKIEGVTDKNYITNSYHVHVTEEIDAFKKLTFESKFQELSPGGAVSYVEVPNMQNNIDAVLSVMQHIYDNIMYAELNTKSDYCQQCGFDGEIQISSDKEGKLIWRCPNCGNTDQDTMNVARRTCGYIGTQFWNQGRTQEIKERVLHL

SEQ ID NO: 828 - protein, 997 aa, unidentified
  REGION 1..997: note = Description of Unknown: uncultivated organism sequence
  REGION 1..997: note = Category: MG60 effectors
  REGION 1..997: note = Description: MG60-37 effector
MNSILDIAAQFLSENTNPIMESFHDESVDQAKKYIENNYDELYKFKGFQKFAPIKPSNLKEFANTKVRDIQRLIISPFIYAPRNELKWMNSYVLGLTRIMYKDLLYDKPKFKKNLLQDLKKIYLTAVYARQDGIANGDKSLMMDKNMNNLSFNELKTKFMPLFNHYYDIYKKNKQEYINIHTRNATTNTNLVANTAIKYDGAGNELNDTEYEEPYHENSFKIGKYNACLIPNHKAAATWNRFTNKTSDSNGCNWCITIPSTDDHWESYECGKTRTVYFCWTDNFLNLNIKDFNDGSAPYNEWGKSLMCVMVNDSDDINKFVCQVTSRYNHCNGKGENASSSLGFGDYFCGDPDSEGLAANLAQILGCSAEDIQEKFLFDGDMDASSEKGEQIYEDIAERINYYLERHNFNNLEVDTILPDNYVLATYSDKDYTVNVLLKNNTLVPNFIYTYIYPIYIGKTIDDCIFEVIDATAEYSDRTKNIAYGPNADTYFDHDMAEIIPIYKLNRSYSSEYNDEKYKTKHRIVALAPYHNHEYNLFDLDKKEFMLNDEFFIQSVFEKDGQLNLAITTGENSAERNISNVCVYNIDTKKTYYIKNEYLTDLQARLGDNYLRFNNAYMYANESNVILFDLLNMKPIEGNYTYVLESRIAFKDYLITLDESAKNFDYTIFYKGNVIDTFPARTHIYCPKDNTRSTDVFIINYNNDSESRIYYKGKLIYASNSETDNIKTSRGPFVIGNVLYVRLKEEKNITNDYSAQAFKLIDINTQKVITEDICMDGEYALETAVRKDIPVLAFKVNPKTNAIEYVVIDNNGKINNLNNEEDEFIDYNILKSGDSTVIASDSEIRINDGDANITMQYIKFYSNAKIKLYNPDGSIFYKPNDDDFQGLNYVSLAPLGYGFWLLTRKIKYSRIGLLEIHDIIDKNGKLIIGNTDSSPVSINIIDNFNENEDLLITATKYAKDIDSRDYSISKNGELKKLPYGWQSANENYIQNLAAYLL

SEQ ID NO: 829 - protein, 758 aa, unidentified
  REGION 1..758: note = Description of Unknown: uncultivated organism sequence
  REGION 1..758: note = Category: MG60 effectors
  REGION 1..758: note = Description: MG60-38 effector
MLCQTGKSDTLFAYTVSPGKPERQGAGLAAEAVKEGKNMRIIKRSGTEVAFDITKIVAAVEKANKEVVETDRLSLEQIKEIAKKVTLTCSSMNRTFGVEEIQDLVENEIMEMQAFEVARKYITYRYKRALVRKANSTDEQILSLIECNNEEVKQENSNKNPVVNSVQRDYMAGEVSKDITKRFLLPEKIVKAHEAGIIHFHDSDYFAQHMHNCCLVNLEDMLQNGTVISETMIDRPKSFSTACNIATQSIAQIASSQYGGQSITLSHLAPFVDVSRKKYLKMVKEEYDAAGLQIDDSQIASIAELRVREEIKRGVQMIQYQVITLMTTNGQAPFVTVFMYLDEVPEGRTRDDLALVIEEMLTQRILGVKNEKGVYITPAFPKLIYVLEEDNVREGSKYWALTQLAAKCTAKRMVPDYISEKVMKKLKDGNCYPCMGCRSFLTVYHDESNRPKFYGRFNQGVVTLNLVDVACSSKGDMEQFWNILEERLQLCYEALMCRHNRLKGTPSDVAPILWQYGALARLKKGETIDKLLYNGYSTISLGYAGLCECTRYMTGLSHTNPEATPFALEVMQRLNDACAKWKAETNIDFSIYGTPLESTTYKFAKCLQKRFGKIEGVTDKNYITNSYHVHVTEEIDAFKKLTFESKFQELSPGGAVSYVEVPNMQNNIDAVLSVMQHIYDNIMYAELNTKSDYCQQCGFDGEIQISSDKEGKLIWRCPNCGNTDQDTMNVARRTCGYIGTQFWNQGRTQEIKERVLHL

SEQ ID NO: 830 - protein, 1255 aa, unidentified
  REGION 1..1255: note = Description of Unknown: uncultivated organism sequence
  REGION 1..1255: note = Category: MG60 effectors
  REGION 1..1255: note = Description: MG60-39 effector
MNKILLTDAVPDIEKYWDYEANEGKKPSDFGASSSEKVWTKCPICGTSVKRNIRYTWEKDKNGVGHVIHCRTCGKRNNNNSLVVLFPDIKKHWIYEKNEHDPEYYSISSGKKVYTRCPSCGEERYIAICDLIVKRNDRYELTQCIECSPKRNVIGSIAKNYPDIDKYWDDSNASNPDEIALNSQEIIFIHCPTCDKVVKRKALNSFRRDDQTGLYMLLDCHKCATQKAGKIRGLNQSGALIDKCPEIEEWWDAENNTIEFKNITRGSHYEAQLKCPACHSSFTRQIHSFVNVKRDGRLLPVACPECGYSSKGDPKDNILKLCPEVEQWWDYEANSPYRPEQFSKGSQFQAHFICPDCGMHLYTGIHSLLKSDENGNLHIRHKGKCLKYRSMESDNNLVKQYPQIKEWWDYEENGKALPEEFTIYSGKRMHFICPQCGAKSYRRITDAFAIEANSGEPILFNCPYCRNKKVLAGKNSLLDTDPELAKEWSPNNNKKANEVLSKSFNRVQWICPNCKGEYSAIIRDRKVGDDACPYCKNDKVLTGFNSLQDKNPELAEEWSANNVLKANEVLPTSSSCVKWVCPTCRGEYSAIIRGRKVGDDACPYCRYDKLLPGYNSLLNTDPELAKEWSNSNDMKADEVLPTSSSRVKWVCPICRGEYSAIIRERKVGDDACPYCRYDKLLPGYNSLLNTDPELAKEWSNSNDMKADEVLPTSSSRVKWVCPTCKGEYSAIIRDRKVGDDACPYCRQTKLLKEQTSLGVINPELAKEWSANNVRKADEVLPTSSFRVKWVCPTCRGEYSAIIRDRKVGDDACPYCRKDKLLPGYNSLLDTNPELAKEWSDSNDLKADEVLPTSSSRALWICPTCRGEYYAAIRDRKVGDDACPYCRNDKLLPGYNSLLDTDPELAKEWSDSNDLKADEVLPTSSSRALWICPTCRGEYYAAIRDRKVGDDACPYCRNDKLLPGYNSLLDTDPELAKEWSDSNDLKADEVLPTSSSRALWICPTCRGEYYAAIRDRKVGDDACPYCRNDKLLPGYNSLLDTDPELAKEWSDSNDLKADEVLPTSSSRALWICPTCRGEYYAAIRDRKVGDDACPYCRNDKLLPGYNSLLDTDPELAKEWSDSNDLKADEVLPTSSSRALWICPTCRGEYYAAIRDRKVGDDACPYCRNDKLLPGYNSLKVRQPELVEREWCYPENILIGVYPDQILESYPGQAWWKCPTCKRKYLMSVKDRLMKQKRGHVACSQCRGRRWVRSFWV

SEQ ID NO: 831 - protein, 768 aa, unidentified
  REGION 1..768: note = Description of Unknown: uncultivated organism sequence
  REGION 1..768: note = Category: MG60 effectors
  REGION 1..768: note = Description: MG60-40 effector
MFCSCKKNLRVVIYIYDATKTYDCAKKLIVYKSIIKGAEVMKIIKRNGAEETFDRQKIKDAIAKANNETDGTPELTDRQIDYISLVIEDHCNEMNRALSVEEIQELVETHIILQGAPETAKRYIRYRFTRNLARASNTTDNQILSLIECNNEEVKQENSNKNPTVNSVQRDYMAGEVSKDLTKRILLPEDIVKAHEEGLIHFHDADYFAQHMHNCDLVNLEDMLQNGTVISGTMIEKPHSFSTACNIATQIIAQVASNQYGGQSISLAHLAPFVQISREKITRQVRAEMEEFGIDADDEQVKSLVEKRVRDEIKRGVQTIQYQVVTLLTTNGQAPFVTVFMYLNEAKNEQEKKDLAIIIEEVLKQRIKGTKNEVGVWVTPAFPKLIYVLEEDNITEDSRFWYLTKLAAECTAKRMVPDYISEKIMLKLKIDKNGNGNCYTCMGCRSFLTPYVDENGKPKYYGRFNQGVVTINLVDVACTAARDGNKSEEKFWQVLDERLELCHRALQCRHERLEGTLSDAAPILWQYGALARLKKGEPIDKLLHGGYSTLSLGYAGLWECVYEITGKKLTEKEGEEFGLRVMQRLNDACAEWKAAENIDYSIYGTPLESTTYKFAKCLQNRFGIIKGVTDRNYITNSYHIHVTEKIDAFSKLELESKFQKLSPGGAISYVEVPNMQQNIPAVLEVMKFIYNNIMYAELNTKSDYCQVCGYDGEIQIVEEDGKLVWRCPNCGNEDQSKMNVARRTCGYIGSQFWNQGRTQEIKERVLHL

SEQ ID NO: 832 - protein, 768 aa, unidentified
  REGION 1..768: note = Description of Unknown: uncultivated organism sequence
  REGION 1..768: note = Category: MG60 effectors
  REGION 1..768: note = Description: MG60-41 effector
MFCSCKKNLCVVIYIYDATKTYDCAKKLIVYKSIIKGAEVMKIIKRNGAEETFDRQKIKDAIAKANNETDGTPELTDRQIDYISLVIEDHCNEMNRALSVEEIQELVETHIILQGAPETAKRYIRYRFTRNLARASNTTDNQILSLIECNNEEVKQENSNKNPTVNSVQRDYMAGEVSKDLTKRILLPEDIVKAHEEGLIHFHDADYFAQHMHNCDLVNLEDMLQNGTVISGTMIEKPHSFSTACNIATQIIAQVASNQYGGQSISLAHLAPFVQISREKITRQVRAEMEEFGIDADDEQVKSLVEKRVRDEIKRGVQTIQYQVVTLLTTNGQAPFVTVFMYLNEAKNEQEKKDLAIIIEEVLKQRIKGTKNEVGVWVTPAFPKLIYVLEEDNITEDSRFWYLTKLAAECTAKRMVPDYISEKIMLKLKIDKNGNGNCYTCMGCRSFLTPYVDENGKPKYYGRFNQGVVTINLVDVACTAARDGNKSEEKFWQVLDERLELCHRALQCRHERLEGTLSDAAPILWQYGALARLKKGEPIDKLLHGGYSTLSLGYAGLWECVYEITGKKLTEKEGEEFGLRVMQRLNDACAEWKAAENIDYSIYGTPLESTTYKFAKCLQNRFGIIKGVTDRNYITNSYHVHVTEKIDAFSKLELESKFQKLSPGGAISYVEVPNMQQNIPAVLEVMKFIYNNIMYAELNTKSDYCQVCGYDGEIQIVEEDGKLVWRCPNCGNEDQSKMNVARRTCGYIGSQFWNQGRTQEIKERVLHL

SEQ ID NO: 833 - protein, 768 aa, unidentified
  REGION 1..768: note = Description of Unknown: uncultivated organism sequence
  REGION 1..768: note = Category: MG60 effectors
  REGION 1..768: note = Description: MG60-42 effector
MFCSCKKNLRVVIYIYNATKTYDCAKKLIVYKSIIKGAEVMKIIKRNGAEETFDRQKIKDAIAKANNETDGTPELTDRQIDYISLVIEDHCNEMNRALSVEEIQELVETHIILQGAPETAKRYIRYRFTRNLARASNTTDNQILSLIECNNEEVKQENSNKNPTVNSVQRDYMAGEVSKDLTKRILLPEDIVKAHEEGLIHFHDADYFAQHMHNCDLVNLEDMLQNGTVISGTMIEKPHSFSTACNIATQIIAQVASNQYGGQSISLAHLAPFVQISREKITRQVRAEMEEFGIDADDEQVKSLVEKRVRDEIKRGVQTIQYQVVTLLTTNGQAPFVTVFMYLNEAKNEQEKKDLAIIIEEVLKQRIKGTKNEVGVWVTPAFPKLIYVLEEDNITEDSRFWYLTKLAAECTAKRMVPDYISEKIMLKLKIDKNGNGNCYTCMGCRSFLTPYVDENGKPKYYGRFNQGVVTINLVDVACTAARDGNKSEEKFWQVLDERLELCHRALQCRHERLEGTLSDAAPILWQYGALARLKKGEPIDKLLHGGYSTLSLGYAGLWECVYEITGKKLTEKEGEEFGLRVMQRLNDACAEWKAAENIDYSIYGTPLESTTYKFAKCLQNRFGIIKGVTDRNYITNSYHIHVTEKIDAFSKLELESKFQKLSPGGAISYVEVPNMQQNIPAVLEVMKFIYNNIMYAELNTKSDYCQVCGYDGEIQIVEEDGKLVWRCPNCGNEDQSKMNVARRTCGYIGSQFWNQGRTQEIKERVLHL

SEQ ID NO: 834 - protein, 768 aa, unidentified
  REGION 1..768: note = Description of Unknown: uncultivated organism sequence
  REGION 1..768: note = Category: MG60 effectors
  REGION 1..768: note = Description: MG60-43 effector
MFCSCKKNLRVVIYIYNATKTYDCAKKLIVYKSIIKGAEVMKIIKRNGAEETFDRQKIKDAIAKANNETDGTPELTDRQIDYISLVIEDHCNEMNRALSVEEIQELVETHIILQGAPETAKRYIRYRFTRNLARASNTTDNQILSLIECNNEEVKQENSNKNPTVNSVQRDYMAGEVSKDLTKRILLPEDIVKAHEEGLIHFHDADYFAQHMHNCDLVNLEDMLQNGTVISGTMIEKPHSFSTACNIATQIIAQVASNQYGGQSISLAHLAPFVQISREKITRQVRAEMEEFGIDADDEQVKSLVEKRVRDEIKRGVQTIQYQVVTLLTTNGQAPFVTVFMYLNEAKNEQEKKDLAIIIEEVLKQRIKGTKNEVGVWVTPAFPKLIYVLEEDNITEDSRFWYLTKLAAECTAKRMVPDYISEKIMLKLKIDKNGNGNCYTCMGCRSFLTPYVDENGKPKYYGRFNQGVVTINLVDVACTAARDGSKNEEKFWQVLDERLELCHRALQCRHERLEGTLSDAAPILWQYGALARLKKGEPIDKLLHGGYSTLSLGYAGLWECVYEITGKKLTEKEGEEFGLRVMQRLNDACAEWKAAENIDYSIYGTPLESTTYKFAKCLQNRFGIIKGVTDRNYITNSYHIHVTEKIDAFSKLELESKFQKLSPGGAISYVEVPNMQQNIPAVLEVMKFIYNNIMYAELNTKSDYCQVCGYDGEIQIVEEDGKLVWRCPNCGNEDQSKMNVARRTCGYIGSQFWNQGRTQEIKERVLHL

SEQ ID NO: 835 - protein, 768 aa, unidentified
  REGION 1..768: note = Description of Unknown: uncultivated organism sequence
  REGION 1..768: note = Category: MG60 effectors
  REGION 1..768: note = Description: MG60-44 effector
MFCSCKKNLCVVIYIYDATKTYDCAKKLIVYKSIIKGAEVMKIIKRNGAEETFDRQKIKDAIAKANNETDGTPELTDRQIDYISLVIEDHCNEMNRALSVEEIQELVETHIILQGAPETAKRYIRYRFTRNLARASNTTDNQILSLIECNNEEVKQENSNKNPTVNSVQRDYMAGEVSKDLTKRILLPEDIVKAHEEGLIHFHDADYFAQHMHNCDLVNLEDMLQNGTVISGTMIEKPHSFSTACNIATQIIAQVASNQYGGQSISLAHLAPFVQISREKITRQVRAEMEEFGIDADDEQVKSLVEKRVRDEIKRGVQTIQYQVVTLLTTNGQAPFVTVFMYLNEAKNEQEKKDLAIIIEEVLKQRIKGTKNEVGVWVTPAFPKLIYVLEEDNITEDSRFWYLTKLAAECTAKRMVPDYISEKIMLKLKIDKNGNGNCYTCMGCRSFLTPYVDENGKPKYYGRFNQGVVTINLVDVACTAARDGNKSEEKFWQVLDERLELCHRALQCRHERLEGTLSDAAPILWQYGALARLKKGEPIDKLLHGGYSTLSLGYAGLWECVYEITGKKLTEKEGEEFGLRVMQRLNDACAEWKAAENIDYSIYGTPLESTTYKFAKCLQNRFGIIKGVTDRNYITNSYHIHVTEKIDAFSKLELESKFQKLSPGGAISYVEVPNMQQNIPAVLEVMKFIYNNIMYAELNTKSDYCQVCGYDGEIQIVEEDGKLVWRCPNCGNEDQSKMNVARRTCGYIGSQFWNQGRTQEIKERVLHL

SEQ ID NO: 836 - protein, 768 aa, unidentified
  REGION 1..768: note = Description of Unknown: uncultivated organism sequence
  REGION 1..768: note = Category: MG60 effectors
  REGION 1..768: note = Description: MG60-45 effector
MFCSCKKNLRVVIYIYDATKTYDCAKKLIVYKSIIKGAEVMKIIKRNGAEETFDRQKIKDAISKANNETDGTPELTDRQIDYISLVIEDHCNEMNRALSVEEIQELVETHIILQGAPETAKRYIRYRFTRNLARASNTTDNQILSLIECNNEEVKQENSNKNPTVNSVQRDYMAGEVSKDLTKRILLPEDIVKAHEEGLIHFHDADYFAQHMHNCDLVNLEDMLQNGTVISGTMIEKPHSFSTACNIATQIIAQVASNQYGGQSISLAHLAPFVQISREKITRQVRAEMEEFGIAADDEQVKSLVEKRVRDEIKRGVQTIQYQVVTLLTTNGQAPFVTVFMYLNEAKNEQEKKDLAIIIEEVLKQRIKGTKNEVGVWVTPAFPKLIYVLEEDNITEDSRFWYLTKLAAECTAKRMVPDYISEKIMLKLKIDKNGNGNCYTCMGCRSFLTPYVDENGKPKYYGRFNQGVVTINLVDVACTAARDGSKSEEKFWQVLDERLELCHRALQCRHERLEGTLSDAAPILWQYGALARLKKGEPIDKLLHGGYSTLSLGYAGLWECVYEITGKKLTEKEGEEFGLRVMQRLNDACAEWKAAENIDYSIYGTPLESTTYKFAKCLQNRFGIIKGVTDRNYITNSYHIHVTEKIDAFSKLELESKFQKLSPGGAISYVEVPNMQQNIPAVLEVMKFIYNNIMYAELNTKSDYCQVCGYDGEIQIVEEDGKLVWRCPNCGNEDQSKMNVARRTCGYIGSQFWNQGRTQEIKERVLHL

SEQ ID NO: 837 - protein, 760 aa, unidentified
  REGION 1..760: note = Description of Unknown: uncultivated organism sequence
  REGION 1..760: note = Category: MG60 effectors
  REGION 1..760: note = Description: MG60-46 effector
MLVVIYIYNATKTYDCAKKLIVHKSIIKGAEVMKIIKRNGAEETFDRQKIKDAIAKANNETDGTPELTDRQIDYISLVIEDHCNEMNRALSVEEIQELVETHIILQGAPETAKRYIRYRFTRNLARASNTTDNQILSLIECNNEEVKQENSNKNPTVNSVQRDYMAGEVSKDLTKRILLPEDIVKAHEEGLIHFHDADYFAQHMHNCDLVNLEDMLQNGTVISGTMIEKPHSFSTACNIATQIIAQVASNQYGGQSISLAHLAPFVQISREKITRQVRAEMEEFGIDADDEQVKSLVEKRVRDEIKRGVQTIQYQVVTLLTTNGQAPFVTVFMYLNEAKNEQEKKDLAIIIEEVLKQRIKGTKNEVGVWVTPAFPKLIYVLEEDNITEDSRFWYLTKLAAECTAKRMVPDYISEKIMLKLKIDKNGNGNCYTCMGCRSFLTPYVDENGKPKYYGRFNQGVVTINLVDVACTAARDGNKSEEKFWQVLDERLELCHRALQCRHERLEGTLSDAAPILWQYGALARLKKGEPIDKLLHGGYSTLSLGYAGLWECVYEITGKKLTEKEGEEFGLRVMQRLNDACAEWKAAENIDYSIYGTPLESTTYKFAKCLQNRFGIIKGVTDRNYITNSYHIHVTEKIDAFSKLELESKFQKLSPGGAISYVEVPNMQQNIPAVLEVMKFIYNNIMYAELNTKSDYCQVCGYDGEIQIVEEDGKLVWRCPNCGNEDQSKMNVARRTCGYIGSQFWNQGRTQEIKERVLHL

SEQ ID NO: 838 - protein, 768 aa, unidentified
  REGION 1..768: note = Description of Unknown: uncultivated organism sequence
  REGION 1..768: note = Category: MG60 effectors
  REGION 1..768: note = Description: MG60-47 effector
MFCSCKKNLCVVIYIYDATKTYDCAKKLIVYKSIIKGAEVMKIIKRNGAEETFDRQKIKDAIAKANNETDGAPELTDRQIDYISLVIEDHCNEMNRALSVEEIQELVETHIILQGAPETAKRYIRYRFTRNLARASNTTDNQILSLIECNNEEVKQENSNKNPTVNSVQRDYMAGEVSKDLTKRILLPEDIVKAHEEGLIHFHDADYFAQHMHNCDLVNLEDMLQNGTVISGTMIEKPHSFSTACNIATQIIAQVASNQYGGQSISLAHLAPFVQISREKITRQVRAEMEEFGIDADDEQVKSLVEKRVRDEIKRGVQTIQYQVVTLLTTNGQAPFVTVFMYLNEAKNEQEKKDLAIIIEEVLKQRIKGTKNEVGVWVTPAFPKLIYVLEEDNITEDSRFWYLTKLAAECTAKRMVPDYISEKIMLKLKIDKNGNGNCYTCMGCRSFLTPYVDENGNPKYYGRFNQGVVTINLVDVACTAARDGSKSEEKFWQVLDERLELCHRALQCRHERLEGTLSDAAPILWQYGALARLKKGEPIDKLLHGGYSTLSLGYAGLWECVYEITGKKLTEKEGEEFGLRVMQRLNDACAEWKAAENIDYSIYGTPLESTTYKFAKCLQNRFGIIKGVTDRNYITNSYHIHVTEKIDAFSKLELESKFQKLSPGGAISYVEVPNMQQNIPAVLEVMKFIYNNIMYAELNTKSDYCQVCGYDGEIQIVEEDGKLVWRCPNCGNEDQSKMNVARRTCGYIGSQFWNQGRTQEIKERVLHL

SEQ ID NO: 839 - protein, 768 aa, unidentified
  REGION 1..768: note = Description of Unknown: uncultivated organism sequence
  REGION 1..768: note = Category: MG60 effectors
  REGION 1..768: note = Description: MG60-48 effector
MFCSCKKNLCVVIYIYNATKTYDCAKKLIVYKSIIKGAEVMKIIKRNGAEETFDRQKIKDAIAKANNETDGTPELTDRQIDYISLVIEDHCNEMNRALSVEEIQELVETHIILQGAPETAKRYIRYRFTRNLARASNTTDNQILSLIECNNEEVKQENSNKNPTVNSVQRDYMAGEVSKDLTKRILLPEDIVKAHEEGLIHFHDADYFAQHMHNCDLVNLEDMLQNGTVISGTMIEKPHSFSTACNIATQIIAQVASNQYGGQSISLAHLAPFVQISREKITRQVRAEMEEFGIDADDEQVKSLVEKRVRDEIKRGVQTIQYQVVTLLTTNGQAPFVTVFMYLNEAKNEQEKKDLAIIIEEVLKQRIKGTKNEVGVWVTPAFPKLIYVLEEDNITEDSRFWYLTKLAAECTAKRMVPDYISEKIMLKLKIDKNGNGNCYTCMGCRSFLTPYVDENGKPKYYGRFNQGVVTINLVDVACTAARDGNKNEEKFWQVLDERLELCHRALQCRHERLEGTLSDAAPILWQYGALARLKKGEPIDKLLHGGYSTLSLGYAGLWECVYEITGKKLTEKEGEEFGLRVMQRLNDACAEWKAAENIDYSIYGTPLESTTYKFAKCLQNRFGIIKGVTDRNYITNSYHIHVTEKIDAFSKLELESKFQKLSPGGAISYVEVPNMQQNIPAVLEVMKFIYNNIMYAELNTKSDYCQVCGYDGEIQIVEEDGKLVWRCPNCGNEDQSKMNVARRTCGYIGSQFWNQGRTQEIKERVLHL

SEQ ID NO: 840 - protein, 768 aa, unidentified
  REGION 1..768: note = Description of Unknown: uncultivated organism sequence
  REGION 1..768: note = Category: MG60 effectors
  REGION 1..768: note = Description: MG60-49 effector
MFCSCKKNLRVVIYIYNATKTYDCAKKLIVYKSIIKGAEVMKIIKRNGAEETFDRQKIKDAIAKANNETDGTPELTDRQIDYISLVIEDHCNEMNRALSVEEIQELVETHIILQGAPETAKRYIRYRFTRNLARASNTTDNQILSLIECNNEEVKQENSNKNPTVNSVQRDYMAGEVSKDLTKRILLPEDIVKAHEEGLIHFHDADYFAQHMHNCDLVNLEDMLQNGTVISGTMIEKPHSFSTACNIATQIIAQVASNQYGGQSISLAHLAPFVQISREKITRQVRAEIEEFGIAADDEQVKSLVEKRVRDEIKRGVQTIQYQVVTLLTTNGQAPFVTVFMYLNEAKNEQEKKDLAIIIEEVLKQRIKGTKNEVGVWVTPAFPKLIYVLEEDNITEDSRFWYLTKLAAECTAKRMVPDYISEKIMLELKIDKNGNGNCYTCMGCRSFLTPYVDENGKPKYYGRFNQGVVTINLVDVACTAARDGNKSEEKFWQVLDERLELCHRALQCRHERLEGTLSDAAPILWQYGALARLKKGEPIDKLLHGGYSTLSLGYAGLWECVYEITGKKLTEKEGEEFGLRVMQRLNDACAEWKAAENIDYSIYGTPLESTTYKFAKCLQNRFGIIKGVTDRNYITNSYHIHVTEKIDAFSKLELESKFQKLSPGGAISYVEVPNMQQNIPAVLEVMKFIYNNIMYAELNTKSDYCQVCGYDGEIQIVEEDGKLVWRCPNCGNEDQSKMNVARRTCGYIGSQFWNQGRTQEIKERVLHL

SEQ ID NO: 841 - protein, 768 aa, unidentified
  REGION 1..768: note = Description of Unknown: uncultivated organism sequence
  REGION 1..768: note = Category: MG60 effectors
  REGION 1..768: note = Description: MG60-50 effector
MFCSCKKNLRVVIYIYDATKTYDCAKKIIVYKSIIKGAEVMKIIKRNGAEETFDRQKIKDAIAKANNETDGTPELTDRQIDYISLVIEDHCNEMNRALSVEEIQELVETHIILQGAPETAKRYIRYRFTRNLARASNTTDNQILSLIECNNEEVKQENSNKNPTVNSVQRDYMAGEVSKDLTKRILLPEDIVKAHEEGLIHFHDADYFAQHMHNCDLVNLEDMLQNGTVISGTMIEKPHSFSTACNIATQIIAQVASNQYGGQSISLAHLAPFVQISREKITRQVRAEMEEFGIDADDEQVKSLVEKRVRDEIKRGVQTIQYQVVTLLTTNGQAPFVTVFMYLNEAKNEQEKKDLAIIIEEVLKQRIKGTKNEVGVWVTPAFPKLIYVLEEDNITEDSRFWYLTKLAAECTAKRMVPDYISEKIMLKLKVDKNGNGNCYTCMGCRSFLTPYVDENGKPKYYGRFNQGVVTINLVDVACTAARDGSKSEEKFWQVLDERLELCHRALQCRHERLEGTLSDAAPILWQYGALARLKKGEPIDKLLHGGYSTLSLGYAGLWECVYEITGKKLTEKEGEEFGLRVMQRLNDACAEWKAAENIDYSIYGTPLESTTYKFAKCLQNRFGIIKGVTDRNYITNSYHIHVTEKIDAFSKLELESKFQKLSPGGAISYVEVPNMQQNIPAVLEVMKFIYNNIMYAELNTKSDYCQVCGYDGEIQIVEEDGKLVWRCPNCGNEDQSKMNVARRTCGYIGSQFWNQGRTQEIKERVLHL

SEQ ID NO: 842 - protein, 768 aa, unidentified
  REGION 1..768: note = Description of Unknown: uncultivated organism sequence
  REGION 1..768: note = Category: MG60 effectors
  REGION 1..768: note = Description: MG60-51 effector
MFCSCKKKLCVVIYIYDATKTYDCAKKLIVYKSIIKGAEVMKIIKRNGAEETFDRQKIKDAIAKANNETDGTPELTDRQIDYISLVIEDHCNEMNRALSVEEIQELVETHIILQGAPETAKRYIRYRFTRNLARASNTTDNQILSLIECNNEEVKQENSNKNPTVNSVQRDYMAGEVSKDLTKRILLPEDIVKAHEEGLIHFHDADYFAQHMHNCDLVNLEDMLQNGTVISGTMIEKPHSFSTACNIATQIIAQVASNQYGGQSISLAHLAPFVQISREKITRQVRAEMEEFGIAADDEQVKSLVEKRVRDEIKRGVQTIQYQVVTLLTTNGQAPFVTVFMYLNEAKNEQEKKDLAIIIEEVLKQRIKGTKNEVGVWVTPAFPKLIYVLEEDNITEDSRFWYLTKLAAECTAKRMVPDYISEKIMLKLKIDKNGNGNCYTCMGCRSFLTPYVDENGKPKYYGRFNQGVVTINLVDVACTAARDGNKSEEKFWQVLDERLELCHRALQCRHERLEGTLSDAAPILWQYGALARLKKGEPIDKLLHGGYSTLSLGYAGLWECVYEITGKKLTEKEGEEFGLRVMQRLNDACAEWKAAENIDYSIYGTPLESTTYKFAKCLQNRFGIIKGVTDRNYITNSYHIHVTEKIDAFSKLELESKFQKLSPGGAISYVEVPNMQQNIPAVLEVMKFIYNNIMYAELNTKSDYCQVCGYDGEIQIVEEDGKLVWRCPNCGNEDQSKMNVARRTCGYIGSQFWNQGRTQEIKERVLHL

SEQ ID NO: 843 - protein, 760 aa, unidentified
  REGION 1..760: note = Description of Unknown: uncultivated organism sequence
  REGION 1..760: note = Category: MG60 effectors
  REGION 1..760: note = Description: MG60-52 effector
MLVVIYIYNATKTYDCAKKLIVYKSIIKGAEVMKIIKRNGAEETFDRQKIKDAIAKANNETDGTPELTDRQIDYISLVIEDHCNEMNRALSVEEIQELVETHIILQGAPETAKRYIRYRFTRNLARASNTTDNQILSLIECNNEEVKQENSNKNPTVNSVQRDYMAGEVSKDLTKRILLPEDIVKAHEEGLIHFHDADYFAQHMHNCDLVNLEDMLQNGTVISGTMIEKPHSFSTACNIATQIIAQVASNQYGGQSISLAHLAPFVQISREKITRQVRAEMEEFGIDADDEQVKSLVEKRVRDEIKRGVQTIQYQVVTLLTTNGQAPFVTVFMYLNEAKNEQEKKDLAIIIEEVLKQRIKGTKNEVGVWVTPAFPKLIYVLEEDNITEDSRFWYLTKLAAECTAKRMVPDYISEKIMLKLKIDKNGNGNCYTCMGCRSFLTPYVDENGKPKYYGRFNQGVVTINLVDVACTAARDGNNSEEKFWQVLDERLELCHRALQCRHERLEGTLSDAAPILWQYGALARLKKGEPIDKLLHGGYSTLSLGYAGLWECVYEITGKKLTEKEGEEFGLRVMQRLNDACAEWKAAENIDYSIYGTPLESTTYKFAKCLQNRFGIIKGVTDRNYITNSYHIHVTEKIDAFSKLELESKFQKLSPGGAISYVEVPNMQQNIPAVLEVMKFIYNNIMYAELNTKSDYCQVCGYDGEIQIVEEDGKLVWRCPNCGNEDQSKMNVARRTCGYIGSQFWNQGRTQEIKERVLHL

SEQ ID NO: 844 - protein, 768 aa, unidentified
  REGION 1..768: note = Description of Unknown: uncultivated organism sequence
  REGION 1..768: note = Category: MG60 effectors
  REGION 1..768: note = Description: MG60-53 effector
MFCSCKKNLCVVIYIYDATKTYDCAKNLIVYKSIIKGAEVMKIIKRNGAEETFDRQKIKDAIAKANNETDGTPELTDRQIDYISLVIEDHCNEMNRALSVEEIQELVETHIILQGAPETAKRYIRYRFTRNLARASNTTDNQILSLIECNNEEVKQENSNKNPTVNSVQRDYMAGEVSKDLTKRILLPEDIVKAHEEGLIHFHDADYFAQHMHNCDLVNLEDMLQNGTVISGTMIEKPHSFSTACNIATQIIAQVASNQYGGQSISLAHLAPFVQISREKITRQVRAEMEEFGIDADDEQVKSLVEKRVRDEIKRGVQTIQYQVVTLLTTNGQAPFVTVFMYLNEAKNEQEKKDLAIIIEEVLKQRIKGTKNEVGVWVTPAFPKLIYVLEEDNITEDSRFWYLTKLAAECTAKRMVPDYISEKIMLKLKIDKNGNGNCYTCMGCRSFLTPYVDENGKPKYYGRFNQGVVTINLVDVACTAARDGSKSEEKFWQVLDERLELCHRALQCRHERLEGTLSDAAPILWQYGALARLKKGEPIDKLLHGGYSTLSLGYAGLWECVYEITGKKLTEKEGEEFGLRVMQRLNDACAEWKAAENIDYSIYGTPLESTTYKFAKCLQNRFGIIKGVTDRNYITNSYHIHVTEKIDAFSKLELESKFQKLSPGGAISYVEVPNMQQNIPAVLEVMKFIYNNIMYAELNTKSDYCQVCGYDGEIQIVEEDGKLVWRCPNCGNEDQSKMNVARRTCGYIGSQFWNQGRTQEIKERVLHL

SEQ ID NO: 845 - protein, 768 aa, unidentified
  REGION 1..768: note = Description of Unknown: uncultivated organism sequence
  REGION 1..768: note = Category: MG60 effectors
  REGION 1..768: note = Description: MG60-54 effector
MFCSCKKNLRVVIYIYNATKTYDCAKKLIVYKSIIKGAEVMKIIKRNGAEETFDRQKIKDAIAKANNETDGTPELTDRQIDYISLVIEDHCNEMNRALSVEEIQELVETHIILQGAPETAKRYIRYRFTRNLARASNTTDNQILSLIECNNEEVKQENSNKNPTVNSVQRDYMAGEVSKDLTKRILLPEDIVKAHEEGLIHFHDADYFAQHMHNCDLVNLEDMLQNGTVISGTMIEKPHSFSTACNIATQIIAQVASNQYGGQSISLAHLAPFVQISREKITRQVRAEMEEFGIAADDEQVKSLVEKRVRDEIKRGVQTIQYQVVTLLTTNGQAPFVTVFMYLNEAKNEQEKKDLAIIIEEVLKQRIKGTKNEVGVWVTPAFPKLIYVLEEDNITEDSRFWYLTKLAAECTAKRMVPDYISEKIMLELKIDKNGNGNCYTCMGCRSFLTPYVDENGKPKYYGRFNQGVVTINLVDVACTAARDGNKSEEKFWQVLDERLELCHRALQCRHGRLEGTLSDAAPILWQYGALARLKKGEPIDKLLHGGYSTLSLGYAGLWECVYEITGKKLTEKEGEEFGLRVMQRLNDACAEWKAAENIDYSIYGTPLESTTYKFAKCLQNRFGIIKGVTDRNYITNSYHIHVTEKIDAFSKLELESKFQKLSPGGAISYVEVPNMQQNIPAVLEVMKFIYNNIMYAELNTKSDYCQVCGYDGEIQIVEEDGKLVWRCPNCGNEDQSKMNVARRTCGYIGSQFWNQGRTQEIKERVLHL

SEQ ID NO: 846 - protein, 768 aa, unidentified
  REGION 1..768: note = Description of Unknown: uncultivated organism sequence
  REGION 1..768: note = Category: MG60 effectors
  REGION 1..768: note = Description: MG60-55 effector
MFCSCKKNLRVVIYIYDATKTYDCAKKLIVYKSIIKGAEVMKIIKRNGAEETFDRQKIKDAIAKANNETDGTPELTDRQIDYISLVIEDHCNEMNRALSVEEIQELVETHIILQGAPETAKRYIRYRFTRNLARASNTTDNQILSLIECNNEEVKQENSNKNPTVNSVQRDYMAGEVSKDLTKRILLPEDIVKAHEEGLIHFHDADYFAQHMHNCDLVNLEDMLQNGTVISGTMIEKPHSFSTACNIATQIIAQVASNQYGGQSISLAHLAPFVQISREKITRQVRAEMEEFGIDADDEQVKSLVEKRVRDEIKRGVQTIQYQVVTLLTTNGQAPFVTVFMYLNEAKNEQEKKDLAIIIEEVLKQRIKGTKNEVGVWVTPAFPKLIYVLEEDNITEDSRFWYLTKLAAECTAKRMVPDYISEKIMLKLKIDKNGNGNCYTCMGCRSFLTPYVDENGKPKYYGRFNQGVVTINLVDVACTAARDGSKSEEKFWQVLDERLELCHRALQCRHERLEGTLSDAAPILWQYGALARLKKGEPIDKLLHGGYSTLSLGYAGLWECVYEITGKKLTEKEGEEFGLRVMQRLNDACAEWKAAENIDYSIYGTPLESTTYKFAKCLQNRFGIIKGVTDRNYITNSYHIHVTEKIDAFSKLELESKFQKLSPGGAISYVEVPNMQQNIPAVLEVMKFIYNNIMYAELNTKSDYCQVCGYDGEIQIVEEDGKLVWRCPNCGNEDQSKMNVARRTCGYIGSQFWNQGRTQEIKERVLHL

SEQ ID NO: 847 - protein, 768 aa, unidentified
  REGION 1..768: note = Description of Unknown: uncultivated organism sequence
  REGION 1..768: note = Category: MG60 effectors
  REGION 1..768: note = Description: MG60-56 effector
MFCSCKKNLCVVIYIYNATKTYDCAKKLIVYKSIIKGAEVMKIIKRNGAEETFDRQKIKDAIAKANNETDGTPELTDRQIDYISLVIEDHCNEMNRALSVEEIQELVETHIILQGAPETAKRYIRYRFTRNLARASNTTDNQILSLIECNNEEVKQENSNKNPTVNSVQRDYMAGEVSKDLTKRILLPEDIVKAHEEGLIHFHDADYFAQHMHNCDLVNLEDMLQNGTVISGTMIEKPHSFSTACNIATQIIAQVASNQYGGQSISLAHLAPFVQISREKITRQVRAEMEEFGIDADDEQVKSLVEKRVRDEIKRGVQTIQYQVVTLLTTNGQAPFVTVFMYLNEAKNEQEKKDLAIIIEEVLKQRIKGTKNEVGVWVTPAFPKLIYVLEEDNITEDSRFWYLTKLAAECTAKRMVPDYISEKIMLKLKIDKNGNGNCYTCMGCRSFLTPYVDENGKPKYYGRFNQGVVTINLVDVACTAARDGSKSEEKFWQVLDERLELCHRALQCRHERLEGTLSDAAPILWQYGALARLKKGEPIDKLLHGGYSTLSLGYAGLWECVYEITGKKLTEKEGEEFGLRVMQRLNDACAEWKAAENIDYSIYGTPLESTTYKFAKCLQNRFGIIKGVTDRNYITNSYHIHVTEKIDAFSKLELESKFQKLSPGGAISYVEVPNMQQNIPAVLEVMKFIYNNIMYAELNTKSDYCQVCGYDGEIQIVEEDGKLVWRCPNCGNEDQSKMNVARRTCGYIGSQFWNQGRTQEIKERVLHL

SEQ ID NO: 848 - protein, 768 aa, unidentified
  REGION 1..768: note = Description of Unknown: uncultivated organism sequence
  REGION 1..768: note = Category: MG60 effectors
  REGION 1..768: note = Description: MG60-57 effector
MFCSCKKNLRVVIYIYNATKTYDCAKKLIVYKSIIKGAEVMKIIKRNGAEETFDRQKIKDAIAKANNETDGTPELTDRQIDYISLVIEDHCNEMNRALSVEEIQELVETHIILQGAPETAKRYIRYRFTRNLARASNTTDNQILSLIECNNEEVKQENSNKNPTVNSVQRDYMAGEVSKDLTKRILLPEDIVKAHEEGLIHFHDADYFAQHMHNCDLVNLEDMLQNGTVISGTMIEKPHSFSTACNIATQIIAQVASNQYGGQSISLAHLAPFVQISREKITRQVRAEMEEFGIDADDEQVKSLVEKRVRDEIKRGVQTIQYQVVTLLTTNGQAPFVTVFMYLNEAKNEQEKKDLAIIIEEVLKQRIKGTKNEVGVWVTPAFPKLIYVLEEDNITEDSRFWYLTKLAAECTAKRMVPDYISEKIMLKLKIDKNGNGNCYTCMGCRSFLTPYVDENGKPKYYGRFNQGVVTINLVDVACTAARDGNKSEEKFWQVLDERLELCHRALQCRHERLEGTLSDAAPILWQYGALARLKKGEPIDKLLHGGYSTLSLGYAGLWECVYEIKGKKLTEKEGEEFGLRVMQRLNDACAEWKAAENIDYSIYGTPLESTTYKFAKCLQNRFGIIKGVTDRNYITNSYHIHVTEKIDAFSKLELESKFQKLSPGGAISYVEVPNMQQNIPAVLEVMKFIYNNIMYAELNTKSDYCQVCGYDGEIQIVEEDGKLVWRCPNCGNEDQSKMNVARRTCGYIGSQFWNQGRTQEIKERVLHL

SEQ ID NO: 849 - protein, 768 aa, unidentified
  REGION 1..768: note = Description of Unknown: uncultivated organism sequence
  REGION 1..768: note = Category: MG60 effectors
  REGION 1..768: note = Description: MG60-58 effector
MFCSCKKNLCVVIYIYDATKTYDCAKKLIVYKSIIKGAEVMKIIKRNGAEETFDRQKIKDAIAKANNETDGTPELTDRQIDYISLVIEDHCNEMNRALSVEEIQELVETHIILQGAPETAKRYIRYRFTRNLARASNTTDNQILSLIECNNEEVKQENSNKNPTVNSVQRVYMAGEVSKDLTKRILLPEDIVKAHEEGLIHFHDADYFAQHMHNCDLVNLEDMLQNGTVISGTMIEKPHSFSTACNIATQIIAQVASNQYGGQSISLAHLAPFVQISREKITRQVRAEMEEFGIDADDEQVKSLVEKRVRDEIKRGVQTIQYQVVTLLTTNGQAPFVTVFMYLNEAKNEQEKKDLAIIIEEVLKQRIKGTKNEVGVWVTPAFPKLIYVLEEDNITEDSRFWYLTKLAAECTAKRMVPDYISEKIMLKLKIDKNGNGNCYTCMGCRSFLTPYVDENGKPKYYGRFNQGVVTINLVDVACTAARDGSKSEEKFWQVLDERLELCHRALQCRHERLEGTLSDAAPILWQYGALARLKKGEPIDKLLHGGYSTLSLGYAGLWECVYEITGKKLTEKEGEEFGLRVMQRLNDACAEWKAAENIDYSIYGTPLESTTYKFAKCLQNRFGIIKGVTDRNYITNSYHIHVTEKIDAFSKLELESKFQKLSPGGAISYVEVPNMQQNIPAVLEVMKFIYNNIMYAELNTKSDYCQVCGYDGEIQIVEEDGKLVWRCPNCGNEDQSKMNVARRTCGYIGSQFWNQGRTQEIKERVLHL

SEQ ID NO: 850 - protein, 861 aa, unidentified
  REGION 1..861: note = Description of Unknown: uncultivated organism sequence
  REGION 1..861: note = Category: MG60 effectors
  REGION 1..861: note = Description: MG60-59 effector
MHKPPKLKRFNQEVLSKYQIYNSIFMTLPFDTITKTGIFLPLFHEVCKTGFSKKKNPTEIVNYFFKTYQDNPTEQEKNDLLFQFIQYIERQIVLFDAIEDAAFTTVNNMDGVGTMRNTKEAAVRDNKKEALQKHLENFKIRLVLTAHPTQFYPGPVLGIITDLANAIEKNDLLLINKLLGQLGKTPFFKHEKPTPYDEAVSLIWYLENVFYHAIADTYNYIQNNIFDGRAINNEIINLGFWPGGDRDGNPFVTTETTLKVAKRLKQILLKNYYKDILVLKKRLTFKGVESIVLELEKLLFENSVNPDLNTMISKDEFLKKLYQIKHILTTEHSSLYLEEITDLINKVHLFGYHFASLDLRQDSRVHHNVFSTIVTELQEKGSGLFPKNYLSLSEKEQIKILSTVAADILPEEFSDEMASKTLSSIRAIKTIQNENGEKGAHRYIISNNQTALNMMETFAMFKLSGFEENFSVDIIPLFETIEDLENAAEVMQTLYANPVYRNHLTHRDNKQTIMLGFSDGTKDGGYFMANWSIFKAKESITKISRNYGIDVIFFDGRGGPPARGGGKTHEFYASLGQTIENKEIQLTIQGQTISANFGIENAAQYNIEQLLSAGIANEIFNTAKNNLTSEDTKIMNDLAKTSYKAYSEFKNHPKFLPYLENRSTLKYYSKTNIGSRPSKRSQSSTLNFSDLRAIPFVGSWSQLKQNVPGFYGVGTALKKYEDNGEFEKLKQFYNHSDFFKALIGNSMMSLSKSFFELTEYMAEDEEYGEFWKMIYEEYKTTKRLILKLTGYTELMQNNPVGKASINIRENIVLPLLTIQQYALLKIQELQKDNNNPKLVEVYEKMVTRSLFGNINASRNSA

SEQ ID NO: 851 - protein, 768 aa, unidentified
  REGION 1..768: note = Description of Unknown: uncultivated organism sequence
  REGION 1..768: note = Category: MG60 effectors
  REGION 1..768: note = Description: MG60-60 effector
MFCSCKKNLCVVIYIYDATKTYDCAKKSIVYKSIIKGAEVMKIIKRNGAEETFDRQKIKDAIAKANNETDGTPELTDRQIDYISLVIEDHCNEMNRALSVEEIQELVETHIILQGAPETAKRYIRYRFTRNLARASNTTDNQILSLIECNNEEVKQENSNKNPTVNSVQRDYMAGEVSKDLTKRILLPEDIVKAHEEGLIHFHDADYFAQHMHNCDLVNLEDMLQNGTVISGTMIEKPHSFSTACNIATQIIAQVASNQYGGQSISLAHLAPFVQISREKITRQVRAEMEEFGIAADDEQVKSLVEKRVRDEIKRGVQTIQYQVVTLLTTNGQAPFVTVFMYLNEAKNEQEKKDLAIIIEEVLKQRIKGTKNEVGVWVTPAFPKLIYVLEEDNITEDSRFWYLTKLAAECTAKRMVPDYISEKIMLKLKIDKNGNGNCYTCMGCRSFLTPYVDENGKPKYYGRFNQGVVTINLVDVACTAARDGNKSEEKFWQVLDERLELCHRALQCRHERLEGTLSDAAPILWQYGALARLKKGEPIDKLLHGGYSTLSLGYAGLWECVYEITGKKLTEKEGEEFGLRVMQRLNDACAEWKAAENIDYSIYGTPLESTTYKFAKCLQNRFGIIKGVTDRNYITNSYHIHVTEKIDAFSKLELESKFQKLSPGGAISYVEVPNMQQNIPAVLEVMKFIYNNIMYAELNTKSDYCQVCGYDGEIQIVEEDGKLVWRCPNCGNEDQSKMNVARRTCGYIGSQFWNQGRTQEIKERVLHL

SEQ ID NO: 852 - protein, 768 aa, unidentified
  REGION 1..768: note = Description of Unknown: uncultivated organism sequence
  REGION 1..768: note = Category: MG60 effectors
  REGION 1..768: note = Description: MG60-61 effector
MFCSCKKNLCVVIYIYDATKTYDCAKKLIVYKSIIKGAEVMKIIKRNGAEETFDRQKIKDAIAKANNETDGTPELTDRQIDYISLVIEDHCNEMNRALSVEEIQELVETHIILQGAPETAKRYIRYRFTRNLARASNTTDNQILSLIECNNEEVKQENSNKNPTVNSVQRDYMAGEVSKDLTKRILLPEDIVKAHEEGLIHFHDADYFAQHMHNCDLVNLEDMLQNGTVISGTMIEKPHSFSTACNIATQIIAQVASNQYGGQSISLAHLAPFVQISREKITRQVRAEMEEFGIDADDEQVKSLVEKRVRDEIKRGVQTIQYQVVTLLTTNGQAPFVTVFMYLNEAKNEQEKKDLAIIIEEVLKQRIKGTKNEVGVWVTPAFPKLIYVLEEDNITEDSRFWYLTKLAAECTAKRMVPDYISEKIMLKLKIDKNGNGNCYTCMGCRSFLTPYVDENGKPKYYGRFNQGVVTINLVDVACTAARDGSKSEEKFWQVLDERLELCHRALQCRHERLEGTLSDAAPILWQYGALARLKKGEPIDKLLHGGYSTLSLGYAGLWECVYEITGKKLTEKEGEEFGLRVMQRLNDACAEWKAAENIDYSIYGTPLESTTYKFAKCLQNRFGIIKGVTDRNYITNSYHIHVTEKIDAFSKLELESKFQKLSPGGAISYVEVPNMQQNIPAVLEVMKFIYNNIMYAELNTKSDYCQVCGYDGEIQIVEEDGKLVWRCPNCGNEDQSKMNVARRTCGYIGSQFWNQGRTQEIKERVLHL

SEQ ID NO: 853 - protein, 768 aa, unidentified
  REGION 1..768: note = Description of Unknown: uncultivated organism sequence
  REGION 1..768: note = Category: MG60 effectors
  REGION 1..768: note = Description: MG60-62 effector
MFCSCKKNLCVVIYIYDATKTYDCAKKSIVYKSIIKGAEVMKIIKRNGAEETFDRQKIKDAIAKANNETDGTPELTDRQIDYISLVIEDHCNEMNRALSVEEIQELVETHIILQGAPETAKRYIRYRFTRNLARASNTTDNQILSLIECNNEEVKQENSNKNPTVNSVQRDYMAGEVSKDLTKRILLPEDIVKAHEEGLIHFHDADYFAQHMHNCDLVNLEDMLQNGTVISGTMIEKPHSFSTACNIATQIIAQVASNQYGGQSISLAHLAPFVQISREKITRQVRAEMEEFGIDADDEQVKSLVEKRVRDEIKRGVQTIQYQVVTLLTTNGQAPFVTVFMYLNEAKNEQEKKDLAIIIEEVLKQRIKGTKNEVGVWVTPAFPKLIYVLEEDNITEDSRFWYLTKLAAECTAKRMVPDYISEKIMLKLKIDKNGNGNCYTCMGCRSFLTPYVDENGKPKYYGRFNQGVVTINLVDVACTAARDGSKSEEKFWQVLDERLELCHRALQCRHERLEGTLSDAAPILWQYGALARLKKGEPIDKLLHGGYSTLSLGYAGLWECVYEITGKKLTEKEGEEFGLRVMQRLNDACAEWKAAENIDYSIYGTPLESTTYKFAKCLQNRFGIIKGVTDRNYITNSYHIHVTEKIDAFSKLELESKFQKLSPGGAISYVEVPNMQQNIPAVLEVMKFIYNNIMYAELNTKSDYCQVCGYDGEIQIVEEDGKLVWRCPNCGNEDQSKMNVARRTCGYIGSQFWNQGRTQEIKERVLHL

SEQ ID NO: 854 - protein, 768 aa, unidentified
  REGION 1..768: note = Description of Unknown: uncultivated organism sequence
  REGION 1..768: note = Category: MG60 effectors
  REGION 1..768: note = Description: MG60-63 effector
MFCSCKKNLCVVIYIYDATKTYDCAKKLIVYKSIIKGAEVMKIIKRNGAEETFDRQKIKDAIAKANNETDGAPELTDRQIDYISLVIEDHCNEMNRALSVEEIQELVETHIILQGAPETAKRYIRYRFTRNLARASNTTDNQILSLIECNNEEVKQENSNKNPTVNSVQRDYMAGEVSKDLTKRILLPEDIVKAHEEGLIHFHDADYFAQHMHNCDLVNLEDMLQNGTVISGTMIEKPHSFSTACNIATQIIAQVASNQYGGQSISLAHLAPFVQISREKITRQVRAEMEEFGIDADDEQVKNLVEKRVRDEIKRGVQTIQYQVVTLLTTNGQAPFVTVFMYLNEAKNEQEKKDLAIIIEEVLKQRIKGTKNEVGVWVTPAFPKLIYVLEEDNITEDSRFWYLTKLAAECTAKRMVPDYISEKIMLKLKIDKNGNGNCYTCMGCRSFLTPYVDENGKPKYYGRFNQGVVTINLVDVACTAARDGSKSEEKFWQVLDERLELCHRALQCRHERLEGTLSDAAPILWQYGALARLKKGEPIDKLLHGGYSTLSLGYAGLWECVYEITGKKLTEKEGEEFGLRVMQRLNDACAEWKAAENIDYSIYGTPLESTTYKFAKCLQNRFGIIKGVTDRNYITNSYHIHVTEKIDAFSKLELESKFQKLSPGGAISYVEVPNMQQNIPAVLEVMKFIYNNIMYAELNTKSDYCQVCGYDGEIQIVEEDGKLVWRCPNCGNEDQSKMNVARRTCGYIGSQFWNQGRTQEIKERVLHL

SEQ ID NO: 855 - protein, 760 aa, unidentified
  REGION 1..760: note = Description of Unknown: uncultivated organism sequence
  REGION 1..760: note = Category: MG60 effectors
  REGION 1..760: note = Description: MG60-64 effector
MLVVIYIYNATKTYDCAKKLIVYKSIIKGAEVMKIIKRNGAEETFDRQKIKDAIAKANNETDGTPELTDRQIDYISLVIEDHCNEMNRALSVEEIQELVETHIILQGAPETAKRYIRYRFTRNLARASNTTDNQILSLIECNNEEVKQENSNKNPTVNSVQRDYMAGEVSKDLTKRILLPEDIVKAHEEGLIHFHDADYFAQHMHNCDLVNLEDMLQNGTVISGTMIEKPHSFSTACNIATQIIAQVASNQYGGQSISLAHLAPFVQISREKITRQVRAEMEEFGIAADDEQVKSLVEKRVRDEIKRGVQTIQYQVVTLLTTNGQAPFVTVFMYLNEAKNEQEKKDLAIIIEEVLKQRIKGTKNEVGVWVTPAFPKLIYVLEEDNITEDSRFWYLTKLAAECTAKRMVPDYISEKIMLKLKIDKNGNGNCYTCMGCRSFLTPYVDENGKPKYYGRFNQGVVTINLVDVACTAARDGNKSEEKFWQVLDERLELCHRALQCRHERLEGTLSDAAPILWQYGALARLKKGEPIDKLLHGGYSTLSLGYAGLWECVYEITGKKLTEKEGEEFGLRVMQRLNDACAEWKAAENIDYSIYGTPLESTTYKFAKCLQNRFGIIKGVTDRNYITNSYHIHVTEKIDAFSKLELESKFQKLSPGGAISYVEVPNMQQNIPAVLEVMKFIYNNIMYAELNTKSDYCQVCGYDGEIQIVEEDGKLVWRCPNCGNEDQSKMNVARRTCGYIGSQFWNQGRTQEIKERVLHL

SEQ ID NO: 856 - protein, 768 aa, unidentified
  REGION 1..768: note = Description of Unknown: uncultivated organism sequence
  REGION 1..768: note = Category: MG60 effectors
  REGION 1..768: note = Description: MG60-65 effector
MFCSCKKNLCVVIYIYDATKTYDCAKKLIVYKSIIKGAEVMKIIKRNGAEETFDRQKIKDAISKANNETDGTPELTDRQIDYISLVIEDHCNEMNRALSVEEIQELVETHIILQGAPETAKRYIRYRFTRNLARASNTTDNQILSLIECNNEEVKQENSNKNPTVNSVQRDYMAGEVSKDLTKRILLPEDIVKAHEEGLIHFHDADYFAQHMHNCDLVNLEDMLQNGTVISGTMIEKPHSFSTACNIATQIIAQVASNQYGGQSISLAHLAPFVQISREKITRQVRAEMEEFGIDADDEQVKSLVEKRVRDEIKRGVQTIQYQVVTLLTTNGQAPFVTVFMYLNEAKNEQEKKDLAIIIEEVLKQRIKGTKNEVGVWVTPAFPKLIYVLEEDNITEDSRFWYLTKLAAECTAKRMVPDYISEKIMLKLKIDKNGNGNCYTCMGCRSFLTPYVDENGKPKYYGRFNQGVVTINLVDVACTAARDGNKSEEKFWQVLDERLELCHRALQCRHERLEGTLSDAAPILWQYGALARLKKGEPIDKLLHGGYSTLSLGYAGLWECVYEITGKKLTEKEGEEFGLRVMQRLNDACAEWKAAENIDYSIYGTPLESTTYKFAKCLQNRFGIIKGVTDRNYITNSYHIHVTEKIDAFSKLELESKFQKLSPGGAISYVEVPNMQQNIPAVLEVMKFIYNNIMYAELNTKSDYCQVCGYDGEIQIVEEDGKLVWRCPNCGNEDQSKMNVARRTCGYIGSQFWNQGRTQEIKERVLHL

SEQ ID NO: 857 - protein, 769 aa, unidentified
  REGION 1..769: note = Description of Unknown: uncultivated organism sequence
  REGION 1..769: note = Category: MG60 effectors
  REGION 1..769: note = Description: MG60-66 effector
MKVIKRDGTIVEYDREKIRIAIEKANKEVSRKEKATDSEIEEIMSYIEDLKKGRILVEDIQDIIEEKLMEIKRYELAKKYITYRYTRALVRKANTTDQSIKELIEGESEYWNNENANKNARVVTTQRDYLAGITSTDITRRFLLPEDVVKAHDEGIIHFHDADYFAQNALTNCELINLEDMLQNGTIMNGVMIEKPHRFITACTIATQIILAVTSSTYGGATVSLAHLAPFVRSSYEKYYKKYKENGLSKEQCEKFAKEDTKKEVADGVQTFNYQVNSMTNTNGQAPFLSVCMYLGETDEYKEELAMIIEEFLNQRILGFKNEKGVYITPAFPKLLYVLEEDNIHENSKYWYLTELAAKCTAKRMVPDYISEKIMKQMKVDANGDGQCYPCMGCRSFLTPYIDPVTKKPKYYGRFNQGVVTINLVDVALSSGKDLKKFWKIYDERLELCHKALQARHERLAKATSDIAPILWQHGAFARLPKGASIHPLLHGGYSTISLGYAGLYECVKYMTGKSHTDNGDGKDFAIEVMKKMNEKCAEWKEAEDIDYSVYGTPIESTTYKFAKCLQKRFGKIKGITDKNYITNSYHVPVFEEIDAFSKLKLESEFQRLSPGGAISYVETPNLQNNLEVVLQIMKFIYDNIMYAELNTKSDYCQKCGYTGEILIDDNLEWYCPNCGNRDHNTLNVARRTCGYIGSNFWNKGRTQEIKERVLHIDNKDDDCDCDECNCDHANTDTSKEEKSEEKQMNFMDYDVEEEITKSKKHMKQPAMV

SEQ ID NO: 858 - protein, 768 aa, unidentified
  REGION 1..768: note = Description of Unknown: uncultivated organism sequence
  REGION 1..768: note = Category: MG60 effectors
  REGION 1..768: note = Description: MG60-67 effector
MFCSCKKNLCVVIYIYDATKTYDCAKKLIVYKSIIKGAEVMKIIKRNGAEETFDRQKIKDAIAKANNETDGTPELTDRQIDYISLVIEDHCNEMNRALSVEEIQELVETHIILQGAPETAKRYIRYRFTRNLARASNTTDNQILSLIECNNEEVKQENSNKNPTVNSVQRDYMAGEVSKDLTKRILLPEDIVKAHEEGLIHFHDADYFAQHMHNCDLVNLEDMLQNGTVISGTMIEKPHSFSTACNIATQIIAQVASNQYGGQSISLAHLAPFVQISREKITRQVRAEMEEFGIDADDEQVKSLVEKRVRDEIKRGVQTIQYQVVTLLTTNGQAPFVTVFMYLNEAKNEQEKKDLAIIIEEVLKQRIKGTKNEVGVWVTPAFPKLIYVLEEDNITEDSRFWYLTKLAAECTAKRMVPDYISEKIMLKLKIDKNGNGNCYTCMGCRSFLTPYVDENGKPKYYGRFNQGVVTINLVDVACTAARDGNKSEEKFWQVLDERLELCHRALQCRHERLEGTLSDAAPILWQYGALARLKKGEPIDKLLHGGYSTLSLGYAGLWECVYEIKGKKLTEKEGEEFGLRVMQRLNDACAEWKAAENIDYSIYGTPLESTTYKFAKCLQNRFGIIKGVTDRNYITNSYHIHVTEKIDAFSKLELESKFQKLSPGGAISYVEVPNMQQNIPAVLEVMKFIYNNIMYAELNTKSDYCQVCGYDGEIQIVEEDGKLVWRCPNCGNEDQSKMNVARRTCGYIGSQFWNQGRTQEIKERVLHL

SEQ ID NO: 859 - protein, 768 aa, unidentified
  REGION 1..768: note = Description of Unknown: uncultivated organism sequence
  REGION 1..768: note = Category: MG60 effectors
  REGION 1..768: note = Description: MG60-68 effector
MFCSCKKNLCVVIYIYNATKTYDCAKKLIVYKSIIKGAEVMKIIKRNGAEETFDRQKIKDAIAKANNETDGTPELTDRQIDYISLVIEDHCNEMNRALSVEEIQELVETHIILQGAPETAKRYIRYRFTRNLARASNTTDNQILSLIECNNEEVKQENSNKNPTVNSVQRDYMAGEVSKDLTKRILLPEDIVKAHEEGLIHFHDADYFAQHMHNCDLVNLEDMLQNGTVISGTMIEKPHSFSTACNIATQIIAQVASNQYGGQSISLAHLAPFVQISREKITRQVRAEMEEFGIAADDEQVKSLVEKRVRDEIKRGVQTIQYQVVTLLTTNGQAPFVTVFMYLNEAKNEQEKKDLAIIIEEVLKQRIKGTKNEVGVWVTPAFPKLIYVLEEDNITEDSRFWYLTKLAAECTAKRMVPDYISEKIMLKLKIDKNGNGNCYTCMGCRSFLTPYVDENGKPKYYGRFNQGVVTINLVDVACTAARDGNKSEEKFWQVLDERLELCHRALQCRHERLEGTLSDAAPILWQYGALARLKKGEPIDKLLHGGYSTLSLGYAGLWECVYEITGKKLTEKEGEEFGLRVMQRLNDACAEWKAAENIDYSIYGTPLESTTYKFAKCLQNRFGIIKGVTDRNYITNSYHIHVTEKIDAFSKLELESKFQKLSPGGAISYVEVPNMQQNIPAVLEVMKFIYNNIMYAELNTKSDYCQVCGYDGEIQIVEEDGKLVWRCPNCGNEDQSKMNVARRTCGYIGSQFWNQGRTQEIKERVLHL

SEQ ID NO: 860 - protein, 768 aa, unidentified
  REGION 1..768: note = Description of Unknown: uncultivated organism sequence
  REGION 1..768: note = Category: MG60 effectors
  REGION 1..768: note = Description: MG60-69 effector
MFCSCKKNLCVVIYIYDATKTYDCAKKLIVYKSIIKGAEVMKIIKRNGAEETFDRQKIKDAIAKANNETDGTPELTDRQIDYISLVIEDHCNEMNRALSVEEIQELVETHIILQGAPETAKRYIRYRFTRNLARASNTTDNQILSLIECNNEEVKQENSNKNPTVNSVQRDYMAGEVSKDLTKRILLPEDIVKAHEEGLIHFHDADYFAQHMHNCDLVNLEDMLQNGTVISGTMIEKPHSFSTACNIATQIIAQVASNQYGGQSISLAHLAPFVQISREKITRQVRAEMEEFGIAADDEQVKSLVEKRVRDEIKRGVQTIQYQVVTLLTTNGQAPFVTVFMYLNEAKNEQEKKDLAIIIEEVLKQRIKGTKNEVGVWVTPAFPKLIYVLEEDNITEDSRFWYLTKLAAECTAKRMVPDYISEKIMLKLKVDKNGNGNCYTCMGCRSFLTPYVDENGKPKYYGRFNQGVVTINLVDVACTAARDGSKSEEKFWQVLDERLELCHRALQCRHERLEGTLSDAAPILWQYGALARLKKGEPIDKLLHGGYSTLSLGYAGLWECVYEITGKKLTEKEGEEFGLRVMQRLNDACAEWKAAENIDYSIYGTPLESTTYKFAKCLQNRFGIIKGVTDRNYITNSYHIHVTEKIDAFSKLELESKFQKLSPGGAISYVEVPNMQQNIPAVLEVMKFIYNNIMYAELNTKSDYCQVCGYDGEIQIVEEDGKLVWRCPNCGNEDQSKMNVARRTCGYIGSQFWNQGRTQEIKERVLHL

SEQ ID NO: 861 - protein, 768 aa, unidentified
  REGION 1..768: note = Description of Unknown: uncultivated organism sequence
  REGION 1..768: note = Category: MG60 effectors
  REGION 1..768: note = Description: MG60-70 effector
MFCSCKKKLCVVIYIYNATKTYDCAKKLIVYKSIIKGAEVMKIIKRNGAEETFDRQKIKDAIAKANNETDGTPELTDRQIDYISLVIEDHCNEMNRALSVEEIQELVETHIILQGAPETAKRYIRYRFTRNLARASNTTDNQILSLIECNNEEVKQENSNKNPTVNSVQRDYMAGEVSKDLTKRILLPEDIVKAHEEGLIHFHDADYFAQHMHNCDLVNLEDMLQNGTVISGTMIEKPHSFSTACNIATQIIAQVASNQYGGQSISLAHLAPFVQISREKITRQVRAEMEEFGIDADDEQVKSLVEKRVRDEIKRGVQTIQYQVVTLLTTNGQAPFVTVFMYLNEAKNEQEKKDLAIIIEEVLKQRIKGTKNEVGVWVTPAFPKLIYVLEEDNITEDSRFWYLTKLAAECTAKRMVPDYISEKIMLKLKIDKNGNGNCYTCMGCRSFLTPYVDENGKPKYYGRFNQGVVTINLVDVACTAARDGSKSEEKFWQVLDERLELCHRALQCRHERLEGTLSDAAPILWQYGALARLKKGEPIDKLLHGGYSTLSLGYAGLWECVYEITGKKLTEKEGEEFGLRVMQRLNDACAEWKAAENIDYSIYGTPLESTTYKFAKCLQNRFGIIKGVTDRNYITNSYHIHVTEKIDAFSKLELESKFQKLSPGGAISYVEVPNMQQNIPAVLEVMKFIYNNIMYAELNTKSDYCQVCGYDGEIQIVEEDGKLVWRCPNCGNEDQSKMNVARRTCGYIGSQFWNQGRTQEIKERVLHL

SEQ ID NO: 862 - protein, 768 aa, unidentified
  REGION 1..768: note = Description of Unknown: uncultivated organism sequence
  REGION 1..768: note = Category: MG60 effectors
  REGION 1..768: note = Description: MG60-71 effector
MFCSCKKNLRVVIYIYNATKTYDCAKKLIVYKSIIKGAEVMKIIKRNGAEETFDRQKIKDAIAKANNETDGTPELTDRQIDYISLVIEDHCNEMNRALSVEEIQELVETHIILQGAPETAKRYIRYRFTRNLARASNTTDNQILSLIECNNEEVKQENSNKNPTVNSVQRDYMAGEVSKDLTKRILLPEDIVKAHEEGLIHFHDADYFAQHMHNCDLVNLEDMLQNGTVISGTMIEKPHSFSTACNIATQIIAQVASNQYGGQSISLAHLAPFVQISREKITRQVRAEMEEFGIAADDEQVKSLVEKRVRDEIKRGVQTIQYQVVTLLTTNGQAPFVTVFMYLNEAKNEQEKKDLAIIIEEVLKQRIKGTKNEVGVWVTPAFPKLIYVLEEDNITEDSRFWYLTKLAAECTAKRMVPDYISEKIMLELKIDKNGNGNCYTCMGCRSFLTPYVDENGKPKYYGRFNQGVVTINLVDVACTAARDGNKSEEKFWQVLDERLELCHRALQCRHERLEGTLSDAAPILWQYGALARLKKGEPIDKLLHGGYSTLSLGYAGLWECVYEITGKKLTEKEGEEFGLRVMQRLNDACAEWKAAENIDYSIYGTPLESTTYKFAKCLQNRFGIIKGVTDRNYITNSYHIHVTEKIDAFSKLELESKFQKLSPGGAISYVEVPNMQQNIPAVLEVMKFIYNNIMYAELNTKSDYCQVCGYDGEIQIVEEDGKLVWRCPNCGNEDQSKMNVARRTCGYIGSQFWNQGRTQEIKERVLHL

SEQ ID NO: 863 - protein, 768 aa, unidentified
  REGION 1..768: note = Description of Unknown: uncultivated organism sequence
  REGION 1..768: note = Category: MG60 effectors
  REGION 1..768: note = Description: MG60-72 effector
MFCSCKKNLCVVIYIYDATKTYDCAKKLIVYKSIIKGAEVMKIIKRNGAEETFDRQKIKDAIAKANNETDGTPELTDRQIDYISLVIEDHCNEMNRALSVEEIQELVETHIILQGAPETAKRYIRYRFTRNLARASNTTDNQILSLIECNNEEVKQENSNKNPTVNSVQRDYMAGEVSKDLTKRILLPEDIVKAHEEGLIHFHDADYFAQHMHNCDLVNLEDMLQNGTVISGTMIEKPHSFSTACNIATQIIAQVASNQYGGQSISLAHLAPFVQISREKITRQVRAEMEEFGIAADDEQVKSLVEKRVRDEIKRGVQTIQYQVVTLLTTNGQAPFVTVFMYLNEAKNEQEKKDLAIIIEEVLKQRIKGTKNEVGVWVTPAFPKLIYVLEEDNITEDSRFWYLTKLAAECTAKRMVPDYISEKIMLKLKIDKNGNGNCYTCMGCRSFLTPYVDENGKPKYYGRFNQGVVTINLVDVACTAARDGNKSEEKFWQVLDERLELCHRALQCRHERLEGTLSDAAPILWQYGALARLKKGEPIDKLLHGGYSTLSLGYAGLWECVYEITGKKLTEKEGEEFGLRVMQRLNDACAEWKAAENIDYSIYGTPLESTTYKFAKCLQNRFGIIKGVTDRNYITNSYHIHVTEKIDAFSKLELESKFQKLSPGGAISYVEVPNMQQNIPAVLEVMKFIYNNIMYAELNTKSDYCQVCGYDGEIQIVEEDGKLVWRCPNCGNEDQSKMNVARRTCGYIGSQFWNQGRTQEIKERVLHL

SEQ ID NO: 864 - protein, 768 aa, unidentified
  REGION 1..768: note = Description of Unknown: uncultivated organism sequence
  REGION 1..768: note = Category: MG60 effectors
  REGION 1..768: note = Description: MG60-73 effector
MFCSCKKNLCVVIYIYNATKTYDCAKKLIVYKSIIKGAEVMKIIKRNGAEETFDRQKIKDAIAKANNETDGTPELTDRQIDYISLVIEDHCNEMNRALSVEEIQELVETHIILQGAPETAKRYIRYRFTRNLARASNTTDNQILSLIECNNEEVKQENSNKNPTVNSVQRDYMAGEVSKDLTKRILLPEDIVKAHEEGLIHFHDADYFAQHMHNCDLVNLEDMLQNGTVISGTMIEKPHSFSTACNIATQIIAQVASNQYGGQSISLAHLAPFVQISREKITRQVRAEMEEFGIDADDEQVKSLVEKRVRDEIKRGVQTIQYQVVTLLTTNGQAPFVTVFMYLNEAKNEQEKKDLAIIIEEVLKQRIKGTKNEVGVWVTPAFPKLIYVLEEDNITEDSRFWYLTKLAAECTAKRMVPDYISEKIMLKLKIDKNGNGNCYTCMGCRSFLTPYVDENGNPKYYGRFNQGVVTINLVDVACTAARDGSKSEEKFWQVLDERLELCHRALQCRHERLEGTLSDAAPILWQYGALARLKKGEPIDKLLHGGYSTLSLGYAGLWECVYEITGKKLTEKEGEEFGLRVMQRLNDACAEWKAAENIDYSIYGTPLESTTYKFAKCLQNRFGIIKGVTDRNYITNSYHIHVTEKIDAFSKLELESKFQKLSPGGAISYVEVPNMQQNIPAVLEVMKFIYNNIMYAELNTKSDYCQVCGYDGEIQIVEEDGKLVWRCPNCGNEDQSKMNVARRTCGYIGSQFWNQGRTQEIKERVLHL

SEQ ID NO: 865 - protein, 768 aa, unidentified
  REGION 1..768: note = Description of Unknown: uncultivated organism sequence
  REGION 1..768: note = Category: MG60 effectors
  REGION 1..768: note = Description: MG60-74 effector
MFCSCKKNLCVVIYIYNATKTYDCAKKIIVYKSIIKGAEVMKIIKRNGAEETFDRQKIKDAISKANNETDGTPELTDRQIDYISLVIEDHCNEMNRALSVEEIQELVETHIILQGAPETAKRYIRYRFTRNLARASNTTDNQILSLIECNNEEVKQENSNKNPTVNSVQRDYMAGEVSKDLTKRILLPEDIVKAHEEGLIHFHDADYFAQHMHNCDLVNLEDMLQNGTVISGTMIEKPHSFSTACNIATQIIAQVASNQYGGQSISLAHLAPFVQISREKITRQVRAEMEEFGIAADDEQVKSLVEKRVRDEIKRGVQTIQYQVVTLLTTNGQAPFVTVFMYLNEAKNEQEKKDLAIIIEEVLKQRIKGTKNEVGVWVTPAFPKLIYVLEEDNITEDSRFWYLTKLAAECTAKRMVPDYISEKIMLKLKIDKNGNGNCYTCMGCRSFLTPYVDENGKPKYYGRFNQGVVTINLVDVACTAARDGNKSEEKFWQVLDERLELCHRALQCRHERLEGTLSDAAPILWQYGALARLKKGEPIDKLLHGGYSTLSLGYAGLWECVYEITGKKLTEKEGEEFGLRVMQRLNDACAEWKAAENIDYSIYGTPLESTTYKFAKCLQNRFGIIKGVTDRNYITNSYHIHVTEKIDAFSKLELESKFQKLSPGGAISYVEVPNMQQNIPAVLEVMKFIYNNIMYAELNTKSDYCQVCGYDGEIQIVEEDGKLVWRCPNCGNEDQSKMNVARRTCGYIGSQFWNQGRTQEIKERVLHL

SEQ ID NO: 866 - protein, 768 aa, unidentified
  REGION 1..768: note = Description of Unknown: uncultivated organism sequence
  REGION 1..768: note = Category: MG60 effectors
  REGION 1..768: note = Description: MG60-75 effector
MFCSCKKKLCVVIYIYDATKTYDCAKKSIVYKSIIKGAEVMKIIKRNGAEETFDRQKIKDAIAKANNETDGTPELTDRQIDYISLVIEDHCNEMNRALSVEEIQELVETHIILQGAPETAKRYIRYRFTRNLARASNTTDNQILSLIECNNEEVKQENSNKNPTVNSVQRDYMAGEVSKDLTKRILLPEDIVKAHEEGLIHFHDADYFAQHMHNCDLVNLEDMLQNGTVISGTMIEKPHSFSTACNIATQIIAQVASNQYGGQSISLAHLAPFVQISREKITRQVRAEMEEFGIDADDEQVKSLVEKRVRDEIKRGVQTIQYQVVTLLTTNGQAPFVTVFMYLNEAKNEQEKKDLAIIIEEVLKQRIKGTKNEVGVWVTPAFPKLIYVLEEDNITEDSRFWYLTKLAAECTAKRMVPDYISEKIMLKLKIDKNGNGNCYTCMGCRSFLTPYVDENGKPKYYGRFNQGVVTINLVDVACTAARDGNKSEEKFWQVLDERLELCHRALQCRHERLEGTLSDAAPILWQYGALARLKKGEPIDKLLHGGYSTLSLGYAGLWECVYEITGKKLTEKEGEEFGLRVMQRLNDACAEWKAAENIDYSIYGTPLESTTYKFAKCLQNRFGIIKGVTDRNYITNSYHIHVTEKIDAFSKLELESKFQKLSPGGAISYVEVPNMQQNIPAVLEVMKFIYNNIMYAELNTKSDYCQVCGYDGEIQIVEEDGKLVWRCPNCGNEDQSKMNVARRTCGYIGSQFWNQGRTQEIKERVLHL

SEQ ID NO: 867 - protein, 768 aa, unidentified
  REGION 1..768: note = Description of Unknown: uncultivated organism sequence
  REGION 1..768: note = Category: MG60 effectors
  REGION 1..768: note = Description: MG60-76 effector
MFCSCKKNLRVVIYICNAIKTYDRAKKLIVYKSIVKGVEVMKIIKRNGAEETFDRQKIKDAIAKANNETDGTPELTDRQIDYISLVIEDHCNEMNRALSVEEIQELVETHIILQGAPETAKRYIRYRFTRNLARASNTTDNQILSLIECNNEEVKQENSNKNPTVNSVQRDYMAGEVSKDLTKRILLPEDIVKAHEEGLIHFHDADYFAQHMHNCDLVNLEDMLQNGTVISGTMIEKPHSFSTACNIATQIIAQVASNQYGGQSISLAHLAPFVQISREKITRQVRAEMEEFGIAADDEQVKSLVEKRVRDEIKRGVQTIQYQVVTLLTTNGQAPFVTVFMYLNEAKNEQEKKDLAIIIEEVLKQRIKGTKNEVGVWVTPAFPKLIYVLEEDNITEDSRFWYLTKLAAECTAKRMVPDYISEKIMLKLKIDKNGNGNCYTCMGCRSFLTPYVDENGKPKYYGRFNQGVVTINLVDVACTAARDGNKSEEKFWQVLDERLELCHRALQCRHERLEGTLSDAAPILWQYGALARLKKGEPIDKLLHGGYSTLSLGYAGLWECVYEITGKKLTEKEGEEFGLRVMQRLNDACAEWKAAENIDYSIYGTPLESTTYKFAKCLQNRFGIIKGVTDRNYITNSYHIHVTEKIDAFSKLELESKFQKLSPGGAISYVEVPNMQQNIPAVLEVMKFIYNNIMYAELNTKSDYCQVCGYDGEIQIVEEDGKLVWRCPNCGNEDQSKMNVARRTCGYIGSQFWNQGRTQEIKERVLHL

SEQ ID NO: 868 - protein, 768 aa, unidentified
  REGION 1..768: note = Description of Unknown: uncultivated organism sequence
  REGION 1..768: note = Category: MG60 effectors
  REGION 1..768: note = Description: MG60-77 effector
MFCSCKKKLCVVIYIYDATKTYDCAKKLIVYKSIIKGAEVMKIIKRNGAEETFDRQKIKDAISKANNETDGTPELTDRQIDYISLVIEDHCNEMNRALSVEEIQELVETHIILQGAPETAKRYIRYRFTRNLARASNTTDNQILSLIECNNEEVKQENSNKNPTVNSVQRDYMAGEVSKDLTKRILLPEDIVKAHEEGLIHFHDADYFAQHMHNCDLVNLEDMLQNGTVISGTMIEKPHSFSTACNIATQIIAQVASNQYGGQSISLAHLAPFVQISREKITRQVRAEMEEFGIDADDEQVKSLVEKRVRDEIKRGVQTIQYQVVTLLTTNGQAPFVTVFMYLNEAKNEQEKKDLAIIIEEVLKQRIKGTKNEVGVWVTPAFPKLIYVLEEDNITEDSRFWYLTKLAAECTAKRMVPDYISEKIMLKLKIDKNGNGNCYTCMGCRSFLTPYVDENGKPKYYGRFNQGVVTINLVDVACTAARDGSKSEEKFWQVLDERLELCHRALQCRHERLEGTLSDAAPILWQYGALARLKKGEPIDKLLHGGYSTLSLGYAGLWECVYEITGKKLTEKEGEEFGLRVMQRLNDACAEWKAAENIDYSIYGTPLESTTYKFAKCLQNRFGIIKGVTDRNYITNSYHIHVTEKIDAFSKLELESKFQKLSPGGAISYVEVPNMQQNIPAVLEVMKFIYNNIMYAELNTKSDYCQVCGYDGEIQIVEEDGKLVWRCPNCGNEDQSKMNVARRTCGYIGSQFWNQGRTQEIKERVLHL

SEQ ID NO: 869 - protein, 768 aa, unidentified
  REGION 1..768: note = Description of Unknown: uncultivated organism sequence
  REGION 1..768: note = Category: MG60 effectors
  REGION 1..768: note = Description: MG60-78 effector
MFCSCKKNLCVVIYIYNATKTYDCAKKLIVYKSIIKGAEVMKIIKRNGAEETFDRQKIKDAIAKANNETDGTPELTDRQIDYISLVIEDHCNEMNRALSVEEIQELVETHIILQGAPETAKRYIRYRFTRNLARASNTTDNQILSLIECNNEEVKQENSNKNPTVNSVQRDYMAGEVSKDLTKRILLPEDIVKAHEEGLIHFHDADYFAQHMHNCDLVNLEDMLQNGTVISGTMIEKPHSFSTACNIATQIIAQVASNQYGGQSISLAHLAPFVQISREKITRQVRAEMEEFGIDADDEQVKSLVEKRVRDEIKRGVQTIQYQVVTLLTTNGQAPFVTVFMYLNEAKNEQEKKDLAIIIEEVLKQRIKGTKNEVGVWVTPAFPKLIYVLEEDNITEDSRFWYLTKLAAECTAKRMVPDYISEKIMLKLKIDKNGNGNCYTCMGCRSFLTPYVDENGKPKYYGRFNQGVVTINLVDVACTAARDGNKSEEKFWQVLDERLELCHRALQCRHERLEGTLSDAAPILWQYGALARLKKGEPIDKLLHGGYSTLSLGYAGLWECVYEITGKKLTEKEGEEFGLRVMQRLNDACAEWKAAENIDYSIYGTPLESTTYKFAKCLQNRFGIIKGVTDRNYITNSYHIHVTEKIDAFSKLELESKFQKLSPGGAISYVEVPNMQQNIPAVLEVMKFIYNNIMYAELNTKSDYCQVCGYDGEIQIVEEDGKLVWRCPNCGNEDQSKMNVARRTCGYIGSQFWNQGRTQEIKERVLHL

SEQ ID NO: 870 - protein, 763 aa, unidentified
  REGION 1..763: note = Description of Unknown: uncultivated organism sequence
  REGION 1..763: note = Category: MG60 effectors
  REGION 1..763: note = Description: MG60-79 effector
MKTIQQLYSIFVAFATVFLKNKYIIRTYKSNKKYLIDIRKMALLKDLYTRKEWGKMKVIKRDGRTIEFDREKIEVAIEKANKEVRGKEKATKDEINEIIAYIEDLGKKRMLVEDIQDVIEEKLMELDKYELAKKYIVYRYTRALVRKSNTTDESILGLIKNENKELAEENSNKNTMLASTQRDYIAGEVSRDLTKRILLPEKISKAHEEGILHFHDADYFVQPIFNCCLINIGDMLDNGTAMNGKMIETPKSFQVACTVTTQIIAAVASNQYGGQSVDLKHLGKYLRRSHDKFQKRLTEKYGGKLPKQTIDDMIRDRVKEELAAGVQTIQYQINTLMTTNGQSPFVTLFLHLEPDDEYIKENAMIIEEVLKQRIQGIKNEVGVYVTPAFPKLVYVLDEHNCLKGGKYDYLTRLAVKCSAKRMYPDYISAKKMKENYEGNVFSPMGCRSFLVPWKDENGNYKFEGRFNQGVVSINLPQIAIIAQGDEDKFWKLFDERLELCREALMCRHYALLGTSSDISPIHWQNGAIARLKKGEKIDKYLKDGYSTLSLGYIGIYETTKLIKGVSHTTPEGHDFAIKIMKYLKDRTNLWRKETGLGFSLYGTPAESLCYRFARIDKEKFGSIPDVTDKGYYTNSYHVDVREKIDAFHKLKFESEFQPLSAGGAISYIEVPNMKNNLTALEEVVKFIYDNIQYAEFNTKSDYCQVCGYDGEMIINDQNEWECPQCGNKDHNKMNVVRRTCGYLGENFWNVGKTKEIKSRVLHL

SEQ ID NO: 871 - protein, 768 aa, unidentified
  REGION 1..768: note = Description of Unknown: uncultivated organism sequence
  REGION 1..768: note = Category: MG60 effectors
  REGION 1..768: note = Description: MG60-80 effector
MFYSCKRNLCVVIYIYNATKTYDCAKKLIVYKSIIKGAEVMKIIKRNGAEETFDRQKIKDAIAKANNETDGTPELTDRQIDYISLVIEDHCNEMNRALSVEEIQELVETHIILQGAPETAKRYIRYRFTRNLARASNTTDNQILSLIECNNEEVKQENSNKNPTVNSVQRDYMAGEVSKDLTKRILLPEDIVKAHEEGLIHFHDADYFAQHMHNCDLVNLEDMLQNGTVISGTMIEKPHSFSTACNIATQIIAQVASNQYGGQSISLAHLAPFVQISREKITRQVRAEMEEFGIDADDEQVKSLVEKRVRDEIKRGVQTIQYQVVTLLTTNGQAPFVTVFMYLNEAKNEQEKKDLAIIIEEVLKQRIKGTKNEVGVWVTPAFPKLIYVLEEDNITEDSRFWYLTKLAAECTAKRMVPDYISEKIMLKLKIDKNGNGNCYTCMGCRSFLTPYVDENGKPKYYGRFNQGVVTINLVDVACTAARDGNKSEEKFWQVLDERLELCHRALQCRHERLEGTLSDAAPILWQYGALARLKKGEPIDKLLHGGYSTLSLGYAGLWECVYEIKGKKLTEKEGEEFGLRVMQRLNDACAEWKAAENIDYSIYGTPLESTTYKFAKCLQNRFGIIKGVTDRNYITNSYHIHVTEKIDAFSKLELESKFQKLSPGGAISYVEVPNMQQNIPAVLEVMKFIYNNIMYAELNTKSDYCQVCGYDGEIQIVEEDGKLVWRCPNCGNEDQSKMNVARRTCGYIGSQFWNQGRTQEIKERVLHL

SEQ ID NO: 872 - protein, 760 aa, unidentified
  REGION 1..760: note = Description of Unknown: uncultivated organism sequence
  REGION 1..760: note = Category: MG60 effectors
  REGION 1..760: note = Description: MG60-81 effector
MCVVIYIYDATKTYDCAKKLFVYKSIIKGAEVMKIIKRNGAEETFDRQKIKDAIAKANNETDGTPELTDRQIDYISLVIEDHCNEMNRALSVEEIQELVETHIILQGAPETAKRYIRYRFTRNLARASNTTDNQILSLIECNNEEVKQENSNKNPTVNSVQRDYMAGEVSKDLTKRILLPEDIVKAHEEGLIHFHDADYFAQHMHNCDLVNLEDMLQNGTVISGTMIEKPHSFSTACNIATQIIAQVASNQYGGQSISLAHLAPFVQISREKITRQVRAEMEEFGIAADDEQVKSLVEKRVRDEIKRGVQTIQYQVVTLLTTNGQAPFVTVFMYLNEAKNEQEKKDLAIIIEEVLKQRIKGTKNEVGVWVTPAFPKLIYVLEEDNITEDSRFWYLTKLAAECTAKRMVPDYISEKIMLELKIDKNGNGNCYTCMGCRSFLTPYVDENGKPKYYGRFNQGVVTINLVDVACTAARDGNKSEEKFWQVLDERLELCHRALQCRHERLEGTLSDAAPILWQYGALARLKKGEPIDKLLHGGYSTLSLGYAGLWECVYEITGKKLTEKEGEEFGLRVMQRLNDACAEWKAAENIDYSIYGTPLESTTYKFAKCLQNRFGIIKGVTDRNYITNSYHIHVTEKIDAFSKLELESKFQKLSPGGAISYVEVPNMQQNIPAVLEVMKFIYNNIMYAELNTKSDYCQVCGYDGEIQIVEEDGKLVWRCPNCGNEDQSKMNVARRTCGYIGSQFWNQGRTQEIKERVLHL

SEQ ID NO: 873 - protein, 763 aa, unidentified
  REGION 1..763: note = Description of Unknown: uncultivated organism sequence
  REGION 1..763: note = Category: MG60 effectors
  REGION 1..763: note = Description: MG60-82 effector
MKIIQQLYSIFVAFATVFLKNKYIIRTYKSNKKYLIDIRKMALLKDLYTRKEWGKMKVIKRDGRTIEFDREKIEVAIEKANKEVRGKEKATKDEINEIIAYIEDLGKKRMLVEDIQDVIEEKLMELDKYELAKKYIVYRYTRALVRKSNTTDESILGLIKNENKELAEENSNKNTMLASTQRDYIAGEVSRDLTKRILLPEKISKAHEEGILHFHDADYFVQPIFNCCLINIGDMLDNGTAMNGKMIETPKSFQVACTVTTQIIAAVASNQYGGQSVDLKHLGKYLRRSHDKFQKRLTEKYGGKLPKQTIDDMIRDRVKEELAAGVQTIQYQINTLMTTNGQSPFVTLFLHLEPDDEYIKENAMIIEEVLKQRIQGIKNEVGVYVTPAFPKLVYVLDEHNCLKGGKYDYLTRLAVKCSAKRMYPDYISAKKMKENYEGNVFSPMGCRSFLVPWKDENGNYKFEGRFNQGVVSINLPQIAIIAQGDEDKFWKLFDERLELCREALMCRHYALLGTSSDISPIHWQNGAIARLKKGEKIDKYLKDGYSTLSLGYIGIYETTKLIKGVSHTTPEGHDFAIKIMKYLKDRTNLWRKETGLGFSLYGTPAESLCYRFARIDKEKFGSIPDVTDKGYYTNSYHVDVREKIDAFHKLKFESEFQPLSAGGAISYIEVPNMKNNLTALEEVVKFIYDNIQYAEFNTKSDYCQVCGYDGEMIINDQNEWECPQCGNKDHNKMNVVRRTCGYLGENFWNVGKTKEIKSRVLHL

SEQ ID NO: 874 - protein, 769 aa, unidentified
  REGION 1..769: note = Description of Unknown: uncultivated organism sequence
  REGION 1..769: note = Category: MG60 effectors
  REGION 1..769: note = Description: MG60-83 effector
MKVIKRDGTIVEYDREKIRIAIEKANKEVSRKEKATDSEIEEIMSYIEDLKKGRILVEDIQDIIEEKLMEIKRYELAKKYITYRYTRALVRKANTTDQSIKELIEGESEYWNNENANKNARVVTTQRDYLAGITSTDITRRFLLPEDVVKAHDEGIIHFHDADYFAQNALTNCELINLEDMLQNGTIMNGVMIEKPHRFITACTIATQIILAVTSSTYGGATVSLAHLAPFVRSSYEKYYKKYKDNGLSKEQCEKFAKEDTKKEVADGVQTFNYQVNSMTNTNGQAPFLSVCMYLGETDEYKEELAMIIEEFLNQRILGFKNEKGVYITPAFPKLLYVLEEDNIHENSKYWYLTELAAKCTAKRMVPDYISEKIMKQMKVDANGDGQCYPCMGCRSFLTPYIDPVTNKPKYYGRFNQGVVTINLVDVALSSGKDLKKFWKIYDERLELCHKALQARHERLAKATSDIAPILWQHGAFARLPKGASIHPLLHGGYSTISLGYAGLYECVKYMTGKSHTDNGDGKDFAIEVMKKMNEKCAEWKDAEDIDYSVYGTPIESTTYKFAKCLQKRFGKIKGITDKNYITNSYHVPVFEEIDAFSKLKLESEFQRLSPGGAISYVETPNLQNNLEVVLQIMKFIYDNIMYAELNTKSDYCQKCGYTGEILIDDNLEWYCPNCGNRDHNTLNVARRTCGYIGSNFWNKGRTQEIKERVLHIDNKDDDCDCDECNCDHANTDTSKEEKSEEKQMNFMDYDVEEEITKSKKHMKQPAMV

SEQ ID NO: 875 - protein, 985 aa, unidentified
  REGION 1..985: note = Description of Unknown: uncultivated organism sequence
  REGION 1..985: note = Category: MG60 effectors
  REGION 1..985: note = Description: MG60-84 effector
MQEFAHKVAEEVMSKNTDMTVEDIQDLVVRRLMASKYKEVAKSYVEYRYLHELIRQSNTTDKTIKELIDGDNEYWNTENSNKNPRVVTTQRDYIAGVTSTDIARRLLLPKDVVTAHDEGIIHFHDMDYFAQKSLHNCFLKSTKFITKEGLRSFEDFNNGDIIEVLSIDGKYHKAVVKQYGVQPLYKYTFYNGKKENTHDVIATENHRWILKDGKETTNLKIGDKLCKAPVIYSQNLDWENLTENEQLMWCKGFGLGDGTKEYGTNSTRIRLCESKDLQYLNRFSISGCNIRNTKFKNEDREVVIYNYRKTIPEFNSIKELQCFINGLYCADGRKKQMVNGKYNFGLQSSSLEVINFLREMADTAGLYITKENERTGEITNFTTEQGRPYTILFSFNSDFDFHYTVLNKEFYGEDEVWCLEVEDTHNFILEYGIPTGNCELVNLEDMLQNGTVINGVKIEKPHRLLTAATISTQIITAVTSSSYGGCTINIAHLAPFVRDSFEYHKKKYLSRGFNEVDAEKYANEDTKKEVTDAVQTFNYQVNSMTNTNGQAPFLSVFMYLNDNPEYIKETAMLIEEFLKQRIVGFKNEVGHYVTPAFPKLLYVLDDNNITEDSKYWDLTVLAAKCTAKRMVPDYISAKIMRRDKVDKNGDGNVYGCMGCRSFLTPYVDLETNKPKYWGRFNQGVVTINLPDIALSSHGDFDEFWKLFNERTELCHKALKCRHERLALATADVAPILWRYGALARLPKGASIHPLLHNGYSTLSLGYAGLYECVKYMTGESHSHGKGFDFGIQVMQALNDKCKEWKADENIDYSLYRSPIETTTYKFAKCLKKRFGEIEGVTDKDYITNSYHINVREEIDPFDKLEIESKYQKLSPRGAISYIECADLTKNIPAVLEVLKFIYDHIMYAELNTKSDYCQVCGYEHEIEIVDEDGKLYWRCPNCGNTDQTKMNVARRTCGYIGSQFWNQGRTQEIKERYVHMDNHEE

SEQ ID NO: 876 - protein, 768 aa, unidentified
  REGION 1..768: note = Description of Unknown: uncultivated organism sequence
  REGION 1..768: note = Category: MG60 effectors
  REGION 1..768: note = Description: MG60-85 effector
MFCSCKNNLCVVIYIYDATKTYDCAKKLIVYKSIIKGAEVMKIIKRNGAEETFDRQKIKDAIAKANNETDGTPELTDRQIDYISLVIEDHCNEMNRALSVEEIQELVETHIILQGAPETAKRYIRYRFTRNLARASNTTDNQILSLIECNNEEVKQENSNKNPTVNSVQRDYMAGEVSKDLTKRILLPEDIVKAHEEGLIHFHDADYFAQHMHNCDLVNLEDMLQNGTVISGTMIEKPHSFSTACNIATQIIAQVASNQYGGQSISLAHLAPFVQISREKITRQVRAEMEEFGIDADDEQVKSLVEKRVRDEIKRGVQTIQYQVVTLLTTNGQAPFVTVFMYLNEAKNEQEKKDLAIIIEEVLKQRIKGTKNEVGVWVTPAFPKLIYVLEEDNITEDSRFWYLTKLAAECTAKRMVPDYISEKIMLKLKIDKNGNGNCYTCMGCRSFLTPYVDENGKPKYYGRFNQGVVTINLVDVACTAARDGSKSEEKFWQVLDERLELCHRALQCRHERLEGTLSDAAPILWQYGALARLKKGEPIDKLLHGGYSTLSLGYAGLWECVYEITGKKLTEKEGEEFGLRVMQRLNDACAEWKAAENIDYSIYGTPLESTTYKFAKCLQNRFGIIKGVTDRNYITNSYHIHVTEKIDAFSKLELESKFQKLSPGGAISYVEVPNMQQNIPAVLEVMKFIYNNIMYAELNTKSDYCQVCGYDGEIQIVEEDGKLVWRCPNCGNEDQSKMNVARRTCGYIGSQFWNQGRTQEIKERVLHL

SEQ ID NO: 877 - protein, 1032 aa, unidentified
  REGION 1..1032: note = Description of Unknown: uncultivated organism sequence
  REGION 1..1032: note = Category: MG60 effectors
  REGION 1..1032: note = Description: MG60-86 effector
MIVTKRDGRQVEFDKDKIVKAISKAFVEVYSTVTDEMSGFANKVATEISSKEADMTVEEIQDIVTKKLMLSRYKDVARRYIEYRYLHHLVRESNTTDKSIKELIDGENDYWNTENSNKNPRIVTTQRDYIAGITSTDIARRFLLPPEIVKAHDEGILHFHDMDYFAQKSLHNCFSGDTKLVTDLGVRSFNSFADGAVIKVKDKNGVWREATVKKYGKQKMFDVTFKTPKSEKTVTCTQNHRWILDTGEVTTNLQVGDKLFPLTDSASNYVPNTLEELRAFCFGFVLGDGCDCSDKGVQVRLCNDKNEYLEYFIKAGYKYYQVTNSNDYVAYNRTEYSKQSFLNNNAWKLLSLNQKIALFHGYYCADGRKNSHSISTTNNRLMAMIEEISALAGYYIGSKFEEHRHSNYVEDFSITTYSFIIEQKAKNWLWTVKEIKPHYNKKYKDNRQGRENSFKTCNPTMDAWCVEEPVTHTFTLSNGMVTGNCELVNLEDMLQNGTVINGVKIDKPHRLLTAATIATQIITAVTSSSYGGCSINLAHLAPFVRDSYEYHKNKYLKRGMNELDAEAFAGQDTDKEVSDAVQTFNYQVNSMTNTNGQAPFLSVFMYINDNMEYRAETVTLIAEFLRQRMIGFKNEVGHYVTPAFPKLLYVLDENNCEPNTEYWWLTKLAAECTAKRMVPDYISAKIMKRDKIDANGNGNVFACMGCRSFLTPYLDSNNKPKYWGRFNQGVVTINLPDVALSSKGDKEKFWQLFDERLELCHKAMQCRHERLALATSDVAPILWQHGALARLPKGASIHPLLHGGYSTLSLGYAGLYECVKYMTGESHSHGKGKEFGLAVMQHLNDKCNEWKEAEDIAYSPYGSPIESTTYKFAKCLKKRFGVIEGITDKDYITNSYHINVREEIDPFSKLAIEAEYQKLSQGGAISYIECADLTNNISAVLEVIKFIYNNIMYAELNTKSDYCQVCGYDGEIEIVDNNGTLSWRCPNCGNTDQTKMNVARRTCGYIGSQFWNQGRTQEIKERYVHLDNHEMK

SEQ ID NO: 878 - protein, 768 aa, unidentified
  REGION 1..768: note = Description of Unknown: uncultivated organism sequence
  REGION 1..768: note = Category: MG60 effectors
  REGION 1..768: note = Description: MG60-87 effector
MFCSCKKNLCVVIYIYNATKTYDCAKKLIVYKSIIKGAEVMKIIKRNGAEETFDRQKIKDAIAKANNETDGTPELTDRQIDYISLVIEDHCNEMNRALSVEEIQELVETHIILQGAPETAKRYIRYRFTRNLARASNTTDNQILSLIECNNEEVKQENSNKNPTVNSVQRDYMAGEVSKDLTKRILLPEDIVKAHEEGLIHFHDADYFAQHMHNCDLVNLEDMLQNGTVISGTMIEKPHSFSTACNIATQIIAQVASNQYGGQSISLAHLAPFVQISREKITRQVRAEMEEFGIDADDEQVKSLVEKRVRDEIKRGVQTIQYQVVTLLTTNGQAPFVTVFMYLNEAKNEQEKKDLAIIIEEVLKQRIKGTKNEVGVWVTPAFPKLIYVLEEDNITEDSRFWYLTKLAAECTAKRMVPDYISEKIMLKLKVDKNGNGNCYTCMGCRSFLTPYVDENGKPKYYGRFNQGVVTINLVDVACTAARDGSKSEEKFWQVLDERLELCHRALQCRHERLEGTLSDAAPILWQYGALARLKKGEPIDKLLHGGYSTLSLGYAGLWECVYEITGKKLTEKEGEEFGLRVMQRLNDACAEWKAAENIDYSIYGTPLESTTYKFAKCLQNRFGIIKGVTDRNYITNSYHIHVTEKIDAFSKLELESKFQKLSPGGAISYVEVPNMQQNIPAVLEVMKFIYNNIMYAELNTKSDYCQVCGYDGEIQIVEEDGKLVWRCPNCGNEDQSKMNVARRTCGYIGSQFWNQGRTQEIKERVLHL

SEQ ID NO: 879 - protein, 768 aa, unidentified
  REGION 1..768: note = Description of Unknown: uncultivated organism sequence
  REGION 1..768: note = Category: MG60 effectors
  REGION 1..768: note = Description: MG60-88 effector
MFCSCKKNLRVVIYIYNATKTYDCAKKSIVYKSIIKGAEVMKIIKRNGAEETFDRQKIKDAIAKANNETDGTPELTDRQIDYISLVIEDHCNEMNRALSVEEIQELVETHIILQGAPETAKRYIRYRFTRNLARASNTTDNQILSLIECNNEEVKQENSNKNPTVNSVQRDYMAGEVSKDLTKRILLPEDIVKAHEEGLIHFHDADYFAQHMHNCDLVNLEDMLQNGTVISGTMIEKPHSFSTACNIATQIIAQVASNQYGGQSISLAHLAPFVQISREKITRQVRAEMEEFGIDADDEQVKSLVEKRVRDEIKRGVQTIQYQVVTLLTTNGQAPFVTVFMYLNEAKNEQEKKDLAIIIEEVLKQRIKGTKNEVGVWVTPAFPKLIYVLEEDNITEDSRFWYLTKLAAECTAKRMVPDYISEKIMLKLKIDKNGNGNCYTCMGCRSFLTPYVDENGKPKYYGRFNQGVVTINLVDVACTAARDGNKSEEKFWQVLDERLELCHRALQCRHERLEGTLSDAAPILWQYGALARLKKGEPIDKLLHGGYSTLSLGYAGLWECVYEIKGKKLTEKEGEEFGLRVMQRLNDACAEWKAAENIDYSIYGTPLESTTYKFAKCLQNRFGIIKGVTDRNYITNSYHIHVTEKIDAFSKLELESKFQKLSPGGAISYVEVPNMQQNIPAVLEVMKFIYNNIMYAELNTKSDYCQVCGYDGEIQIVEEDGKLVWRCPNCGNEDQSKMNVARRTCGYIGSQFWNQGRTQEIKERVLHL

SEQ ID NO: 880 - protein, 768 aa, unidentified
  REGION 1..768: note = Description of Unknown: uncultivated organism sequence
  REGION 1..768: note = Category: MG60 effectors
  REGION 1..768: note = Description: MG60-89 effector
MFCSCKKNLCVVIYIYDATKTYDCAKKLIVYKSIIKGAEVMKIIKRNGAEETFDRQKIKDAIAKANNETDGTPELTDRQIDYISLVIEDHCNEMNRALSVEEIQELVETHIILQGAPETAKRYIRYRFTRNLARASNTTDNQILSLIECNNEEVKQENSNKNPTVNSVQRDYMAGEVSKDLTKRILLPEDIVKAHEEGLIHFHDADYFAQHMHNCDLVNLEDMLQNGTVISGTMIEKPHSFSTACNIATQIIAQVASNQYGGQSISLAHLAPFVQISREKITRQVRAEMEEFGIAADDEQVKSLVEKRVRDEIKRGVQTIQYQVVTLLTTNGQAPFVTVFMYLNEAKNEQEKKDLAIIIEEVLKQRIKGTKNEVGVWVTPAFPKLIYVLEEDNITEDSRFWYLTKLAAECTAKRMVPDYISEKIMLKLKIDKNGNGNCYTCMGCRSFLTPYVDENGKPKYYGRFNQGVVTINLVDVACTAARDGNKSEEKFWQVLDERLELCHRALQCRHERLEGTLSDAAPILWQYGALARLKKGEPIDKLLHGGYSTLSLGYAGLWECVYEITGKKLTEKEGEEFGLRVMQRLNDACAEWKAAENIDYSIYGTPLESTTYKFAKCLQNRFGIIKGVTDRNYITNSYHIHVTEKIDAFSKLELESKFQKLSPGGAISYVEVPDMQQNIPAVLEVMKFIYNNIMYAELNTKSDYCQVCGYDGEIQIVEEDGKLVWRCPNCGNEDQSKMNVARRTCGYIGSQFWNQGRTQEIKERVLHL

SEQ ID NO: 881 - protein, 768 aa, unidentified
  REGION 1..768: note = Description of Unknown: uncultivated organism sequence
  REGION 1..768: note = Category: MG60 effectors
  REGION 1..768: note = Description: MG60-90 effector
MFCSCKKNLCVVIYIYDATKTYDCAKKLIVYKSIIKGAEVMKIIKRNGAEETFDRQKIKDAIAKANNETDGTPELTDRQIDYISLVIEDHCNEMNRALSVEEIQELVETHIILQGAPETAKRYIRYRFTRNLARASNTTDNQILSLIECNNEEVKQENSNKNPTVNSVQRDYMAGEVSKDLTKRILLPEDIVKAHEEGLIHFHDADYFAQHMHNCDLVNLEDMLQNGTVISGTMIEKPHSFSTACNIATQIIAQVASNQYGGQSISLAHLAPFVQISREKITRQVRAEMEEFGIDADDEQVKSLVEKRVRDEIKRGVQTIQYQVVTLLTTNGQAPFVTVFMYLNEAKNEQEKKDLAIIIEEVLKQRIKGTKNEVGVWVTPAFPKLIYVLEEDNITEDSRFWYLTKLAAECTAKRMVPDYISEKIMLKLKVDKNGNGNCYTCMGCRSFLTPYVDENGKPKYYGRFNQGVVTINLVDVACTAARDGSKSEEKFWQVLDERLELCHRALQCRHERLEGTLSDAAPILWQYGALARLKKGEPIDKLLHGGYSTLSLGYAGLWECVYEITGKKLTEKEGEEFGLRVMQRLNDACAEWKAAENIDYSIYGTPLESTTYKFAKCLQNRFGIIKGVTDRNYITNSYHIHVTEKIDAFSKLELESKFQKLSPGGAISYVEVPNMQQNIPAVLEVMKFIYNNIMYAELNTKSDYCQVCGYDGEIQIVEEDGKLVWRCPNCGNEDQSKMNVARRTCGYIGSQFWNQGRTQEIKERVLHL

SEQ ID NO: 882 - protein, 768 aa, unidentified
  REGION 1..768: note = Description of Unknown: uncultivated organism sequence
  REGION 1..768: note = Category: MG60 effectors
  REGION 1..768: note = Description: MG60-91 effector
MFCSCKKNLRVVIYIYNATKTYDCAKKLIVYKSIIKGAEVMKIIKRNGAEETFDRQKIKDAIAKANNETDGTPELTDRQIDYISLVIEDHCNEMNRALSVEEIQELVETHIILQGAPETAKRYIRYRFTRNLARASNTTDNQILSLIECNNEEVKQENSNKNPTVNSVQRDYMAGEVSKDLTKRILLPEDIVKAHEEGLIHFHDADYFAQHMHNCDLVNLEDMLQNGTVISGTMIEKPHSFSTACNIATQIIAQVASNQYGGQSISLAHLAPFVQISREKITRQVRAEMEEFGIDADDEQVKSLVEKRVRDEIKRGVQTIQYQVVTLLTTNGQAPFVTVFMYLNEAKNEQEKKDLAIIIEEVLKQRIKGTKNEVGVWVTPAFPKLIYVLEEDNITEDSRFWYLTKLAAECTAKRMVPDYISEKIMLKLKIDKNGNGNCYTCMGCRSFLTPYVDENGKPKYYGRFNQGVVTINLVDVACTAARDGSKSEEKFWQVLDERLELCHRALQCRHERLEGTLSDAAPILWQYGALARLKKGEPIDKLLHGGYSTLSLGYAGLWECVYEITGKKLTEKEGEEFGLRVMQRLNDACAEWKAAENIDYSIYGTPLESTTYKFAKCLQNRFGIIKGVTDRNYITNSYHIHVTEKIDAFSKLELESKFQKLSPGGAISYVEVPNMQQNIPAVLEVMKFIYNNIMYAELNTKSDYCQVCGYDGEIQIVEEDGKLVWRCPNCGNEDQSKMNVARRTCGYIGSQFWNQGRTQEIKERVLHL

SEQ ID NO: 883 - protein, 763 aa, unidentified
  REGION 1..763: note = Description of Unknown: uncultivated organism sequence
  REGION 1..763: note = Category: MG60 effectors
  REGION 1..763: note = Description: MG60-92 effector
MKIIQQLYSIFVAFATVFLKNKYIIRTYKSNKKYLIDIRKMALLKDLYTRKEWGKMKVIKRDGRTIEFDREKIEIAIEKANKEVRGKEKATKDEINEIIAYIEDLGKKRMLVEDIQDVIEEKLMELDKYELAKKYIVYRYTRALVRKSNTTDESILGLIKNENKELAEENSNKNTMLASTQRDYIAGEVSRDLTKRILLPEKISKAHEEGILHFHDADYFVQPIFNCCLINIGDMLDNGTAMNGKMIETPKSFQVACTVTTQIIAAVASNQYGGQSVDLKHLGKYLRRSHDKFQKRLTEKYGGKLPKQTIDDMIRDRVKEELAAGVQTIQYQINTLMTTNGQSPFVTLFLHLEPDDEYIKENAMIIEEVLKQRIQGIKNEVGVYVTPAFPKLVYVLDEHNCLKGGKYDYLTRLAVKCSAKRMYPDYISAKKMKENYEGNVFSPMGCRSFLVPWKDENGNYKFEGRFNQGVVSINLPQIAIIAQGDEDKFWKLFDERLELCREALMCRHYALLGTSSDISPIHWQNGAIARLKKGEKIDKYLKDGYSTLSLGYIGIYETTKLIKGVSHTTPEGHDFAIKIMKYLKDRTNLWRKETGLGFSLYGTPAESLCYRFARIDKEKFGSIPDVTDKGYYTNSYHVDVREKIDAFHKLKFESEFQPLSAGGAISYIEVPNMKNNLTALEEVVKFIYDNIQYAEFNTKSDYCQVCGYDGEMIINDQNEWECPQCGNKDHNKMNVVRRTCGYLGENFWNVGKTKEIKSRVLHL

SEQ ID NO: 884 - protein, 1291 aa, unidentified
  REGION 1..1291: note = Description of Unknown: uncultivated organism sequence
  REGION 1..1291: note = Category: MG60 effectors
  REGION 1..1291: note = Description: MG60-93 effector
MKLRKVYACILTLCMLVSMLPAFAADTDASCTHKWTEKVIKEANCTQTGLVKKTCELCGDFEYEKTPFKHGEGKEVVKDATCTKPETVGLYCEKCGELIGKVQEVGKALGHDLGKGTEKKADCAGPDRVEYTCKRCGETVVEAIEGGEAAKKHDWEAKIVPATCKTKGYEARVCKACGKVEKDKELPIDGNAHVAKLGKVIREATCTTNGLGRSVCELCGKELGYITIKAGHKYGDPICDEGKEVTCGKAGYGYYVCTVCGEETEKAEIPATGKHAFVDETDIPATCTEPEKIGRICKVCGAADGEVEEIGEALGHDWDDGVYTKADCLKAEREVFTCKRCGKTRDEFIPNGEAAKGHKFVDKIVAPTCKTKGYTERTCERCDLYEKINETEIDKDAHVAKLDKTIREATCTVNGLGRYTCELCGEYLGYRAIEAKHVYGEPIFDEGKEATCGKPGYGYYVCTVCNEKTEKTEIPATGKHQFVDEFVIPATCEEPMKVGRICKVCGKADGKVQEIDKPLGHAWDDGKYMAVDCEKAERVVYTCERCGEVKEEIIPNGEAAKGHKFVDKIVAPTCKTKGYTERTCERCDLYEKINETEIDKDAHVAKLDKTIREATCTVNGLGRYTCELCGEYLGYRAIEAKHVYGAPIFDEGKEATCGKDGYGYYVCTVCGEKTDKDVIPATGKHEFVDETVIPATCTEPEKVGRICKVCGKADGKVQEIDKPLGHDWDDGELKDADCEKAERVVTTCKRCGEIREDSFEGAKPATGHKLVEKIVAPTCKTKGYTERTCERCDLYEKINETEIDKDAHVAKLDKTIREATCTVNGLGRYTCELCGEYLGYRAIEAKHVYGEPIFDEGKEATCGKPGYGYYVCTVCNEKSEKTEIPATGKHQFVDEFVIDATCEEPMKVGRICKVCGKTDGEVKTVGEKLGHDWDDGELKDADCEKAERVVYTCKRCGETKEDVIGTEVLGHKYKEKVVEPTCKTKGYKAKVCSVCGNTEVIEELEPVAGNHVAKLDKVIREATCSANGLGRYVCAECGNYIGYRAIVVEHKWGEEYANEDATAIMHKCEVCGTVEVIWKDSSDECEDGKHVIVVDPAKAATCTETGLTEGKHCSVCDKVLVKQEVIPATGHTEVVDEAKAATCTEAGLTEGKHCSVCNAVLVKQEEIPALGHTEVVDEGKAATCTEAGLTEGKHCSVCSEVLVKQEEIPATGHVEEILPAVAPTDTEPGLTEGKKCSVCGKILVEQEVIPAHEHEHNYVLKGYDFNADFTKKVATYECTICGDTYTEEMDF

SEQ ID NO: 885 - protein, 874 aa, unidentified
  REGION 1..874: note = Description of Unknown: uncultivated organism sequence
  REGION 1..874: note = Category: MG60 effectors
  REGION 1..874: note = Description: MG60-94 effector
MKIIETKVFKGKNIYSLKKCIRLDVDLEGYCETPSKNIEDFNFNLVNMIPELRTHRCGIDEDEGFIKRLKEGTYLAHICEHIILAIQNKLGIDVHYGKSREIKEDHYYIVFQYIYENTALEVAKLAIDIINALINKIPINYDERIEFLKEILNNEILGPSTKSICDYANKVGLPIIKLGNGEFYQIGYGKQGRIIEASISPNTSCISVDIACDKMLTKELLRTQSIPVAKGSKVKNVINLLKEAEEIGYPVVLKPQYGNKGKGVILNLKSEKELLDAYRKIKDKFKDIIIEKYHKGKDFRVCVVNYKVVAVSLRIPPFVIGNGKDTIFELINKLNEDPLRGEDHEKPLTKVKLDEEVIDAISEQRKTLMEVLDKGEKIYLRKNANLSTGGEAIDFTDEICDENINLCIRIAKTLKLDICGIDICTDDISIPIYKNGVVMEVNAAPGLRMHLNPSKGKSRDIGKEIVNMIYNNKPCNIPIVAITGTNGKTTTTRLITHTLSKMGYCVGMTSSSGIYINDECIDVGDDTGFESAKSVLLNPDVEIAVLETARGGIIKKGLAYDLADVAVITNIREDHLGIDEINSMEDLCCVKSLVGEAVKDEGYVVINADDKWSKSILNRIKSRKVYFTLNSSNEILIKKNQDDIYVYLENEDIIIINQNKKYVLCNINEVPITMNGMLKFNIENILAATSALVAMKVDYCMIKNGITTYLLNSKKNSGRFNCYNVNGVNVILDYGHNTDGYIAVLSSVKKMSSKRIFGIVGIPGDRLNKSAEEIGCISAKYFDYIIVKEDKDLRGRKQGEIANLIVDGLIKENSNKKYEVILDEEVALIKALNMAEKGDTIVVFFEEIKPLLKVIEEIASFETKRKSDSYEALN

SEQ ID NO: 886 - protein, 777 aa, unidentified
  REGION 1..777: note = Description of Unknown: uncultivated organism sequence
  REGION 1..777: note = Category: MG60 effectors
  REGION 1..777: note = Description: MG60-95 effector
MPKSIDLITSIWYYVKGFVDKSYKFVTDTTRLTHPRNLRQRGMDMNIIKRNGSEAVFDLNKIIVAVSKANQACEKKELSQGQINDIAEYVEFKIGKANRALSVEEIQDIVEDQIMAQGAFEVAKRYVKYRYTRSLVRKANTTDNQILSLIECNNEEVKQENSNKNPTVNSVQRDYMAGEVSKDITKRILLPQDIVEAHENGIIHFHDADYFAQHMHNCDLVNLEDMLQNGTVISDTMIEKPHSFSTACNIATQIIAQVASSQYGGQSISLTHLAPFVQISREKIRKQVIDEAVDFGSELTEEKIDKITERRLRDEVSRGVQTIQYQVVTLLTTNGQAPFVTVFMYLNEAKNEQEKKDLALIIEETLKQRIQGVKNESGVWVTPAFPKLIYVLENDNVDEDSEYFYLTELAAKCTAKRMVPDYVSEKVMLDLKGDVYTPMGCRSFLTPDRFTEAGVGNIARAKNYVEGKKKYYGRFNQGVVTINLVDVACTSGGDMTKFWQIFDERLNLCYRALMCRHNRLKGTLSDAAPILWQHGALARLDKGEPIDRLLYDGYSTISLGYAGLYECTKYMTGKSHTDENGGKEFALSVMRHMNEACDKWKEETNIDFSIYGTPLESTTYKFAKCLQKRFGIIKGVTDKNYITNSYHVHVTEKIDAFTKLKFESEFQALSPGGAISYVEVPNMQDNIPAVLQVMRFIYDNIMYAELNTKSDYCQCCGYDGEIKIVEDEHGKLIWRCPNCGNEDQDKMNVARRTCGYIGTQFWNQGRTQEIKDRVLHL

SEQ ID NO: 887 - protein, 895 aa, unidentified
  REGION 1..895: note = Description of Unknown: uncultivated organism sequence
  REGION 1..895: note = Category: MG60 effectors
  REGION 1..895: note = Description: MG60-96 effector
MAKALLIAEKNSVARTINAYIKRYGFKDDVTCAALSGHLVHMVEPNKYCEEWDGKWNLEVLPMIPRDFKYEVINDDRIKKIYSDLKQVIRDNHYDYLINACDPEREGQAIFYYVYNKMGCKLPVKRYWENGQTDASVKHALNNLRDGLDETGYPNLKLLTQAAYLRGQFDWLVGMNFTRAASLTMNGVAKVGRVKTAVLKICVDLEKRIIDFVPKTSYGIKTEIAEDIEAINVERLEEDSRVKYVEANYETKEEASTICETLPKSMKLISKDTLRLKDNPDKLFSLGTLQVAASKEYGYSVEQTLAIAQSLYEKKILSYPRTSNPYISSNEASLFDEMLNAIKMIPGLEGVVTYIGDKKTQDRVKTNKMYVNDKETKEAGHYALIPTGERFNFDSLSSEEKSILKLVAYRFAAIFMPSGIDEKTTYIFDAGSKYFRTTIYNTLELGYRSIYNDTPKKSKKPNINKGDMIKVSCYELYEMTSTPPRRLTDGRLVDVMINPQKYLLDNHYKKIIKETKGLGTDATRANIINELAKDKYIEIKGKGNLIYATPTGIKIIENLGDMEITSVDLTAKWETKLYDVSTGKLSVDDFKSEMLEYIKRNTEVFKNKRFNAIGDKANGRESVGKCPSCGGNIFEALNSYYCENFKREGPGCKVILSKSIKGSKVTKANLKKILAGKESTEISLKIEKDGIIKSVKKKLYFNPDSGKIEFVRPQYKALTTCSFCGGIVNASDKAAICSGCGISFARKIKGAVLEDEDLISLYHGQPTKELRFSTIKDGIPKKFNASLIYNYEKRQLGFHYKEAKKFGKCPICGEGFTGPIEGKYGAYYKCSNKVCGLIIKEEIGGVKLTSSDIDILLKGDSLPVKEFKKNDGIGSYKAALFVNRETKKLDRKFSK

SEQ ID NO: 888 - protein, 1186 aa, unidentified
  REGION 1..1186: note = Description of Unknown: uncultivated organism sequence
  REGION 1..1186: note = Category: MG60 effectors
  REGION 1..1186: note = Description: MG60-98 effector
MMNKVLLTDAVPDIEKYWDYEANEGKKPSDFGASSSEKVWTKCPICGTSIRRNVRFTWEKDENGVGHVIHCRTCGKRNNNNSLVVLFPDIKKYWIYEKNEYDPEYYSISSGKKVYTSCPSCGEERYIAICDLIVKRNDRYELTQCIECSPKRNVIGSIAKNYPDIDKYWDDSNASNPNEIALNSQEIIFIHCPTCDKVVKRKALNSFRRDDQTGLYMLLDCHKCATQKAGKIRGLNQSGALIDKCPEIEEWWDAENNTIEFKNITRGSHYEAQLKCPACHSSFTRQIHSFVNVKRDGRLLPVACPECGYSTKGDPKDNILKLCPEIEQWWDYEANSPYRPEQFSKGSQFKAHFICPDCEMHLYTGIHSLMKSDENGNLHIRHKGKCLKFRLMESDNNLVKQYPQIKEWWDYEENGKALPEEFTIYSGKRMHFICPQCGAKSYRRITDAFAIEANSGEPILFNCPYCRNKKILAGKNSLLDTDPELAKEWSPNNNKKANEVLSKSFNRVQWICPNCKGEYSAIIRDRKVGDDACPYCKNDKVLPGFNSLQYKNPELAKEWSNSNDMKADEVLPTSSSRVKWVCPTCHGEYYAIIRGRKVGDDACPYCRKDKLLPGYNSLLNTDPELAKEWSNSNDMKADEVLPTSSSRVKWVCPTCHGEYSAIIRERKVGDDACPYCRNDKLLPGYNSLQDKKPELAKEWSTRNTLKADAVLFTSSSRAQWVCPTCHKEYSAIIRDRKLGDDSCPHCRQTKLLKEHTSLWVVNPELAKEWSDSNDLKADEVLPTSSFRVKWVCPTCRGEYYAIIRDRKVGDDACPYCRKDKLLPGYNSLLNTDPELAKEWSNSNDLKASEVLPTSSHRAQWVCPTCHGEYFAIIRDRKVGDDACPYCKNDKVLPGFNSLQYKNPELAKEWSNSNDMKADEVLPTSSSRVKWVCPTCRGEYYAAIRDRKVGDDACPYCRNDKLLPGYNSLLNTDPELAKEWSNSNDMKADEVLPTSSSRVKWVCPTCHGEYYAAIRDRKVGDDACPYCKNDKVLPGFNSLQYKNPELAKEWSNSNDMKADEVLPTSSSRVKWVCPTCRGEYYAAIRDRKVGDDSCPYCRNKKALAGLNSLLDMQPELVEREWCYPENILIGVYPDQILESYQGKAWWKCPICKRKYFMSVKDRLMKQKRGHVACPQCRGRRCVRSFWV

SEQ ID NO: 889 - protein, 824 aa, unidentified
  REGION 1..824: note = Description of Unknown: uncultivated organism sequence
  REGION 1..824: note = Category: MG60 effectors
  REGION 1..824: note = Description: MG60-99 effector
MKELNDSILALVMDDTEEKLMAENTEIDKEELGLACPKCGKRIIEDGTAYRCEAGDFKCGKEILGTEISRDELQKAIAGQSDELGFRSSKTGKTFLARLVLSEAKDSLDFRFSDRNGEDSGLKCPKCGGKIVDDGKAYKCESGDFKCWKIIRGHEITREELQKALDGKSDELGFTSRDSGKPYKGRLVLNEAKDGLAVKLDSRKSDDTGLKCPKCGGKIIDDGKAYKCESGDFKCWKSIRGHEVTRDELQKVIDEGSSDELDFTDQDTGKPYTARLKLSSDKKSVEVPKPEDTGEKCPNCRNKIMETDKAYWCESCNFTCDKEILGTRISHDDLHKIVEEGNSDELDFTDHDSGKSYKAHLNLSSDKQTVDVPKPEDTGEKCPNCRNKIMETDKAYWCESCNFTCDKEILGTRISHDQLHKIVEEGRSDELDFTDHDSGKSYKARLNLSEDNKTVVVPKPKDTGIKCPKCTMKIMETDRAYWCESEACDFTCDKEILDTKITRDELKKVVLNGKSGKLDFTDKDTKKPYKGRLVLNKKKNGLHVDKLDYMKVIFAVISFVVATISFIGIFLPDLFNMNKGSITRFETTLSDKKSAQKLEEFLDANVGKIVELTIHYKQNLVYGLVPWAKYSEDSYYGVKYDPAKDGSWWWDSASAAHDVTFSHFGDNNRFYVKSFLYDKNLFEVEYRDFGGIGYCDAITRYAYQLMIPYVKNDKLAFEWQRDREKSKDYVALPSPYWVLKGTFVVNVKKGEELTDNITTLYDEFQQRKLRSDYGKDYVVPEIAKILAVDPACGERTGNGDYSFSGKSFELEPLTQQQLLQMAYN

SEQ ID NO: 890 - protein, 768 aa, unidentified
  REGION 1..768: note = Description of Unknown: uncultivated organism sequence
  REGION 1..768: note = Category: MG60 effectors
  REGION 1..768: note = Description: MG60-100 effector
MFCSCKKNLCVVIYIYDATKTYDCAKKSIVYKSIIKGAEVMKIIKRNGAEETFDRQKIKDAIAKANNETDGTPELTDRQIDYISLVIEDHCNEMNRALSVEEIQELVETHIILQGAPETAKRYIRYRFTRNLARASNTTDNQILSLIECNNEEVKQENSNKNPTVNSVQRDYMAGEVSKDLTKRILLPEDIVKAHEEGLIHFHDADYFAQHMHNCDLVNLEDMLQNGTVISGTMIEKPHSFSTACNIATQIIAQVASNQYGGQSISLAHLAPFVQISREKITRQVRAEMEEFGIAADDEQVKSLVEKRVRDEIKRGVQTIQYQVVTLLTTNGQAPFVTVFMYLNEAKNEQEKKDLAIIIEEVLKQRIKGTKNEVGVWVTPAFPKLIYVLEEDNITEDSRFWYLTKLAAECTAKRMVPDYISEKIMLKLKIDKNGNGNCYTCMGCRSFLTPYVDENGKPKYYGRFNQGVVTINLVDVACTAARDGNKSEEKFWQVLDERLELCHRALQCRHERLEGTLSDAAPILWQYGALARLKKGEPIDKLLHGGYSTLSLGYAGLWECVYEITGKKLTEKEGEEFGLHVMQRLNDACAEWKAAENIDYSIYGTPLESTTYKFAKCLQNRFGIIKGVTDRNYITNSYHIHVTEKIDAFSKLELESKFQKLSPGGAISYVEVPNMQQNIPAVLEVMKFIYNNIMYAELNTKSDYCQVCGYDGEIQIVEEDGKLVWRCPNCGNEDQSKMNVARRTCGYIGSQFWNQGRTQEIKERVLHL

SEQ ID NO: 891 - protein, 768 aa, unidentified
  REGION 1..768: note = Description of Unknown: uncultivated organism sequence
  REGION 1..768: note = Category: MG60 effectors
  REGION 1..768: note = Description: MG60-101 effector
MFCSCKKNLRVVIYIYNATKTYDCAKKLIVYKSIIKGAEVMKIIKRNGAEETFDRQKIKDAIAKANNETDGTPELTDRQIDYISLVIEDHCNEMNRALSVEEIQELVETHIILQGAPETAKRYIRYRFTRNLARASNTTDNQILSLIECNNEEVKQENSNKNPTVNSVQRDYMAGEVSKDLTKRILLPEDIVKAHEEGLIHFHDADYFAQHMHNCDLVNLEDMLQNGTVISGTMIEKPHSFSTACNIATQIIAQVASNQYGGQSISLAHLAPFVQISREKITRQVRAEMEEFGIDADDEQVKSLVEKRVRDEIKRGVQTIQYQVVTLLTTNGQAPFVTVFMYLNEAKNEQEKKDLAIIIEEVLKQRIKGTKNEVGIWVTPAFPKLIYVLEEDNITEDSRFWYLTKLAAECTAKRMVPDYISEKIMLKLKIDKNGNGNCYTCMGCRSFLTPYVDENGKPKYYGRFNQGVVTINLVDVACTAARDGNKSEEKFWQVLDERLELCHRALQCRHERLEGTLSDAAPILWQYGALARLKKGEPIDKLLHGGYSTLSLGYAGLWECVYEITGKKLTEKEGEEFGLRVMQRLNDACAEWKAAENIDYSIYGTPLESTTYKFAKCLQNRFGIIKGVTDRNYITNSYHIHVTEKIDAFSKLELESKFQKLSPGGAISYVEVPNMQQNIPAVLEVMKFIYNNIMYAELNTKSDYCQVCGYDGEIQIVEEDGKLVWRCPNCGNEDQSKMNVARRTCGYIGSQFWNQGRTQEIKERVLHL

SEQ ID NO: 892 - protein, 768 aa, unidentified
  REGION 1..768: note = Description of Unknown: uncultivated organism sequence
  REGION 1..768: note = Category: MG60 effectors
  REGION 1..768: note = Description: MG60-102 effector
MFCSCKKNLRVVIYIYNATKTYDCAKKLIVYKSIIKGAEVMKIIKRNGAEETFDRQKIKDAIAKANNETDGTPELTDRQIDYISLVIEDHCNEMNRALSVEEIQELVETHIILQGAPETAKRYIRYRFTRNLARASNTTDNQILSLIECNNEEVKQENSNKNPTVNSVQRDYMAGEVSKDLTKRILLPEDIVKAHEEGLIHFHDADYFAQHMHNCDLVNLEDMLQNGTVISGTMIEKPHSFSTACNIATQIIAQVASNQYGGQSISLAHLAPFVQISREKITRQVRAEMEEFGIAAEDEQVKSLVEKRVRDEIKRGVQTIQYQVVTLLTTNGQAPFVTVFMYLNEAKNEQEKKDLAIIIEEVLKQRIKGTKNEVGVWVTPAFPKLIYVLEEDNITEDSRFWYLTKLAAECTAKRMVPDYISEKIMLKLKIDKNGNGNCYTCMGCRSFLTPYVDENGKPKYYGRFNQGVVTINLVDVACTAARDGNKSEEKFWQVLDERLELCHRALQCRHERLEGTLSDAAPILWQYGALARLKKGEPIDKLLHGGYSTLSLGYAGLWECVYEITGKKLTEKEGEEFGLRVMQRLNDACAEWKAAENIDYSIYGTPLESTTYKFAKCLQNRFGIIKGVTDRNYITNSYHIHVTEKIDAFSKLELESKFQKLSPGGAISYVEVPNMQQNIPAVLEVMKFIYNNIMYAELNTKSDYCQVCGYDGEIQIVEEDGKLVWRCPNCGNEDQSKMNVARRTCGYIGSQFWNQGRTQEIKERVLHL

SEQ ID NO: 893 - protein, 769 aa, unidentified
  REGION 1..769: note = Description of Unknown: uncultivated organism sequence
  REGION 1..769: note = Category: MG60 effectors
  REGION 1..769: note = Description: MG60-103 effector
MKVIKRDGTIVEYDREKIRIAIEKANKEVSRKEKATDSEIEEIMSYIEDLKKGRILVEDIQDIIEEKLMEIKRYELAKKYITYRYTRALVRKANTTDQSIKELIEGESEYWNNENANKNARVVTTQRDYLAGITSTDITRRFLLPEDVVKAHDEGIIHFHDADYFAQNALTNCELINLEDMLQNGTIMNGVMIEKPHRFITACTIATQIILAVTSSTYGGATVSLAHLAPFVRSSYEKYYKKYKDNGLSKEQCEKFAKEDTKKEVADGVQTFNYQVNSMTNTNGQAPFLSVCMYLGETDEYKEELAMIIEEFLNQRILGFKNEKGVYITPAFPKLLYVLEEDNIHENSKYWYLTELAAKCTAKRMVPDYISEKIMKQMKVDANGDGQCYPCMGCRSFLTPYIDPVTKKPKYYGRFNQGVVTINLVDVALSSGKDLKKFWKIYDERLELCHKALQARHERLAKATSDIAPILWQHGAFARLPKGASIHPLLHGGYSTISLGYAGLYECVKYMTGKSHTDNGDGKDFAIEVMKKMNEKCAEWKDAEDIDYSVYGTPIESTTYKFAKCLQKRFGKIKGITDKNYITNSYHVPVFEEIDAFSKLKLESEFQRLSPGGAISYVETPNLQNNLEVVLQIMKFIYDNIMYAELNTKSDYCQKCGYTGEILIDDNLEWYCPNCGNRDHNTLNVARRTCGYIGSNFWNKGRTQEIKERVLHIDNKDDDCDCDECNCDHANTDTSKEEKSEEKQMNFMDYDVEEEITKSKKRMKQPAMV

SEQ ID NO: 894 - protein, 1094 aa, unidentified
  REGION 1..1094: note = Description of Unknown: uncultivated organism sequence
  REGION 1..1094: note = Category: MG60 effectors
  REGION 1..1094: note = Description: MG60-105 effector
MTVTKRDGRKVKFDRSKIVKAITKAFVEVYPDELPADTYTFCAKIADDIEARKQDLTVEEIQDIVVRKLMASKYKDVATQYVQYRYQHELIRQSNTTDKTIKELLDGENEYWKTENSNKNPKVVTTQRDYIAGVTSTDITRRFLLPKDIVKAHDEGIIHFHDADYYAQLSLHNCELINLQDMLQNGTVINGVQIDKPHRLITAATISTQIITAVTSSSYGGATINLSHLAPFVRDSREWHRRKYLSRGMSDGEADSWAMEDTQKEIADAVQTFNYQVNSMTNTNGQAPFLSVFMYLNDDPEHQEETALLIEEFLRQRILGFKNESGHYITPAFPKLLYVLDENNITEESPYWYLTVLAAQCTAKRLVPDYISAKIMRRDKVDANGNGNVYGCMGCVAGDEVITYRMDGMVYTEAFSRAWNRLTRRFAPKIQPGRAIDKYIDLEGVEIYDAVAGWTRCLRMIRNENSEMLRLRFSNGRMLDCTPDHPFETENRGVVQAADLTEEDVIRVDKDSVWTVDTANGVDDYAWMLGLLLCDSSYVSTVRVSIAATGEEEIRDRFTQCAQKYWNAQINDVLHERGVKGTYRDLVIKGDGDGKATNICSELEALFEGRVKSKRHIPNEVFNWSYSARLSFMAGMIDADGYINDHFRVPVVQIGSTNKELAIQQALLAQTLGMRASIYQNHYKGKGRGDTIRYQVSFHPTAELVDRIACKKKQDKFNENELCNPCISLTDFATLTSRTELNEKMPSYDVTTASEHFTVSGIYSHNCRSFLTPYLDAEGKPKYWGRFNQGVVTINLPDVALSSGGDMTKFWELLDERLELCHRALQCRHERLALATADVAPILWRYGALARLPKGAPIHPLLHDGYSTLSLGYAGLYECVKYMTGESHSHGKGFDFGIQVMEKLNEYTAKWKAAEHIDYSLYGSPIETTTYKFATCLKRRFGEVEGITDHGYITNSYHINVRESIDPFEKLAIEAKYQKLSPGGAISYIECSDLTGNIDAVLEVLKFIYDNIMYAELNTKSDYCQVCGYEHEIEIVDNDGVLSWRCPNCGNTDQSKMNVARRTCGYIGTQYWNQGRTEEIRDRYVHLDNHEVGE

SEQ ID NO: 895 - protein, 768 aa, unidentified
  REGION 1..768: note = Description of Unknown: uncultivated organism sequence
  REGION 1..768: note = Category: MG60 effectors
  REGION 1..768: note = Description: MG60-106 effector
MFCSCKKNLCVVIYIYDATKTYDCAKKLIVYKSIIKGAEVMKIIKRNGAEETFDRQKIKDAIAKANNETDGTPELTDRQIDYISLVIEDHCNEMNRALSVEEIQELVETHIILQGAPETAKRYIRYRFTRNLARASNTTDNQILSLIECNNEEVKQENSNKNPTVNSVQRDYMAGEVSKDLTKRILLPEDIVKAHEEGLIHFHDADYFAQHMHNCDLVNLEDMLQNGTVISGTMIEKPHSFSTACNIATQIIAQVASNQYGGQSISLAHLAPFVQISREKITRQVRAEMEEFGIAADDEQVKSLVEKRVRDEIKRGVQTIQYQVVTLLTTNGQAPFVTVFMYLNEAKNEQEKKDLAIIIEEVLKQRIKGTKNEVGVWVTPAFPKLIYVLEEDNITEDSRFWYLTKLAAECTAKRMVPDYISEKIMLKLKIDKNGNGNCYTCMGCRSFLTPYVDENGKPKYYGRFNQGVVTINLVDVACTAARDGSKSEEKFWQVLDERLELCHRALQCRHERLEGTLSDAAPILWQYGALARLKKGEPIDKLLHGGYSTLSLGYAGLWECVYEITGKKLTEKEGEEFGLRVMQRLNDACAEWKAAENIDYSIYGTPLESTTYKFAKCLQNRFGIIKGVTDRNYITNSYHIHVTEKIDAFSKLELESKFQKLSPGGAISYVEVPNMQQNIPAVLEVMKFIYNNIMYAELNTKSDYCQVCGYDGEIQIVEEDGKLVWRCPNCGNEDQSKMNVARRTCGYIGSQFWNQGRTQEIKERVLHL

SEQ ID NO: 896 - protein, 1020 aa, unidentified
  REGION 1..1020: note = Description of Unknown: uncultivated organism sequence
  REGION 1..1020: note = Category: MG60 effectors
  REGION 1..1020: note = Description: MG60-107 effector
MVVIKRNSERVDFDPRKIEVAILKAFAEVRSESDDDIRECAKRIAHEIESTGKDLSVEEIQDMVEKKLMATKYKDVAKAYVEYRYKHKLIREFNTTDKTIKELLCGESDYWNNENSNKNARVVTTQRDYIAGITSTDIARRLLLPADVVEADDEGIIHFHDKDYFAQLSLHNCFDVTTRFITSNGVKAFSDFNDCDEATVLTHTGEWKRARVRKYGKQDLYRIVLKRGHGKEHIVYATANHRWFLQDGSVTTNLHVGDSLMKTPVIANVNLDDADVFEKQLWCKGFAFGDGQYCKAWDGTKIRLCGHKNKYARIFRAAGYTCTSPGNFENGDQEAHIPRYNKNEIPEMTPAETRYFVYGLLCADGDHPTSKGNTKANEFKGIQVTGEEKNFQVYNLLNIAGYYVSGYTDITGKTNYGERSDVTRRYAIQANQSHCNWKVQAIEYAKTDYVWCLNVEDCHSFVLEGGIVTGNCELVNLEDMLQHGTVLNGVMIRKPHRLLTATTIATQIITAVTSSSYGGCTINLSHLAPFVRDSYNAYVKKYRDRGVDEQTTKEWAELDTKKEIADSVQTFNYQCNSMTNTNGQAPFLSVFMYLNDAPEYQKETAMLIEEFLNQRLLGFQNETGHYVTPAFPKLLYVLDENNITEDSEYWYLTELAAKCTAKRMVPDYMSAKIMRRDKIDKNGNGNVYGCMGCRSFLTPYVDKDGKPKYWGRFNQGVVTINLPDIALSSGGDMEKFWKIFDERMALCHKALRCRHERLALATSDVAPILWQNGALARLPKGSPIHPLLHDGYSTLSLGYAGLYECVKYMTGESHSHGKGKEFGLRVMQTLNDFCKKWKEEESIDYSLYGTPIESTTYKFSKCLKKRFGIIEGITDKDYITNSYHISVREKIDPFEKLAIEAEYQKLSPGGAISYVECADLTQNPTAVLEVMRFIYDNIMYAELNTKSDYCQVCGYDGEIQIIDENGKLLWRCPNCGNEDQTKMNVARRTCGYIGTQFWNQGRTQEIKERYVHIDNHEVGE

SEQ ID NO: 897 - protein, 854 aa, unidentified
  REGION 1..854: note = Description of Unknown: uncultivated organism sequence
  REGION 1..854: note = Category: MG60 effectors
  REGION 1..854: note = Description: MG60-108 effector
MKVIKRNGSEVLYNQQKIKDAVSKANAEVSRVERLSQAQITAIANNVTKIIEQSSHAVSIEDIQNYVEKEIMAMRGYEVAQKYITYRYKRALARQSNTTDERILSIIGLENEEVKQENANKNPTINSTQRDYMAGEVSKDLTTRILLPQDIVDAHNNGLIHFHDADYYAQKMHNCFTGDTKFMTHKGAKRFDSFKDGESVFVRDMHNEIRKATVHIYGEQRVQKVTFKMLGKNKKKTVKCTPNHRWILEDKKVTTALKVGDVLFSNSYSHYEKWKVEKIEFKGIEKVYCVEEPITHSFTLEDGMVTGNCDLINLEDMLQNGTVISGTMIEKPHSFHTACNITTQVIAQVASSQFGGQSFSLAHLVPFVDISRKKIKKEILEENLINKIVESDEIINKKVEFRLKEEIKRGIQTIQYQILTLMTTNGQAPFVTMFLWLDEVEEGQARDDMAMLVEEVLNQRIQGVKNEKGVYITPAFPKVIYLLDEDNIHEDSKYYYLTELAAKCTAKRMVPDYISGKVMRELKDGDIYPCMGCRSFLTVDRTTENIANAKNYNPNKRKYYGRFNQGVVTINLVDVACSSYGNMNKFWKILDERLELCHRALQERHNRLLGTPSDVSPILWQHGALARLEKDEVIDKLLYGGYSTISLGYAGLYEMCMRMTGKSHTDPEAKPFALAVMQKLNDKCNEWKEKENIDYSLYGTPMESTTFKFARCLQRRFGIIKDVTDHDYITNSYHVNVRENIDAFTKLSFESEFQKLSPGGAISYVEVPNMQDNIPAVLAVLKHIYNNIMYAELNTKSDYCQVCGYEGEIQIVRDKHKKLIWKCPNCGNTDHNKMNTARRTCGYIGTNDFNQGVT

SEQ ID NO: 898 - protein, 778 aa, unidentified
  REGION 1..778: note = Description of Unknown: uncultivated organism sequence
  REGION 1..778: note = Category: MG60 effectors
  REGION 1..778: note = Description: MG60-109 effector
MFCSCKKKLCVVIYIYNATKTYDCAKKLIVYKSIIKGAEVMKIIKRNGAEETFDRQKIKDAIAKANNETDGTPELTDRQIDYISLVIEDHCNEMNRALSVEEIQELVETHIILQGAPETAKRYIRYRFTRNLARASNTTDNQILSLIECNNEEVKQENSNKNPTVNSVQRDYMAGEVSKDLTKRILLPEDIVKAHEEGLIHFHDADYFAQHMHNCDLVNLEDMLQNGTVISGTMIEKPHSFSTACNIATQIIAQVASNQYGGQSISLAHLAPFVQISREKITRQVRAEMEEFGIDADDEQVKSLVEKRVRDEIKRGVQTIQYQVVTLLTTNGQAPFVTVFMYLNEAKNEQEKKDLAIIIEEVLKQRIKGTKNEVGVWVTPAFPKLIYVLEEDNITEDSRFWYLTKLAAECTAKRMVPDYISEKIMLKLKIDKNGNGNCYTCMGCRSFLTPYVDENGKPKYYGRFNQGVVTINLVDVACTAARDGSKSEEKFWQVLDERLELCHRALQCRHERLEGTLSDAAPILWQYGALARLKKGEPIDKLLHGGVFFPLARHGGYSTLSLGYAGLWECVYEITGKKLTEKEGEEFGLRVMQRLNDACAEWKAAENIDYSIYGTPLESTTYKFAKCLQNRFGIIKGVTDRNYITNSYHIHVTEKIDAFSKLELESKFQKLSPGGAISYVEVPNMQQNIPAVLEVMKFIYNNIMYAELNTKSDYCQVCGYDGEIQIVEEDGKLVWRCPNCGNEDQSKMNVARRTCGYIGSQFWNQGRTQEIKERVLHL

SEQ ID NO: 899 - protein, 763 aa, unidentified
  REGION 1..763: note = Description of Unknown: uncultivated organism sequence
  REGION 1..763: note = Category: MG60 effectors
  REGION 1..763: note = Description: MG60-110 effector
MYIQPIITVSDTTHKFNFVKLFFQKNKNSLRDVWRGNGMKIIKRNGEEVVFDLKKIITAISKANNEVPPSEQLAGSTINSIAENIEKQCAAENHEMNVEAIQDLVEKAIMKAGAFDIAKKYITYRYQHQLMRRANSTDSQILSLLECNNEEVKQENSNKNSTVVSVQRDYMAGEVSKDITKRFLLDEDIVKAHEEGLIHFHDADYFAQHMHNCDLVNLEDMLQNGTVISGTKIDTPHSFSTACNIATQIIAQVASSQYGGQSISLAHLAPFVEVSRKKFQRETMRVEEQTGVKFTDEQFKKIVEMRIRDEITRGVQTIQYQVVTLMTTNGQSPFITVFMYLNEAKNEQEKADLAMIIEEMLKQRYQGVKNEKGFWVTPAFPKLIYVLEPDNIEPGSKYYSLTELAAKCTARRLVPDYISEKKMLELKVDANGNGNCYPCMGCRSFLTPYLDEHGKPKYYGRFNQGVVTINLVDVACSSNGDYKSFWEIFDERLELCHKALMRRHQRLLGTPSDVAPILWQHGALARLEKGETIDKLLFGGYSTISLGYAGLCECVRYMTGKPHTDPSATPFAIEIMKHLNEKCAEWKAESNIAFSLYGTPLESTTYKFAKCLKKRFGEIPGVTDKNYITNSYHVHVTEQMDAFTKLSFESQFQELSPGGAVSYVEVPNMENNIPAVMTLLKHIYENIMYAELNTKSDCCQKCGYTGEIQIVTDSDNKLVWQCPNCGNKDQATMNVARRTCGYIGTQYWNQGRTQEIKERVLHL

SEQ ID NO: 900 - protein, 758 aa, unidentified
  REGION 1..758: note = Description of Unknown: uncultivated organism sequence
  REGION 1..758: note = Category: MG60 effectors
  REGION 1..758: note = Description: MG60-111 effector
MRINMIIENYKKQYSFLAFSEKSWKSLSERITKLVENKTLNSVDEIRTYLDRILCSYIDKQISIGNIRIIHNMLILLKRRKLSYSNLLQEFLSQLEIYHIHMTESFYEVLKKESVLYQNIVKSLGISDLKFCELSAFWKEYSFYFKFSVHGKSLKEVKDIFDGYYYSLNVQEQKQVMDNMDSHLDQFRYLIYHASFLDGIYQVCYTKIRDISLSLFRKVIFSWSIDQLDLLIEEYCYNQIYGGSALEKYDKIWLLIKELKPQHDEKKKHLGNECLKIKGERRTLYSYFEKIKSNLSEEDKKVIDTLYVHLSKERQEGIDGYINGLYHQNDEVGRKASNDISMLKGQFKKYLINGCLKVKGERRTLYSYFEKIKSNLSAEDRGIIDILYTHLSKERQEGIDGYISGLYHQNDEVGRKASNDISILKRQFKKYLQSGCLNLKNEPHTLYFYFRMLKSDLSEEDKKVIDTLYAHLSKERQEAIDGYISGLYRYNDNMRRKASNDILILKRQFARYLAKGDLTIRSKDRSLYSCFEKIKSNLSEEDRRIIDILYNHLSKERQEGIDGYINGLYHQNDEVGRKASNDISTLKRQFKKYLESGCLNLKNEPHTLYFYFKMLKSDLSEEDKKVIDILYARLSKEKQEEINGYINGLYHQSDEVRKKARIDLLGLRRKFERYLKIESLEVCSKKQLEVKQVLLDALKVIEMSFYRLGYTTSEYLKYKNEKMIEIMNKGNFSHYNILYIFIMESFYFIKEQEKIRSL

SEQ ID NO: 901 - protein, 768 aa, unidentified
  REGION 1..768: note = Description of Unknown: uncultivated organism sequence
  REGION 1..768: note = Category: MG60 effectors
  REGION 1..768: note = Description: MG60-112 effector
MFCSCKKNLRVVIYIYDATKTYDCAKKLIVYKSIIKGAEVMKIIKRNGAEETFDRQKIKDAIAKANNETDGTPELTDRQIDYISLVIEDHCNEMNRALSVEEIQELVETHIILQGAPETAKRYIRYRFTRNLARASNTTDNQILSLIECNNEEVKQENSNKNPTVNSVQRDYMAGEVSKDLTKRILLPEDIVKAHEEGLIHFHDADYFAQHMHNCDLVNLEDMLQNGTVISGTMIEKPHSFSTACNIATQIIAQVASNQYGGQSISLAHLAPFVQISREKITRQVRAEMEEFGIAADDEQVKSLVEKRVRDEIKRGVQTIQYQVVTLLTTNGQAPFVTVFMYLNEAKNEQEKKDLAIIIEEVLKQRIKGTKNEVGVWVTPAFPKLIYVLEEDNITEDSRFWYLTKLAAECTAKRMVPDYISEKIMLKLKIDKNGNGNCYTCMGCRSFLTPYVDENGKPKYYGRFNQGVVTINLVDVACTAARDGSKSEEKFWQVLDERLELCHRALQCRHERLEGTLSDAAPILWQYGALARLKKGEPIDKLLHGGYSTLSLGYAGLWECVYEITGKKLTEKEGEEFGLRVMQRLNDACAEWKAAENIDYSIYGTPLESTTYKFAKCLQNRFGIIKGVTDRNYITNSYHIHVTEKIDAFSKLELESKFQKLSPGGAISYVEVPNMQQNIPAVLEVMKFIYNNIMYAELNTKSDYCQVCGYDGEIQIVEEDGKLVWRCPNCGNEDQSKMNVARRTCGYIGSQFWNQGRTQEIKERVLHL

SEQ ID NO: 902 - protein, 768 aa, unidentified
  REGION 1..768: note = Description of Unknown: uncultivated organism sequence
  REGION 1..768: note = Category: MG60 effectors
  REGION 1..768: note = Description: MG60-113 effector
MFCSCKKNLRVVIYIYNATKTYDCAKKLIVYKSIIKGAEVMKIIKRNGAEETFDRQKIKDAIAKANNETDGTPELTDRQIDYISLVIEDHCNEMNRALSVEEIQELVETHIILQGAPETAKRYIRYRFTRNLARASNTTDNQILSLIECNNEEVKQENSNKNPTVNSVQRDYMAGEVSKDLTKRILLPEDIVKAHEEGLIHFHDADYFAQHMHNCDLVNLEDMLQNGTVISGTMIEKPHSFSTACNIATQIIAQVASNQYGGQSISLAHLAPFVQISREKITRQVRAEMEEFGIAADDEQVKSLVEKRVRDEIKRGVQTIQYQVVTLLTTNGQAPFVTVFMYLNEAKNEQEKKDLAIIIEEVLKQRIKGTKNEVGVWVTPAFPKLIYVLEEDNITEDSRFWYLTKLAAECTAKRMVPDYISEKIMLKLKIDKNGNGNCYTCMGCRSFLTPYVDENGKPKYYGRFNQGVVTINLVDVACTAARDGNKSEEKFWQVLDERLELCHRALQCRHERLEGTLSDAAPILWQYGALARLKKGEPIDKLLHGGYSTLSLGYAGLWECVYEITGKKLTEKEGEEFGLRVMQRLNDACAEWKAAENIDYSIYGTPLESTTYKFAKCLQNRFGIIKGVTDRNYITNSYHIHVTEKIDAFSKLELESKFQKLSPGGAISYVEVPNMQQNIPAVLEVMKFIYNNIMYAELNTKSDYCQVCGYDGEIQIVEEDGKLVWRCPNCGNEDQSKMNVARRTCGYIGSQFWNQGRTQEIKERVLHL

SEQ ID NO: 903 - protein, 843 aa, unidentified
  REGION 1..843: note = Description of Unknown: uncultivated organism sequence
  REGION 1..843: note = Category: MG60 effectors
  REGION 1..843: note = Description: MG60-114 effector
MIKCIECGHTISERAKKCPKCGCPVEKDIEKKMCPECGQSVNKDLDKCSYCGYPFDLVQSIDDTNSSVNKVCPECGQSVNKDLNKCSYCGYPFDLVQSVDDANSSVNKVCPECGQSVNKDLNKCSYCGYPFDLVQSVDDANSSVNKVCPECGQSVNKDLNKCSYCGYPFDLVQSVGDANSSINKVCPECRQSVNKDLDKCSYCGYPFNLVQSVDDANSSVNKVCPECGKSFDDKCDVCPHCGCFYSYQHISQFENVELNKANIESSEPKQEHQSTTDIRKTLLKRNKTTIISLSMLTILIVVGGLLYYFLVNHSEKNDWNKFGLKGSACVLRVIISTQYGDNTELVRNEKKYYFSVNGYLEKEEIDYTYHWGYRQYVKGKIVEEKDFNGITYHYTYENPLIGISEDNREYHYDKEGRLIFSVLYGDSTVYRYDDEGFLKETEVLNFQGLDGCEIQTYSNPLHVDGITKVDEYGNWIERKYEYEGEGGMIYVTENREIEYYSESSQVGNYGEAISEVSIEEYPSQLPQNRKEALDILNLVLINSYKVEEDCESEYAIPVRIEGNAEIVGIQRKGYKDGYFPFTIYRLRQIANHWQIVNEKTINENEMDGQVLIFSAKRFGLADENMPELVRINNKDYFYFIYRIAELGNGCAGCGYLRLCLYNLDSHDVLSLNYAVYGEINELLKGEFVDLEKLESYPDENRFLQKKATELTCIYRPSEEDLDMDNPKNSVKRWLLDNPGKYEPQNTTIKYTYYNTSIFDWDNYNDEKENRIENDSFIVVHDWRGSVYAYDKEKKRYFVIYGIEINGGARKVSWDNRASDVVVIDTDWCGMRINLLSGKMELLE

SEQ ID NO: 904 - protein, 1081 aa, unidentified
  REGION 1..1081: note = Description of Unknown: uncultivated organism sequence
  REGION 1..1081: note = Category: MG60 effectors
  REGION 1..1081: note = Description: MG60-115 effector
MKSVIDFETRSPVDIKTCGAYAYAAHPDTEVMMLAVRICGQEARVWVAPAYRHFLDTELSDDELQDIINNCEEIAAHNAPFERAIWKFKMEPLWFKPLPLEKIRCTMSQALMCNLPRKLEQAVKVWRKDAPQKDNEGHKLMMKMSKPRKFRKAELSAFPDPEKAKATQEYVYAVLSKGGIPTIKNYHQYIVYPCDEPMFKRYVEYCRQDVVAEEVLFTELPPIPERELKVWRLDQTINDRGVGIDRFHAVKIMDMVNKVEDILTEEASEITYGAVSTMKSSKAIIEWLQSRGVDTDSASKQAISDLLERPDLPSDVRRFLEIRQTIAMSSTAKYQTMLCTSCYDGRAHGTMIYHGASTGRFSGALIQPQNLTRPSTNNMNIPEGSKPLDNYDISEMDVRLAASGNIDLIQQYWKDPKVLASDCLRAMIRASEGRVFMCADYSGIEARALAYLAGEEYVLQGFRDGLDPYKVAATTIYGVKYENVDKKQRQVGKTATLACFTADTKVYTRDGVKNIVDVTKDDYVWDGENWCLTDGAYYQGVKEVVNFLGVESTPDQKWLMGENIWVESDAGKVLLETFMEIFKSCHCVEKQEISCTQDASLAGENAMCRHGTYCLEEQLSALNADENLELKQSQNTIQWSSLTREDGLIDYTQQLADVIMKQIQHMNGMEPEELKYTMNGWKIKIPSLNICVELTIGTTQGMKSTALITTMDTCREMLGVSWDETIKETPQEIDLYRMVEELCALLIFGVSIAPNIEARELLVNYLEKESIPKKSSNQCRKESVVNTTKYITSKKFFTVEKNCLSMSFGKNMFRGTRKNLIFKLDSIKDRVLSTSSRTKKSDNKENVYDLLNCGDKSRFTISTSYGPRIVHNCGYGGGYGAFLRFGADRMGIDEEEGKKIISSWRDGHPMTVKLWNKLVEASVMAMTNKGEIYSYRGVSFRYHKRFLLMKLPSGRFLFYFDPKLEDVGMAWSTPERPAFKKLVTAMTLTPEKQFVRRPLNHLILSENLTQAFCRDLMVNALFNLEEAGYPVVFHVHDEIISEVPIGYGDIKEFEEIMCKLPLWAKDLPVKAEGWVGKFYRK

SEQ ID NO: 905 - protein, 965 aa, unidentified
  REGION 1..965: note = Description of Unknown: uncultivated organism sequence
  REGION 1..965: note = Category: MG60 effectors
  REGION 1..965: note = Description: MG60-116 effector
MSLKIEDLETFKRHRYAVSESLSTDIVGRDREIEEISSKIDSVYCLTITGPAGVGKSRLAVAAIEHYCASHTDFEVLCAKSFSDYISALDEAIEEGRRYIIFIDDANTYPRLIELLEFLKYRNQEGNIKAILTVRDYLKGCLDSDIYMGFYEVKPLNDKSIEDALVKNTTIRNEDWLKQIAKIANGNIRVAFLAANEAIKNNKSLGSIYNQKDVLNRFYKDEMSKIDHSESLLITAGVIAFFKSIYLEQLFYIVPILKSVNLSKKSFIENVNILIKMKIVDDYHDVVKIADQCFADFLLNYTIVEKRYLKIKDLLLVGFKYYKERIVESIHTILHVYNTEEFVDHLRKEVTDACNNLEDDVSLKHDLESCFVQVIPEYVSREYIEGVENYSDKKDIKWLINVFSGLAFSNYNEIANKGILKLLKKTKNKTKEVYDAIKNTYEMRAERANERFQYQIALIKELQNGGLYNDEFNALVSSYLNFRFSYSCFTSKREMMHYTFSVDDNTAGILELRSTCWGYLFNCELSKAIDSIMDFANRHYIERNLEIIKNDLRCINTYLCEHDQSGFLNSVLYVKFIDEAKEYCFTDLLTANEKYLDFLDIVFERKLLGANYEGYEARYKNRVADYYNLHKDDIYDILNETDLFLNKYYKYQKTRLVNALVEVVDKFSNALFFLCTKNGIFPHLVIEEFLKNRNLDEAYALINQIDDETIKDEYLYNFYSYLSKENIEKDYGFIGWMNSKGDFKTNRTYHRDAMSLKNIAEKCGLDYVALLRKLYSKEKYNKFIAKAYLSYLIDNVETFKELLSLNQNLAIKIYEFLIANGEKDYESSVLIEILDVKRSYIKVFAKAFIEEEYYNDCNLDFIFEKEYCDSFLDECMKVMLSQKINFAPFKLRILISRNINQPNMERWIEKYIESNYKEDNVIELFFQALSEIDHQHKNAYLVLYYQKGHDINVLRQAILKKIPFL

SEQ ID NO: 906 - protein, 754 aa, unidentified
  REGION 1..754: note = Description of Unknown: uncultivated organism sequence
  REGION 1..754: note = Category: MG60 effectors
  REGION 1..754: note = Description: MG60-117 effector
MNYEEKLTQLASDYADWWNKGYEMPSMTSNLYPYDNMFSPVRVNRLTLKNRLVMAPMGNICMCDETGRPNEKMLKYFEERAKGGVGLITTGLIPVTYGIDKSLIELGDLTYFPRIDRSRTVFAPWRDLAGMCHAHGSAIFIQLTAGLGRVGNPQCLTNQLKLPRSSSFNPNWYMKDVPCLRLSDISLNKIIKKIGQGSADAKACNLDGVYLHGHEGYLIEQIANKAFNHRKLGKFADPTVFGIEMVKEIRRRVGANFPIMYRIDLSLMLNATYKAKMDNVSPLKKFKNERRIEETLEYMRELVEAGVDMFDVDLGCYDNWWLPHPPSSMPSGCFLDISEIAKKYFADNNIKSNMGLEIPVVAVGKLGYPDFAEKALRDGKCDMIMLGRPLLADAEWCNKAYAGKVSDIRPCIGCQEACLNEFVEGGHPQCAVNPRTAFEEEYSPEIPKADVVKKVAVVGAGPAGIVAADTLIKRGHKVDLYEKSGEIGGSVIPGSKPMIKYEFKNYLDYLKGVVAKLEKNESFKLFMNTAADAQSLKEKGYDSIVIAAGTVQNRPPVEGINNKNVVFAVDVLNDRNIVKDAEDIVVIGGGVVGAETAYVLRYELKKNVKVVEMDKYIMNHVCTANRGHLIHYLEEGGVELLNMTTLKKVEDGKIVVEQNINKNVPNPYITWSPILPENVENPMDALRPIKNEPVTRELKADMVVLAAGNRSAIDIYYDCVKNHSAAEIFNVGDSFKGARVFEAVRSAYRKARSI

SEQ ID NO: 907 - protein, 754 aa, unidentified
  REGION 1..754: note = Description of Unknown: uncultivated organism sequence
  REGION 1..754: note = Category: MG60 effectors
  REGION 1..754: note = Description: MG60-118 effector
MNYEEKLTQLASDYADWWNKGYEMPSMTSNLYPYDNMFSPVRVNRLTLKNRLVMAPMGNICMCDETGRPNEKMLKYFEERAKGGVGLITTGLIPVTYGIDKSLIELGDLTYFPRIDRSRTVFAPWRDLAGMCHAHGSAIFIQLTAGLGRVGNPQCLTNQLKLPRSSSFNPNWYMKDVPCLRLSDISLNKIIKKIGQGSADAKACNLDGVYLHGHEGYLIEQIANKAFNHRKLGKFADPTVFGIEMVKEIRRRVGANFPIMYRIDLSLMLNATYKAKMDNVSPLKKFKNERRIEETLEYMRELVEAGVDMFDVDLGCYDNWWLPHPPSSMPSGCFLDISEIAKKYFADNNIKSNMGLEIPVVAVGKLGYPDFAEKALRDGKCDMIMLGRPLLADAEWCNKAYAGKVSDIRPCIGCQEACLNEFVEGGHPQCAVNPRTAFEEEYSPEIPKADVIKKVAVVGAGPAGIVAADTLIKRGHKVDLYEKSGEIGGSVIPGSKPMIKYEFKNYLDYLKGVVAKLEKNENFKLFMNTAADAQSLKEKGYDSIVIAAGTVQNRPPVEGINNKNVVFAVDVLNDRNIVKDAEDIVVIGGGVVGAETAYVLRYELNKNVKVVEMDKYIMNHVCTANRGHLIHYLEEGGVELLNMTTLKKVEDGKIVVEQNINKNVPNPYITWSPILPENVENPMDALRPIKNEPVTRELKADMVVLAAGNRSAIDIYYDCVKNHSADEIFNVGDSFKGARVFEAVRSAYRKARSI

SEQ ID NO: 908 - protein, 757 aa, unidentified
  REGION 1..757: note = Description of Unknown: uncultivated organism sequence
  REGION 1..757: note = Category: MG60 effectors
  REGION 1..757: note = Description: MG60-119 effector
MIQVIKRDGSKAKFEKDKIVIAIEKAMKSASGVFVKNQAMDIANEIESEALGEDAISIYKIEDMVYYKLIDRKNPATAKSYESYKSVQAYKREQNTSDEDILGLLNQTNIDVMDENSNKNPIIASTQRDLIAGEVAKDIAKRKLIPIDLVEAHNSGAIHIHDLDYLIQPIFNCCLVDMKDMLDNGTVVNDKMIETPKSFQVACNVMTQIIAQIASNQYGGQSINISCLSPYLKKSYDKNLKLSRSILDDDEKVVEMAEALTQRDLESGIQTIQYQINTLMTSNGQSPFVTLFMHTDENDPYLSSTVKIIEEILIQRIKGIKNEQGVYVTPAFPKLIYVLDENNVHEGSKYYKLTELAAKCTAKRMYPDYISAKKMRENYEGNVFSPMGCRAFLPPYKDENGNYKFDGRFNMGVATINLPQIGILADGDEDKFFEILDKRLDLIKQVGLLRYEHLSKVTSDSSPIHFRHGAIARLKRHQSIKPLLENGYATVTIGYIGIYEASILTTGESHTSKRGHDFAMKIMKVLNEKKEEWTKEYGIAFAVYGTPAESLTHRFASIDKERFGSIENVTDKGYYTNSFHVDVREKISVFDKFDFESEFQQLSTGGCISYAEIPNMTNNINAVMTMVKYIYDHIQYAEFNTKSDYCAECGFDGEILLDEDNNWYCPNCGNKDRNTLTVVRRTCGYLGENFWNEGRTKEIKARVLHIWDMGKLENMTLPMVLESGPLFSYQVAIGIVRIALIGTIWILTLVKSGMKRP

SEQ ID NO: 909 - protein, 1041 aa, unidentified
  REGION 1..1041: note = Description of Unknown: uncultivated organism sequence
  REGION 1..1041: note = Category: MG60 effectors
  REGION 1..1041: note = Description: MG60-120 effector
MVGRTAVHPSRKKEEKKRKGDERHMIKVKKRTGKIVDFDESRIANAVQGALTDIGHPDAQLAQEIAVEIHSGLIADGVESITIAGIQKRVETALMSRKQFDAARAYIEYRHRKDITRALKEKAEERNRNIMKLIRNDDDDIRKENSNKDTSLVSTRFSYMAEEANKEIASEILFDKDLIEAHKAGMIHIHDMGFAALPMHNCFTRTTRFVTTEGVKSFEDFIDGEEVTVLSKDGKWHKATVHNYGKQPMQKVLFKCLKSTKEVVCTPNHRWVLADGSVTTKLKEGMTLVQLPLYEISEPKTKKQCQAFALGFILGDGFDRGKFVEARLCGPKKKYADIFKKAGYHITYPDLDNGDARVRKAPSRKQSFLDGRCWQYLDLEDKQYLFLGLYAADGRDTENEYSGRFITSADERIMKMICDISATAGYHVSSVKKETHDTPYKKEAVLYTIRFRRWQNSGGNYWSVSQISSFEDREAWCIEEPDTHSFILDGGMVTGNCDVWNLDDMLQNGTVMNGIAISKPKSLATAVTIATQIVISIAASQYGGQTFSISALAPFVRVSYEKHLKEVEADAKGSGIVMTDDQVRFVAENRLRKEIKDAVQTLQYQLISCAVSNGQAPFVSVFMYLDEKPEYKKETAMLAEEILRQRYAGIPNKQGVPVSVAFPKLLFVLDEDNVPEDSEYHYLLKMAVKCSAKRMVPDYISAKKMKEYKEGNVFPCMGCRSFLSPWKDENGNYKFYGRFNQGVVTVNLVDAALSSGKDEARFWEIMKERTDLCYRALMTRHKLLLGTKSDVAPILWQHGALARLKPGEVIDPLLFGGYSTISLGYVGLYECTLYMTGHSHTSPEGKAFAMKVMKYLNDRCDEWRAATDIGFSVYGTPEETTTDKFAKCLKKRFGIVPGITDHDYVTNSYHVNPAEKIDAFSKLALEGEFQAYSLGGEISYVEVPNMEKNLAALESVVEFMYDNTVYAEVNTKSDYCQKCGYDGEMLIDPKRMEFYCPNCGNTDYATMNITRRVCGYLSTNFPTTHGRMADISARVLHLDAE

SEQ ID NO: 910 - protein, 751 aa, unidentified
  REGION 1..751: note = Description of Unknown: uncultivated organism sequence
  REGION 1..751: note = Category: MG60 effectors
  REGION 1..751: note = Description: MG60-121 effector
MEENVQTNVIKRNGEEVTFDIEKIFNAIAKANKEVDPIHQMSDVQIRAVSENVAREVRKAPHAVNVEDIQDMVETGIMEMRGFEVAQKYVRYRYKRTLARKSNTTDDGILALIEQNNEEVKQENSNKNPVINSTQRDYMAGEVSRDLSRRILLPEEVVRAHEAGIIHFHDSDYYAQKEHNCDLINLEDMLQNGTVISETLIEKPHSFYTAANVTTQIVAQVASNQYGGQSFTLAHLAPFVDISRKKLRKQTAEELQAVGEEIDEKKVESIAEIRLKDEVTRGIQTIQYQLITLMTCNGQAPFVTMFMYLDEVPEGQTREDLAMLIEEVLRQRMQGVKNEKGVWITPAFPKLIYVLDEDNITEDSRYWYLTKLAAECTAKRMVPDYISAKKMKELKGDVYPCMGCRSFLTPDNEQQPEGLCNDGNKAEAGDYTPGQHKYYGRFNQGVVTINLVDVACSAVKEAEKAGTDKFDEFWKILDDRLELCHRALRCRHERLMGTPSDVAPILWQYGALARLKKGEKIDKLLFGNYSTISLGYAGLYEMCVEMTGKSHTDEEAKPFALKVMQTLNDYCMKWRKAENISYSLYGTPMESTTYKFAKCLQKRFGIIKDVTDHNYITNSYHVNVREKIDAFRKLEFESEFQKLSPGGAISYVEVPNLQDNIPAVLSVMQFIYENIMYAELNTKSDYCEVCGYDGEIQIHEDEHGKLIWVCPNCGNTDQTKMSVARRTCGYIGTQFWNQGRTQEIKDRVLHL

SEQ ID NO: 911 - protein, 768 aa, unidentified
  REGION 1..768: note = Description of Unknown: uncultivated organism sequence
  REGION 1..768: note = Category: MG60 effectors
  REGION 1..768: note = Description: MG60-122 effector
MFCSCKKNLCVVIYIYDATKTYDCAKKLIVYKSIIKGAEVMKIIKRNGAEETFDRQKIKDAIAKANNETDGTPELTDRQIDYISLVIEDHCNEMNRALSVEEIQELVETHIILQGAPETAKRYIRYRFTRNLARASNTTDNQILSLIECNNEEVKQENSNKNPTVNSVQRDYMAGEVSKDLTKRILLPEDIVKAHEEGLIHFHDADYFAQHMHNCDLVNLEDMLQNGTVISGTMIEKPHSFSTACNIATQIIAQVASNQYGGQSISLAHLAPFVQISREKITRQVRAEMEEFGIAADDEQVKSLVEKRVRDEIKRGVQTIQYQVVTLLTTNGQAPFVTVFMYLNEAKNEQEKKDLAIIIEEVLKQRIKGTKNEVGVWVTPAFPKLIYVLEEDNITEDSRFWYLTKLAAECTAKRMVPDYISEKIMLKLKIDKNGNGNCYTCMGCRSFLTPYVDENGKPKYYGRFNQGVVTINLVDVACTAARDGNKSEEKFWQVLDERLELCHRALQCRHERLEGTLSDAAPLLWQYGALARLKKGEPIDKLLHGGYSTLSLGYAGLWECVYEITGKKLTEKEGEEFGLRVMQRLNDACAEWKAAENIDYSIYGTPLESTTYKFAKCLQNRFGIIKGVTDRNYITNSYHIHVTEKIDAFSKLELESKFQKLSPGGAISYVEVPNMQQNIPAVLEVMKFIYNNIMYAELNTKSDYCQVCGYDGEIQIVEEDGKLVWRCPNCGNEDQSKMNVARRTCGYIGSQFWNQGRTQEIKERVLHL

SEQ ID NO: 912 - protein, 760 aa, unidentified
  REGION 1..760: note = Description of Unknown: uncultivated organism sequence
  REGION 1..760: note = Category: MG60 effectors
  REGION 1..760: note = Description: MG60-123 effector
MCVVIYIYNATKTYDCAKKLIVYKSIIKGAEVMKIIKRNGAEETFDRQKIKDAIAKANNETDGTPELTDRQIDYISLVIEDHCNEMNRALSVEEIQELVETHIILQGAPETAKRYIRYRFTRNLARASNTTDNQILSLIECNNEEVKQENSNKNPTVNSVQRDYMAGEVSKDLTKRILLPEDIVKAHEEGLIHFHDADYFAQHMHNCDLVNLEDMLQNGTVISGTMIEKPHSFSTACNIATQIIAQVASNQYGGQSISLAHLAPFVQISREKITRQVRAEMEEFGIAADDEQVKSLVEKRVRDEIKRGVQTIQYQVVTLLTTNGQAPFVTVFMYLNEAKNEQEKKDLAIIIEEVLKQRIKGTKNEVGVWVTPAFPKLIYVLEEDNITEDSRFWYLTKLAAECTAKRMVPDYISEKIMLKLKIDKNGNGNCYTCMGCRSFLTPYVDENGKPKYYGRFNQGVVTINLVDVACTAARDGSKSEEKFWQVLDERLELCHRALQCRHERLEGTLSDAAPILWQYGALARLKKGEPIDKLLHGGYSTLSLGYAGLWECVYEITGKKLTEKEGEEFGLRVMQRLNDACAEWKAAENIDYSIYGTPLESTTYKFAKCLQNRFGIIKGVTDRNYITNSYHIHVTEKIDAFSKLELESKFQKLSPGGAISYVEVPNMQQNIPAVLEVMKFIYNNIMYAELNTKSDYCQVCGYDGEIQIVEEDGKLVWRCPNCGNEDQSKMNVARRTCGYIGSQFWNQGRTQEIKERVLHL

SEQ ID NO: 913 - protein, 763 aa, unidentified
  REGION 1..763: note = Description of Unknown: uncultivated organism sequence
  REGION 1..763: note = Category: MG60 effectors
  REGION 1..763: note = Description: MG60-124 effector
MKMIQQLYSIFVAFATVFLKNKYIIRTYKSNKKYLIDIRKMALLKDLYTRKEWGKMKVIKRDGRTIEFDREKIEVAIEKANKEVRGKEKATKDEINEIIAYIEDLGKKRMLVEDIQDVIEEKLMELDKYELAKKYIVYRYTRALVRKSNTTDESILGLIKNENKELAEENSNKNTMLASTQRDYIAGEVSRDLTKRILLPEKISKAHEEGILHFHDADYFVQPIFNCCLINIGDMLDNGTAMNGKMIETPKSFQVACTVTTQIIAAVASNQYGGQSVDLKHLGKYLRRSHDKFQKRLTEKYGGKLPKQTIDDMIRDRVKEELAAGVQTIQYQINTLMTTNGQSPFVTLFLHLEPDDEYIKENAMIIEEVLKQRIQGIKNEVGVYVTPAFPKLVYVLDEHNCLKGGKYDYLTRLAVKCSAKRMYPDYISAKKMKENYEGNVFSPMGCRSFLVPWKDENGNYKFEGRFNQGVVSINLPQIAIIAQGDEDKFWKLFDERLELCREALMCRHYALLGTSSDISPIHWQNGAIARLKKGEKIDKYLKDGYSTLSLGYIGIYETTKLIKGVSHTTPEGHDFAIKIMKYLKDRTNLWRKETGLGFSLYGTPAESLCYRFARIDKEKFGSIPDVTDKGYYTNSYHVDVREKIDAFHKLKFESEFQPLSAGGAISYIEVPNMKNNLTALEEVVKFIYDNIQYAEFNTKSDYCQVCGYDGEMIINDQNEWECPQCGNKDHNKMNVVRRTCGYLGENFWNVGKTKEIKSRVLHL

SEQ ID NO: 914 - protein, 754 aa, unidentified
  REGION 1..754: note = Description of Unknown: uncultivated organism sequence
  REGION 1..754: note = Category: MG60 effectors
  REGION 1..754: note = Description: MG60-125 effector
MKVVKRDGKIVDFDEDRIRIAIGKANNEVDDSDKATEEEIDEIVKKIRTLKRKRILVEDIQDMIEDGLMNYKRFNLAREYITYRYNRALVRKANTTDQTIKELVDGESEYWNTENSNKNSKVVTTQRDYLAGITSTDITRRFLLPQDVVKAHDEGIIHFHDADYFAQNALTNCCLINLNDMLQNGTVINGMMIEKPHRFITACTIATQIILGVSSSQYGGCTITLTHLAPFVRDSYNRALKKYKERGLSQKEAEKFAELDTRKEIADGVQTFNYQVNSMTNTNGQAPFLSVCMYLGETKEYKKELALIIEEFLNQRILGFKNEKGVYITPAFPKLLYVLEEDNIHKDSPYWYLTELAAKCTAKRMVPDYISEKKMKEYKINQYGEGDCYPCMGCRSFLTPDRIKGNVAKAKDYVEGKGKYYGRFNQGVVTINLPDVALSSKKDEKEFWKIFDERLEICHKALRCRHERLAKITSDAAPLLWQHGAYARLGKGEKILPLLKGGYSTLSLGYAGLYECVKYMTGDSHTDGGKGEEFGLKVMQYMNDKCNKWKKEEDIDYSLYGSPIESTTYKFAKCLKKRFGTVKGITDRKYITNSYHVPVFEEIDAFSKLKLESKFQRLSPGGAISYVETPNLQNNIEVVEQIIEYIYNNIMYAELNTKSDYCQKCGYTGEILIDDNLEWYCPNCGNRDHDTLNVARRTCGYIGTNFWNKGRTEEIKERVLHIDNKDYVDTKAPKVEAKEEKKEKAKEKVSVSAN

SEQ ID NO: 915 - protein, 768 aa, unidentified
  REGION 1..768: note = Description of Unknown: uncultivated organism sequence
  REGION 1..768: note = Category: MG60 effectors
  REGION 1..768: note = Description: MG60-126 effector
MFCSCKKNLRVVIYIYNATKTYDCAKKLIVYKSIIKGAEVMKIIKRNGAEETFDRQKIKDAIAKANNETDGTPELTDRQIDYISLVIEDHCNEMNRALSVEEIQELVETHIILQGAPETAKRYIRYRFTRNLARASNTTDNQILSLIECNNEEVKQENSNKNPTVNSVQRDYMAGEVSKDLTKRILLPEDIVKAHEEGLIHFHDADYFAQHMHNCDLVNLEDMLQNGTVISGTMIEKPHSFSTACNIATQIIAQVASNQYGGQSISLAHLAPFVQISREKITRQVRAEMEEFGIDADDEQVKSLVEKRVRDEIKRGVQTIQYQVVTLLTTNGQAPFVTVFMYLNEAKNEQEKKDLAIIIEEVLKQRIKGTKNEVGVWVTPAFPKLIYVLEEDNITEDSRFWYLTKLAAECTAKRMVPDYISEKIMLKLKIDKNGNGNCYTCMGCRSFLTPYVDENGKPKYYGRFNQGVVTINLVDVACTAARDGNKSEEKFWQVLDERLELCHRALQCRHERLEGTLSDAAPILWQYGALARLKKGEPIDKLLHGGYSTLSLGYAGLWECVYEITGKKLTEKEGEEFGLRVMQRLNDACAEWKAAENIDYSIYGTPLESTTYKFAKCLQNRFGIIKGVTDRNYITNSYHIHVTEKIDAFSKLELESKFQKLSPGGAISYVEVPNMQQNIPAVLEVMKFIYNNIMYAELNTKSDYCQVCGYDGEIQIVEEDGKLVWRCPNCGNEDQSKMNVARRTRGYIGSQFWNQGRTQEIKERVLHL

SEQ ID NO: 916 - protein, 1323 aa, unidentified
  REGION 1..1323: note = Description of Unknown: uncultivated organism sequence
  REGION 1..1323: note = Category: MG60 effectors
  REGION 1..1323: note = Description: MG60-127 effector
MSNFESYLNQFRVQKGEACNYTGMTINRGSFYIPEENRTTFLSKYYDHVFKQGGSSDLIERHSDLCCVLYDLDMKIDKESEERGYTREIINSFIEISTRIMKKYFDLPVSAYQCFVLEKDKPTVKKECKKDGVHLMFPYIVTEPSIQHLIRDEIVIEAKHLFEECLNTIEDIVDISVLDKNGWMLLGSSKIDGLPYNLTGIWSYENIEDVGNTFPNRVETSEYYTPSLDLVTLLSIRRFTLADITNFKSDMQDFLESWIDDFNTIQEEKNNIHTRRFHGNINKDMKVNMKTVQSLVSILSTDRAKNYEEWIELGFCLHTISDELLQTWIEFSERVDDYRETASADCSARWGKMRETGLGLGTLHMWAKADNYKAYLEIIQNDLEYFIVKTVNSALSNKDDAKDKAKKEVNISDVIFNVVLALKQKYYHYFICSSYEKKHWYEFEDIRWVEGDADVGLKRKIREDLYDDYVAVSTKYRKLSERFQNDHPNKEKYELISAEVFKVAQKLRDATFRKRLLEEASEQLYWSRDRSKQLSSSKFEEILDVNEKLIGMKNGVYDLEKQCFREARCEDYVSLSADIEYQEYFWNDEIIQDINTFISQVLTNKDVRDYVLQTFAMCLDGQIYNEHFHIYTGCHAKGSEILMHDGTIANVENVKVGDMLMGPDSKPREVHELVNGYSQMYEIIPSKGEPFVVNEDHIMVLKATTINNVVKCKNEKRFKLSWHERDIFGFPVSKCKNFPYNGRLKYKKNVIYYKTEDDARNAIEIYRNDLIMNNLNYIKNGDVIEIPLKEYIKRMKKINGAKNYFLFKEGVDFPEKDVKIDPYMLGYWLGDGTSKAFAITTMDDIVIDYFDQKTVVDENMDKKVYHKKNNKAKTIYYSSKEKKHGKNRLLNSMKEYNIYNNKHIPSVYKFNNRQTRLELLAGLIDSDGHYNVKSKHYEITLKIEKLIDDTVYLARSLGFAVTKRTVKKTCTNNGKTGMYFNVLICGNNLNEIPVLIERKIARDRLKKKDPLRFGFKVNKLENDQYYGFKLNQDHLYLAGDFFVHHNCGSNGKSKILELFELSFGQYCSKLSIAALTQKRVSSSAATPEIARLRGRRFVVLQEPGENEILNVGLMKEMTGGDKIVARSLNKDPIEFKPQFNMILTCNQRPKIPSDDQGSWRRIRVVEFTSKFTANPDPNDPNQFMIDTDLTSKLKKWGKPFFWILTQYYKEFKKNGYKEPAEVTAATNEYQKEQDAYSEFVTDCLKLDKTSYADVKEVYTVFQEYVRYNNDQKPSKKAFEKYMNTRFGKFGRHRDSKCWKGFKIDEAALNENYGISENPEDELL

SEQ ID NO: 917 - protein, 787 aa, unidentified
  REGION 1..787: note = Description of Unknown: uncultivated organism sequence
  REGION 1..787: note = Category: MG60 effectors
  REGION 1..787: note = Description: MG60-128 effector
MLYDDQPISQDEEDKLNRTPFVDEIVELIDRYTEYDEKKDNHDGLVIGLEGAWGSGKTSALNLLENRFRDKNERYVVQRLDSWLAMDCTTLAAEFFKTLGAATIESGISSEYETLLQRIVRNVCGYTLRLVTWIKLKKLPKIGPKIVAHIDKMEPSKWVRKTPAHVLKFGKNVIRSSTISLKVIKIDFGKIIKDTTIRKEKEDLRVDLSKSKKYIIYMIDDIDRLNNDEIAFVMQLVKNIADFPKVIYILAYDRNIVAEALQRIDGKNGRDFMEKIIQVPIQMPEFGKAGLLRYFCDELRTIVQSESSSQNKVRFDTSQGKIIMDKVYMSIEPYLKNFRDCKRLLNAYQIRYYICSRFCAPDDLLCIVVLETFEPGAITYLINHYNAFYSSLLPESRNVSATDIKNYRDEIKQEASCSERALKILASLFPAFATKINETTSAQLINGKALIENRISERENFLSYFILSPNENAVFSDVIKDLLLNWQEEDIAEQLKQWARGGKLQSALLKIGAYCDLYNQDIKLERDRWMPILHGISSVQNIRLYANQTYTWADVPWAVVEKIIDLPIFGGNPDHVNIDTAGWIVDIFRDENVSLETLEVLMWHIGSGYEWARPESYADSAPEVEEDLFMSCKELFVRRLKGNLSKEGFFDSVMINLFLAHLMKEDMAYLNQYLASLSTIESIYPWLKVALEEETHRKFYGLKRRAWHHKDDLLAITPKSYAALVDKELDQIPEDWLSDQKWTTLVLYDAYVHQETWTQTKGAFIKEESLEEYGNKVYHARKNKKVN

SEQ ID NO: 918 - protein, 768 aa, unidentified
  REGION 1..768: note = Description of Unknown: uncultivated organism sequence
  REGION 1..768: note = Category: MG60 effectors
  REGION 1..768: note = Description: MG60-129 effector
MFCSCKKNLCVVIYIYDATKTYDCAKKLIVYKSIIKGAEVMKIIKRNGAEETFDRQKIKDAISKANNETDGTPELTDRQIDYISLVIEDHCNEMNRALSVEEIQELVETHIILQGAPETAKRYIRYRFTRNLARASNTTDNQILSLIECNNEEVKQENSNKNPTVNSVQRDYMAGEVSKDLTKRILLPEDIVKAHEEGLIHFHDADYFAQHMHNCDLVNLEDMLQNGTVISGTMIEKPHSFSTACNIATQIIAQVASNQYGGQSISLAHLAPFVQISREKITRQVRAEMEEFGIAADDEQVKSLVEKRVRDEIKRGVQTIQYQVVTLLTTNGQAPFVTVFMYLNEAKNEQEKKDLAIIIEEVLKQRIKGTKNEVGVWVTPAFPKLIYVLEEDNITEDSRFWYLTKLAAECTAKRMVPDYISEKIMLKLKIDKNGNGNCYTCMGCRSFLTPYVDENGKPKYYGRFNQGVVTINLVDVACTAARDGSKSEEKFWQVLDERLELCHRALQCRHERLEGTLSDAAPILWQYGALARLKKGEPIDKLLHGGYSTLSLGYAGLWECVYEITGKKLTEKEGEEFGLRVMQRLNDACAEWKAAENIDYSIYGTPLESTTYKFAKCLQNRFGIIKGVTDRNYITNSYHIHVTEKIDAFSKLELESKFQKLSPGGAISYVEVPNMQQNIPAVLEVMKFIYNNIMYAELNTKSDYCQVCGYDGEIQIVEEDGKLVWRCPNCGNEDQSKMNVARRTCGYIGSQFWNQGRTQEIKERVLHL

SEQ ID NO: 919 - protein, 768 aa, unidentified
  REGION 1..768: note = Description of Unknown: uncultivated organism sequence
  REGION 1..768: note = Category: MG60 effectors
  REGION 1..768: note = Description: MG60-130 effector
MFCSCKKNLCVVIYIYDATKTYDCAKKLIVYKSIIKGAEVMKIIKRNGAEETFDRQKIKDAISKANNETDGTPELTDRQIDYISLVIEDHCNEMNRALSVEEIQELVETHIILQGAPETAKRYIRYRFTRNLARASNTTDNQILSLIECNNEEVKQENSNKNPTVNSVQRDYMAGEVSKDLTKRILLPEDIVKAHEEGLIHFHDADYFAQHMHNCDLVNLEDMLQNGTVISGTMIEKPHSFSTACNIATQIIAQVASNQYGGQSISLAHLAPFVQISREKITRQVRAEMEEFGIDADDEQVKSLVEKRVRDEIKRGVQTIQYQVVTLLTTNGQAPFVTVFMYLNEAKNEQEKKDLAIIIEEVLKQRIKGTKNEVGVWVTPAFPKLIYVLEEDNITEDSRFWYLTKLAAECTAKRMVPDYISEKIMLKLKIDKNGNGNCYTCMGCRSFLTPYVDENGKPKYYGRFNQGVVTINLVDVACTAARDGNKSEEKFWQVLDERLELCHRALQCRHERLEGTLSDAAPILWQYGALARLKKGEPIDKLLHGGYSTLSLGYAGLWECVYEITGKKLTEKEGEEFGLRVMQRLNDACAEWKAAENIDYSIYGTPLESTTYKFAKCLQNRFGIIKGVTDRNYITNSYHIHVTEKIDAFSKLELESKFQKLSPGGAISYVEVPNMQQNIPAVLEVMKFIYNNIMYAELNTKSDYCQVCGYDGEIQIVEEEGKLVWRCPNCGNEDQSKMNVARRTCGYIGSQFWNQGRTQEIKERVLHL

SEQ ID NO: 920 - protein, 987 aa, unidentified
  REGION 1..987: note = Description of Unknown: uncultivated organism sequence
  REGION 1..987: note = Category: MG60 effectors
  REGION 1..987: note = Description: MG60-131 effector
MKKIIMACFLSVLCFQGFALTGFDADYNAALKRAKDNSKPIFILFTGSDWCSWCVKFEKEVLSKSEFLDYATNTWELVVADFPQKKKIAPELKKQYQALQKKYAVRGFPTVMLIDAKGKELCSAGYSKGGAKVWLEKFLNKLKITPLVEQYLAPIEKKVRVISEESRDEITAKVKSLEPTDYKKWLQEYKSIANKYLPKVKAISDELAKLNVPDEILEKKEELSEEVNFMMMSLESAAKMDVEKEAKRIEELRKESESTKKVERKINRVTVPKAGEGKVDSEYFAKVAMPFYKKHIVDTFVPTKKMDKKTADDVRKVRWALARYLSTGRLEFPTGEECALAEKLWRKKFRDPAVAMLFYHSLFSDAQYWRGRRIFSDAIKIHNFKREPIFGFILKSYLCKAEKHRLKVRKSDPVKPYQDACAELEKYTTDKIVDVFKKADYRILERLEELIIIPPSLSKKVGNEYLSRCMIAERAMNAAFEARGSGWASDVTEEGWKGFQDNNEIAASNLLAAVKMRPEGARAPMMLARLSGSSCVVSEADTYSWCSLAVSNSLDECAEQIQHFVHFRTSRWGGSTAFLRDFLMQCATNVDVRSTFSYAAAAAAFRKILVAEADNSVQSNALERFITPDMRTALYGMFDAYAAAPETEFMPSADMFRGMGMSLALQFRDWPKVRKYYKMIKKPLKHHVDSTWLIRTYAPAINNTHVSYLFRVLGQSKYAEQFLEAEEAVAAKDYEKAYKLYSNLQNIEKPSDGEKYIAAEGYYTMRRVIEEKKGGWVNLMPSKTGGEAIHFWGMTFLDGDGKARCHDNTRSYYRVKKPIPGIGSEFEGTIHFEKDDKNRKVWNIGWGLARVYSGFCADNNSWAYPYIAFTRDEKGDHYAIDTFTNENSNRENFKDEDKWVQLGRAPYLMVAQGDLEKSDSHSFKLLTTEDKIEIFIDRKLVYSSMLDDIINVSYMRDRIQPNGDVLPVWKVFTGSSFSDYRYRRLVK

SEQ ID NO: 921 - protein, 768 aa, unidentified
  REGION 1..768: note = Description of Unknown: uncultivated organism sequence
  REGION 1..768: note = Category: MG60 effectors
  REGION 1..768: note = Description: MG60-132 effector
MFCYCKKKLCVVIYIYNATKTYDCAKKLIVYKSIIKGAEVMKIIKRNGAEETFDRQKIKDAIAKANNETDGTPELTDRQIDYISLVIEDHCNEMNRALSVEEIQELVETHIILQGAPETAKRYIRYRFTRNLARASNTTDNQILSLIECNNEEVKQENSNKNPTVNSVQRDYMAGEVSKDLTKRILLPEDIVKAHEEGLIHFHDADYFAQHMHNCDLVNLEDMLQNGTVISGTMIEKPHSFSTACNIATQIIAQVASNQYGGQSISLAHLAPFVQISREKITRQVRAEMEEFGIDADDEQVKSLVEKRVRDEIKRGVQTIQYQVVTLLTTNGQAPFVTVFMYLNEAKNEQEKKDLAIIIEEVLKQRIKGTKNEVGVWVTPAFPKLIYVLEEDNITEDSRFWYLTKLAAECTAKRMVPDYISEKIMLKLKIDKNGNGNCYTCMGCRSFLTPYVDENGKPKYYGRFNQGVVTINLVDVACTAARDGSKSEEKFWQVLDERLELCHRALQCRHERLEGTLSDAAPILWQYGALARLKKGEPIDKLLHGGYSTLSLGYAGLWECVYEITGKKLTEKEGEEFGLRVMQRLNDACAEWKAAENIDYSIYGTPLESTTYKFAKCLQNRFGIIKGVTDRNYITNSYHIHVTEKIDAFSKLELESKFQKLSPGGAISYVEVPNMQQNIPAVLEVMKFIYNNIMYAELNTKSDYCQVCGYDGEIQIVEEDGKLVWRCPNCGNEDQSKMNVARRTCGYIGSQFWNQGRTQEIKERVLHL

SEQ ID NO: 922 - protein, 1292 aa, unidentified
  REGION 1..1292: note = Description of Unknown: uncultivated organism sequence
  REGION 1..1292: note = Category: MG60 effectors
  REGION 1..1292: note = Description: MG60-133 effector
MKLRKVYACILTLCMLVSMLPAFAADTDASCTHKWTEKVIKEANCTQTGLVKKTCELCGDFEYEKTPFKHGEGKEVVKDATCTKPETVGLYCEKCGELIGKVQEVGKALGHDLGKGTEKKADCAGPDRVEYTRKRCGETVVEAIEGGEAAKEHDWEAKIVPATCKTKGYEARVCKACGKVEKDKELPIDENAHVPKLGKVIREATCTTNGLGRSVCELCGKELGYITIKAGHKYGDPICDEGKQVTCGKAGYGYYVCTVCGEETEKAEIPATGKHTFVDETDIPATCTEPEKIGRICKVCGAADGKVEEIGEALGHDWDDGVYTKADCLKAEREVFTCKRCGKTRDEFIPNGEAAKGHKFVDKIVAPTCKTKGYTERTCERCDLYEKINETEIDKDAHVAKLDKTIREATCTVNGLGRYTCELCGEYLGYRAIEAKHVYGAPIFDEGKEATCGKDGYGYYVCAVCGEETEKDVIPATGKHEFVDETVIPATCTEPEKVGRICKVCGKADGKVQEIDKPLGHDWDDGELKDADCEKAERVVYTCERCGEVKEEIIPNGEAAKGHKFVDKIVAPTCKTKGYTERTCERCDLYEKINETEIDKDAHVAKLDKTIREATCTVNGLGRYTCELCGEYLGYRAIEAKHVYGAPIFDEGKEATCGKDGYGYYVCAVCGEETEKDVIPATGKHEFVDETVIPATCTEPEKVGRICKVCGKADGKVQEIDKPLGHDWDDGELKDADCEKAERVVYTCERCGEVKEEIIPNGEAAKGHKFVDKIVAPTCKTKGYTERTCERCDLYEKINETEIDKDAHVAKLDKTIREATCTVNGLGRYTCELCGEYLGYRAIEAKHVYGAPIFDEGKEATCGKDGYGYYVCTVCGEKSEKTEIPATGKHQFVDEFVIDATCEEPMKVGRICKVCGKVDGEVKTVGEKLGHDWDDGELKDADCEKAERVVYTCKRCGETKEDVIGTEVLGHKYKEKVVEPTCKTKGYKAYVCSVCGDAEVIEELEPVAGNHVAKLDKVIREATCSANGLGRYVCAECGDYIGYRAIVAEHKWGEEYANANATAIMHECQVCGKVEIIWQDPDFKECEEGKHEIVNDPARAATCTVNGLTAGKHCVVCGKILAQQTVIPALGHTEVVDEGKEATCTEAGLTEGKHCSVCSEVLVKQEEIPALGHTEVVDEGKAATCTEAGLTEGKHCSVCSEILVKQEEIPATGHVEEILPAVAPTDTEPGLTEGKKCSVCGKILVEQEVIPAHGHEHSYVLKGYDFNADFTKKVATYECTICGDTYTEEMDF

SEQ ID NO: 923 - protein, 768 aa, unidentified
  REGION 1..768: note = Description of Unknown: uncultivated organism sequence
  REGION 1..768: note = Category: MG60 effectors
  REGION 1..768: note = Description: MG60-134 effector
MFCSCKKNLRVVIYIYNATKTYDCAKKLIVYKSIIKGAEVMKIIKRNGAEETFDRQKIKDAIAKANNETDGTPELTDRQIDYISLVIEDHCNEMNRALSVEEIQELVETHIILQGAPETAKRYIRYRFTRNLARASNTTDNQILSLIECNNEEVKQENSNKNPTVNSVQRDYMAGEVSKDLTKRILLPEDIVKAHEEGLIHFHDADYFAQHMHNCDLVNLEDMLQNGTVISGTMIEKPHSFSTACNIATQIIAQVASNQYGGQSISLAHLAPFVQISREKITRQVRAEMEEFGIDADDEQVKSLVEKRVRDEIKRGVQTIQYQVVTLLTTNGQAPFVTVFMYLNEAKNEQEKKDLAIIIEEVLKQRIKGTKNEVGVWVTPAFPKLIYVLEEDNITEDSRFWYLTKLAAECTAKRMVPDYISEKIMLKLKVDKNGNGNCYTCMGCRSFLTPYVDENGKPKYYGRFNQGVVTINLVDVACTAARDGSKSEEKFWQVLDERLELCHRALQCRHERLEGTLSDAAPILWQYGALARLKKGEPIDKLLHGGYSTLSLGYAGLWECVYEITGKKLTEKEGEEFGLRVMQRLNDACAEWKAAENIDYSIYGTPLESTTYKFAKCLQNRFGIIKGVTDRNYITNSYHIHVTEKIDAFSKLELESKFQKLSPGGAISYVEVPNMQQNIPAVLEVMKFIYNNIMYAELNTKSDYCQVCGYDGEIQIVEEDGKLVWRCPNCGNEDQSKMNVARRTCGYIGSQFWNQGRTQEIKERVLHL

SEQ ID NO: 924 - protein, 794 aa, unidentified
  REGION 1..794: note = Description of Unknown: uncultivated organism sequence
  REGION 1..794: note = Category: MG60 effectors
  REGION 1..794: note = Description: MG60-135 effector
MNIFIFYFFFSLHFLRSKFFLYKLPLSKGGVQKGLDFDLVFLSKIDILEVQLIKIVECSTIFWIDKGECIMKVIKRSGEEVIFDVHKIENAIRKANKATSHSQMSEATILKISKQVEAQCEAMKRSPSVEEIQDMVETAIMKEQYYSVAHNYITYRYERALVRKANSTDQQILSLLERNNEEVKQENSNKNPLVNSVQRDYMAGEVSKDITKRFLLPQDIIEAHEQGLIHFHDSDYFAQHMHNCCLVNLEDMLQNGTVISETMIEKPHSFSTACNIATQIIAQVASSQYGGQSITLSHLAPFVQISREKARKEVKDEFEAMNMDVSEEKINQIAEMRVLREIEKGVQMIQYQVITLMTTNGQAPFVTVFMYLDEVEEGQTRDDLALIIEEVLKQRMQGVKNEKGVWITPAFPKLIYVLEEDNIHKTSKYYYLTELAAKCTAKRMVPDYISEKMMKQLKVDQNGDGQCYPCMGCRSFLTPYVDENGKPKYYGRFNQGVVTINLVDVACSSKGDEKRFWKIMDERLDLCYRALMCRHNRLKGTPSDVAPILWQNGALARLEKGETIDKLLYGGYSTISLGYAGLCECVQYMTGVPHTEEPGTSFGLKVMQYLNDACAKWKKENNMDFSLYGTPMESTTYKFAKKLQDRFGIIPKVTDKNYITNSYHVHVTEEINAFDKLTFEAQFQKLSPGGAISYVEVPNMENNIPAVLAVIEHIYDHIMYAELNTKSDYCQICGYTGEIQIVEDENHKLVWECPNCGNRDQEKMNVARRTCGYIGTQFWNQGRTQEIKERVLHL

SEQ ID NO: 925 - protein, 763 aa, unidentified
  REGION 1..763: note = Description of Unknown: uncultivated organism sequence
  REGION 1..763: note = Category: MG60 effectors
  REGION 1..763: note = Description: MG60-136 effector
MMRVVKRDGKIVDFDESRIKIAIGKANNEVDESQRATEEEIEKIVEYVKKVKKDRILVEDIQDIIENKLMEYKRFELAKAYITYRYSRALVRKANTTDQTVKELVEGNSEYWNNENSNKNARVVTTQRDYLAGITSTDITRRLLLPPEIVKAHDEGIIHFHDADYFAQNALTNCCLINLNDMLQNGTVINGVMIEKPHRFVTACTIATQIILGVSSSQYGGCTVTLTHLAPFVRDSYNRALKKYQDRNLPEEECKKFAMQDTKKEIADGVQTFNYQVNSMTNTNGQAPFLSVNMYLGETDEYKDELAMIIEEFLRQRMLGFKNEKGVYITPAFPKLLYVLEEDNIHKDSKYWYLTELAAKCTAKRMVPDYISEKMMKKLKINQYGEGDCYPCMGCRSFLTPDRVKGNVAKAKDYVEGKGKYYGRFNQGVVTINLPDVALSSKKDEKEFWKIFDERLELCHEALQLRHKRLSGITSDVAPLLWQYGAYARLDKGEKLDKLLHGGYSTLSLGYAGLYECVKYMTGDSHTDGGKGEKFALEVMQHMNDKCAEWKKAEDIDYSLYGTPIESTTYKFAKCLKKRFGTVEGVTDRNYITNSYHVPVFEEIDAFSKLKLESEFQRLSPGGAISYVETPNLQNNIEVVEQIIEFIYNNIMYAELNTKSDYCQKCGYTGEILIDDNLEWYCPNCGNRDHRTLNVARRTCGYIGTNFWNKGRTQEIKERVLHIDNKDFDAEKCTKCDENVEKHEKKTRAKVSAKEKAMASVHA

SEQ ID NO: 926 - protein, 1231 aa, unidentified
  REGION 1..1231: note = Description of Unknown: uncultivated organism sequence
  REGION 1..1231: note = Category: MG60 effectors
  REGION 1..1231: note = Description: MG60-137 effector
MSLKIEDLETFKRHRYAVSESLSTDIVGRDREIEEISSKIDSVYCLTITGPAGVGKSRLAVAAIEHYCANHTDFEVLCTKSFSDYISALDEAIEEGRKYVIFIDDANTYPSLIELLEFLKYRNQEGNIKAILTVRDYLKGCLDSDIYMEFYEVKPLNDKSIEDALVKNTTIRNEDWLKQIAKIANGNIRVAFLAANEAIKNNKSLDSIYNQKDVLNRFYKDEISKIDHSESLLITAGIIAFFKSIYLEQLFYIVPILKSVNLSKKSFIENVNILIKMEIVDNYHDVVKIADQCFADFLLNYTIVEKRYLKIKDLLLVGFKYYKERIVESIHTILHVYNTEEFVDHLRKEVTDACNNLEDDVSLKHGIESCFAQVIPEYVSREYIEGVEKYSDQKDIKWLINVFSGLAFSNYNEIANKGVLKLLKKTKNKTKEVYDAIKNTYEMRAERANERFQYQIALIKELQNGGLYNDEFNALVSSYLNFRFSYSCFTSKREMMHYTFSVDDNTAGILELRSACWGYLFNCELSKAIDSIMDFANRHYIERNLEIIKNDLRCINTYLCEHDQSGFLNSVLYVKFIDEAKEYCFTDLLTANKKYLDFLDIVFERKLLGKNYEGYEARYKNRVTDYYNLHKDDIYDILNETDLFLNKYYKYQKTRLVNALVEVVDKFSNALFFLCTKNGIFPHLVIEEFLKNRNLDEVYALINQIDDETIKDEYLYNFYSYLSKENIEKDYGFIGWINSKGDFKTNRTYHRDAVSLNNIAEKCGLDYVALLKKLYSKEKYNKFIAKAYLSYLIDNVETFKELLSLNQNLAIKIYEFLIANGEKDYESSVLIEILDVKRSYIKVFAKAFIKEEYYNDCNLDFIFEKEYCDSFFNECMKVMLSQKTNSASSKLRILISKNINQPNMERWIEKYIESNYKEDNVIELFFQALSEIDHQHKNAYLVLYYQKGHDINVLRQAILNKSHSYSNAKEHFGNEIKWLETLKKSLLNWNNTEEVKFIDTVIDDYKVQIKNDEIESLVDYGNQNILNELRERDLKMEVSLKDAFELYQSDEKFRDMLSSGYLSYKDGSFVNGKNDPVEFIEKLKDKKIISVEIKPVDEVGRLDYEQYLSSMKSIAKEFDNPKLASLNDYLNALIDERGWKAQEFKENTFLSRDIFSKIRNNKKNKMDKKTLVQILIGLQVSKRERDYLLELNQTSLSKYVKEDVLYSFILDAKLDIGVADELLRDIGEDGF

SEQ ID NO: 927 - protein, 768 aa, unidentified
  REGION 1..768: note = Description of Unknown: uncultivated organism sequence
  REGION 1..768: note = Category: MG60 effectors
  REGION 1..768: note = Description: MG60-140 effector
MFCSCKKNLRVVIYIYNATKTYDCAKKLIVYKSIIKGAEVMKIIKRNGAEETFDRQKIKDAISKANNETDGTPELTDRQIDYISLVIEDHCNEMNRALSVEEIQELVETHIILQGAPETAKRYIRYRFTRNLARASNTTDNQILSLIECNNEEVKQENSNKNPTVNSVQRDYMAGEVSKDLTKRILLPEDIVKAHEEGLIHFHDADYFAQHMHNCDLVNLEDMLQNGTVISGTMIEKPHSFSTACNIATQIIAQVASNQYGGQSISLAHLAPFVQISREKITRQVRAEMEEFGIAADDEQVKSLVEKRVRDEIKRGVQTIQYQVVTLLTTNGQAPFVTVFMYLNEAKNEQEKKDLAIIIEEVLKQRIKGTKNEVGVWVTPAFPKLIYVLEEDNITEDSRFWYLTKLAAECTAKRMVPDYISEKIMLKLKIDKNGNGNCYTCMGCRSFLTPYVDENGKPKYYGRFNQGVVTINLVDVACTAARDGNKSEEKFWQVLDERLELCHRALQCRHERLEGTLSDAAPILWQYGALARLKKGEPIDKLLHGGYSTLSLGYAGLWECVYEITGKKLTEKEGEEFGLRVMQRLNDACAEWKAAENIDYSIYGTPLESTTYKFAKCLQNRFGIIKGVTDRNYITNSYHIHVTEKIDAFSKLELESKFQKLSPGGAISYVEVPNMQQNIPAVLEVMKFIYNNIMYAELNTKSDYCQVCGYDGEIQIVEEDGKLVWRCPNCGNEDQSKMNVARRTCGYIGSQFWNQGRTQEIKERVLHL

SEQ ID NO: 928 - protein, 818 aa, unidentified
  REGION 1..818: note = Description of Unknown: uncultivated organism sequence
  REGION 1..818: note = Category: MG60 effectors
  REGION 1..818: note = Description: MG60-141 effector
MKDYEITDKEGYAKQGLENYVKDWKIFIDTCSILHPAAEKFWVHVIPYLDEYKNKIIIPFRSVEELEKHAKNTERPKLAEDAKNSLKKVKQLVAAGYVEIRGEKTDNFADNVFQVVFTKFRLNHKMLLITQDNGLARDIYALNGSKSVKAYPVHVKQINQYGYLSNFQWGDENGHAEKNELRRSTGAAASKPSTAPKSAPKSVTVTETEADIDDDDAFEVCTAVTKISDAPLGVSHVPKENETVYAGSAPVKLMRALAAGGEGVIYQTNTPYVAKIYKKEKLTKRRYEKIKRMLSHSFSCEGICYPIAALYNSKKEFVGYLMPKAKGKELQKSIFIKPLFLKNFPNWKKRDTVELCITILKKIQYLHDKNIIMGDINPSNILVVSPKEVYFVDTDSYQIEDFPCPVGTVNYTAPEIQRKHFANFLRTEGNENFAVATLLFMIMLPGKPPYSQQGGEDPIDNIIKMDFSYPFGDNTNRKTPDGPWRYIWSHLTYDLKKAFYNTFRGDGEHASESTRLSADEWLPIFTYYLELLDSGKFGKQDPMSEELFPTRHKKNPKAEYVTCKLCGNEVEEHQCQNGICRPCLNRGEVYRCARCGREIMYTNYQKYIKNAKKHDVCPECFRYRREIRMRPTCIDCGTQFAISNSEYEFLKSKGFEVPKRCKACRERKKNQSQTPIPLPFHRPTMTRVPTVPSRPTPTPTPKPKPKGGTFCFITTAVCEYYGKDDRCAELNALRNFRDTWLTHQPDGPALIAEYYRSAPLLVSKMKQSEHFGAYCQTLWEDYLKPCLAYIRENAYEACKQRYIDMVHYMESEFKTKTI

SEQ ID NO: 929 - protein, 832 aa, unidentified
  REGION 1..832: note = Description of Unknown: uncultivated organism sequence
  REGION 1..832: note = Category: MG60 effectors
  REGION 1..832: note = Description: MG60-142 effector
MSLSFFATCPKGLENLLLRELVTLGACEVKETVAGVSFKGDFTLGMRVCLWTRLASRVLLEISEFYAGTDTDLYLGALAVDYEKYFEVSNTIAVSFKGTSEAIRNTQYGALKIKDAVCDYFLKRNGIRPNVDKDNPDILITCHLDRKDNAHLLFDLSGNALHMRDFNRHTGMAPLKENLACAMLLRSGYNGSNLVDPMCGSGTLLLEAAAMATDTAPGICRDHYGFLQLKLCDRSAYTSLVEEMHKRSREGMLKFKQSGYKLFGFDADERIIDIALENAKKSGFADIIRFQVQSVETLVNPFDDLNDETQNKNAPSLFVITNPPYGQRMGNFNELISLYTKLGAVFKEQFRGAVCAVISSSEDLLSCLRLHADKIYKLYNGELLCQLRIFSIRQGEEGSESLSKDNLATDFANRLRKNLLKMNKWAKTLGLEAYRVYDADVPEYAAAIDYYKGYYVISTYKAQNKVSEKIEKRHELDMLGATIEVTGVSGSKVILKSREVKKGNSQYERLREDNSALIEIREGPFAFKVNLYDYLDTGLFLDGRLIRQYLYEHASNCSVLNLFAYTCSASVAAALGGASLITSVDMSKTYLEWGYENLLLNQIEAHSHEFIQADVLAFVSKDPEHKYDLIYVDPPTFSNSKRMQNTFDVRRDHLQLLGNLTRFLRDGGEVVFCTNLRSFRIDERLDEFGYSVTDLSSKTLPFDFKRNEHIHHCYSLIYHEKERRCEPVAFVSSNVNPKWSKVLHGIKKTNEQEIIPKNKSVNGRPSRASTTVRFNASGMTEIHTDGNRDTSAFRHNNKRNFKSSKLRPAALRPKSSAKPRVFGPEGVKEGVQ

SEQ ID NO: 930 - protein, 1179 aa, unidentified
  REGION 1..1179: note = Description of Unknown: uncultivated organism sequence
  REGION 1..1179: note = Category: MG60 effectors
  REGION 1..1179: note = Description: MG60-143 effector
MINLESFKNLYEVRKTVRFSLLKQNYDDVFKCEENVLKDISFLNTLVWYEWQIIKIQKKEDWKLLQDLLSKDIFEDVIKNAFQILKNQICTVIYNKVVFDTKKSEQKQRYKIYLKTATWKELSAFIPTDYDKNSDYIPEENFYKVKDSEIWYAIKIVSKLIIDNDFIKKDTELHNRLSQINRYNPNFWNFFELNTLNPFTVNRWKISEIINSYEISLNQYKETLVNLNKEAYTIANAILSDRYFENCRNQKESDGTVRYLFHIFSNCKNSSEKNVWQINHLILLVNKYESLKNGKKKYTNDEIELKIKRLNKELRQLAKVRSELLWYQIHLIDNFQTEKFSFLIQSWKYYFVWMKKMWWENNLSQFQEFIDGLESGDDKLLYLDSMTWGGFKRLFLSKQSDVVFTDGIRIKDLNRTILAKEEEILQLKKWIIEKIEKDINIYISKVTNDIFNEINSKEKIKFIEYLSQKWKKVDNLFKLWKKNRKQLIYGKELKEFGNSLYNFDSIKEQFNLDKLEKEYSDLVQKLLIKIKDKKYEIWKNNFKSLSFLWDNFKDRKFENLDDLKNYFNDSWYKVIVKNVNLEKILKQVKAWELEIFQIKSKDMPFHQDFINDKNCWIIEGVKTEKGGSFKKDLNTLYFEQFFQDIAEWNKNTRIGADFKIRWINSSENNDYKSFWKKEKNQLRHSNNKENIEKFKNRFKRDRYSIEFSINLNATNHLTEEDFNTKISNKLKEKRETWSLRILSLDHGESSFLTYKIYQVEGNKYSIINQWWNFDNFKEVQDWEDKTTKRQENMQIDEEKVLYKDQKILDSYITKYHAMIQDQKRERQVEEAIKHFARKSISKIKEIISADTIDKNKEWVSDTTKANVKKFIQRSIDKTWNKEKDSIVSVLGKFYFDYNKYSFKKYFPDQENIKEKIDTYLKEIQELLDDESKLIAFCNEVKKSFDWVSLADIDKLYNTPFYSYKTNFSLQLEQINNLKKWYVSALIGTISKWVRNWDVDVIALENNLLYYGVDNSKSFQKHMWAENHATFAEALINKLSFCLDKETSESYQFCYPIKVKDRKKLKDKNNGILFFVDQDTTSLICPQCEGKLKRDKADWEDYLYHNDENLAWDGCEEDPFEIKKSEGKKWEYNWIIFENWDDLATYNIGRKGVLMLEKIKENPEETDLLIRDNDWDGLVK

SEQ ID NO: 931 - protein, 750 aa, unidentified
  REGION 1..750: note = Description of Unknown: uncultivated organism sequence
  REGION 1..750: note = Category: MG60 effectors
  REGION 1..750: note = Description: MG60-144 effector
MIGILRLNLPLNWKREAIAVPEEAKTHVHVIKRNGEEVTFDLSKIENAIKAANNEVDKLHQLNEYQVHAIADNLEKQIESMSHAVHVEDIQDMVETGIMEMRGYEVAQKYVRYRYKRELARKSNTTDNGILALIDHMNEEVNQENSNKNPVINSTQRDYMAGEVSKDLTKRMLLPEDIVEAHEAGIIHFHDSDYYAQKEHNCDLINLEDMLQNGTVISETMIEKPHSFFTACNVTTQIVAQVASNQYGGQTFTLSHLAPFVDVSRKKLRAQVIEERKDCGESLDDAIIDKITEKRLLNEVKSGIQTIQYQLITLMTCNGQAPFVTMFMYLDEVPEGQTRDDLALIIEEVLNQRIKGVKNEKGIWITPAFPKLIYVLDEDNITTDSKYWYLTELAAKCTAKRMVPDYISAKVMREMKDGDVYPCMGCRSFPTKEDGIRNPDGSRKYYGRFNQGVVTINLVDVACSSYGDMDKFWKILDERLELCHKALRCRHERLLGTISDVAPILWQHGALARLKKGEKIDKLLFGGYSTISLGYAGLCEMCVRMIGKTHTSEEGKKFALAVMQKLNDKCAEWKAAENISYSVYGTPMESTTYKFAKNLQKRFGIIPGVTDKNYITNSYHVHVTEHIDAFSKLKFESEFQKLSPGGAISYVEVPNLQNNIDAVLEVMKFIYDNILYAELNTKSDYCEKCGYDGEIKIVTDDYGKLVWECPNCGNRDQNTLFVARRTCGYIGTQFWNQGRTQEIKDRVLHL

SEQ ID NO: 932 - protein, 750 aa, unidentified
  REGION 1..750: note = Description of Unknown: uncultivated organism sequence
  REGION 1..750: note = Category: MG60 effectors
  REGION 1..750: note = Description: MG60-145 effector
MIGILRLNLPLNWKREAIAVPEEAKTHVHVIKRNGEEVTFDLSKIENAIKAANNEVDKLHQLNEYQVHAIADNLEKQIESMSHAVHVEDIQDMVETGIMEMRGYEVAQKYVRYRYKRELARKSNTTDNGILALIDHMNEEVNQENSNKNPVINSTQRDYMAGEVSKDLTKRMLLPEDIVEAHEAGIIHFHDSDYYAQKEHNCDLINLEDMLQNGTVISETMIEKPHSFFTACNVTTQIVAQVASNQYGGQTFTLSHLAPFVDVSRKKLRAQVIEERKDCGESLDDAIIDKITEKRLLTEVKSGIQTIQYQLITLMTCNGQAPFVTMFMYLDEVPEGQTRDDLALIIEEVLNQRIKGVKNEKGIWITPAFPKLIYVLDEDNITTDSKYWYLTELAAKCTAKRMVPDYISAKVMREMKDGDVYPCMGCRSFPTKEDGIRNPDGSRKYYGRFNQGVVTINLVDVACSSYGDTDKFWKILDERLELCHKALRCRHERLLGTISDVAPILWQHGALARLKKGEKIDKLLFGGYSTISLGYAGLCEMCVRMIGKTHTSEEGKKFALAVMQKLNDKCAEWKAAENISYSVYGTPMESTTYKFAKNLQKRFGIIPGVTDKNYITNSYHVHVTEHIDAFSKLKFESEFQKLSPGGAISYVEVPNLQNNIDAVLEVMKFIYDNILYAELNTKSDYCEKCGYDGEIKIVTDDYGKLVWECPNCGNRDQNTLFVARRTCGYIGTQFWNQGRTQEIKDRVLHL

SEQ ID NO: 933 - protein, 768 aa, unidentified
  REGION 1..768: note = Description of Unknown: uncultivated organism sequence
  REGION 1..768: note = Category: MG60 effectors
  REGION 1..768: note = Description: MG60-146 effector
MFCSCKKKLCVVIYIYNATKTYDCAKKLIVYKSIIKGAEVMKIIKRNGAEETFDRQKIKDAIAKANNETDGTPELTDRQIDYISLVIEDHCNEMNRALSVEEIQELVETHIILQGAPETAKRYIRYRFTRNLARASNTTDNQILSLIECNNEEVKQENSNKNPTVNSVQRDYMAGEVSKDLTKRILLPEDIVKAHEEGLIHFHDADYFAQHMHNCDLVNLEDMLQNGTVISGTMIEKPHSFSTACNIATQIIAQVASNQYGGQSISLAHLAPFVQISREKITRQVRAEMEEFGIAADDEQVKSLVEKRVRDEIKRGVQTIQYQVVTLLTTNGQAPFVTVFMYLNEAKNEQEKKDLAIIIEEVLKQRIKGTKNEVGVWVTPAFPKLIYVLEEDNITEDSRFWYLTKLAAECTAKRMVPDYISEKIMLKLKIDKNGNGNCYTCMGCRSFLTPYVDENGKPKYYGRFNQGVVTINLVDVACTAARDGNKSEEKFWQVLDERLELCHRALQCRHERLEGTLSDAAPILWQYGALARLKKGEPIDKLLHGGYSTLSLGYAGLWECVYEITGKKLTEKEGEEFGLRVMQRLNDACAEWKAAENIDYSIYGTPLESTTYKFAKCLQNRFGIIKGVTDRNYITNSYHIHVTEKIDAFSKLELESKFQKLSPGGAISYVEVPNMQQNIPAVLEVMKFIYNNIMYAELNTKSDYCQVCGYDGEIQIVEEDGKLVWRCPNCGNEDQSKMNVARRTCGYIGSQFWNQGRTQEIKERVLHL

SEQ ID NO: 934 - protein, 768 aa, unidentified
  REGION 1..768: note = Description of Unknown: uncultivated organism sequence
  REGION 1..768: note = Category: MG60 effectors
  REGION 1..768: note = Description: MG60-147 effector
MFCYCKKKLCVVIYIYNATKTYDCAKKLIVYKSIIKGAEVMKIIKRNGAEETFDRQKIKDAIAKANNETDGTPELTDRQIDYISLVIEDHCNEMNRALSVEEIQELVETHIILQGAPETAKRYIRYRFTRNLARASNTTDNQILSLIECNNEEVKQENSNKNPTVNSVQRDYMAGEVSKDLTKRILLPEDIVKAHEEGLIHFHDADYFAQHMHNCDLVNLEDMLQNGTVISGTMIEKPHSFSTACNIATQIIAQVASNQYGGQSISLAHLAPFVQISREKITRQVRAEMEEFGIDADDEQVKSLVEKRVRDEIKRGVQTIQYQVVTLLTTNGQAPFVTVFMYLNEAKNEQEKKDLAIIIEEVLKQRIKGTKNEVGVWVTPAFPKLIYVLEEDNITEDSRFWYLTKLAAECTAKRMVPDYISEKIMLKLKIDKNGNGNCYTCMGCRSFLTPYVDENGKPKYYGRFNQGVVTINLVDVACTAARDGSKSEEKFWQVLDERLELCHRALQCRHERLEGTLSDAAPILWQYGALARLKKGEPIDKLLHGGYSTLSLGYAGLWECVYEITGKKLTEKEGEEFGLRVMQRLNDACAEWKAAENIDYSIYGTPLESTTYKFAKCLQNRFGIIKGVTDRNYITNSYHIHVTEKIDAFSKLELESKFQKLSPGGAISYVEVPNMQQNIPAVLEVMKFIYNNIMYAELNTKSDYCQVCGYDGEIQIVEEDGKLVWRCPNCGNEDQSKMNVARRTCGYIGTQFWNQGRTQEIKERVLHL

SEQ ID NO: 935 - protein, 816 aa, unidentified
  REGION 1..816: note = Description of Unknown: uncultivated organism sequence
  REGION 1..816: note = Category: MG60 effectors
  REGION 1..816: note = Description: MG60-148 effector
MQTNKQLNLAFDFVQYTGQNIFLTGKAGTGKTTFLKSLKEKSPKRMIVVAPTGVAAINAGGVTIHSFFQLSFAPQIGLENVQEKQNRFNKEKINIIRSLDLLVIDEISMVRADILDAIDRVLRRFRNRNRPFGGVQVLMIGDLQQLAPVVKNDEWNLLKREYETVYFFSSKALRETSYVSIELTHVFRQQDDKFIAILNKVRNNQLDQNALEALNNRFIPNFEPDDSEGFITLCTHNLHAHRINEAKLIQLKTNKQLFTAEVEGKFPEYSYPTEFKLEVKVGAQVMFVKNDPEPEKLFYNGKIGQVTRINQDIIYVICPDEEEEIAVTQLLWENVKYTIDKNSAEISESVEGSFYQYPLKLAWAITIHKSQGLTFERAIIDAEASFAHGQVYVALSRCKTLEGMVLSSQISNRSIINDGTVSGFIQNVEENQPGDKELNDSKLAYQKDLLIDVFRFENVKMQVNIISKLLRENSSAIPEVVTEHIRKIKSAVYSDLVDVSEKFRNQITQLLSVQPDIEQNQKLLERVSKAADYFSEKVKAILIDDFAKADLDVDNRTLRKQLKNSSGRLTEETELKLASFEICRTGFNVKQLLDTRAKTLIENNKPAPKKQKAKEIINLESIPHPELYNTLREWRLEKASELEKPAFFVFSQKTLIEMVNYLPVETATLKLINGFGSRKIEQFGADIIQIIQNYCDENNVQRMEIPLKEVKEKKPKIDTKKASFELYQSGKTVAEVAKERALTTSTIENHLAHYVKLGELDISKLISKEKLKIITDYFEKAESKSFGDAKAALGDNVSYGELRMGLSYLESLNEKK

SEQ ID NO: 936 - protein, 768 aa, unidentified
  REGION 1..768: note = Description of Unknown: uncultivated organism sequence
  REGION 1..768: note = Category: MG60 effectors
  REGION 1..768: note = Description: MG60-149 effector
MFCSCKKNLCVVIYIYDATKTYDCAKKLIVYKSIIKGAEVMKIIKRNGAEETFDRQKIKDAIAKANNETDGTPELTDRQIDYISLVIEDHCNEMNRALSVEEIQELVETHIILQGAPETAKRYIRYRFTRNLARASNTTDNQILSLIECNNEEVKQENSNKNPTVNSVQRDYMAGEVSKDLTKRILLPEDIVKAHEEGLIHFHDADYFAQHMHNCDLVNLEDMLQNGTVISGTMIEKPHSFSTACNIATQIIAQVASNQYGGQSISLAHLAPFVQISREKITRQVRAEMEEFGIDADDEQVKSLVEKRVRDEIKRGVQTIQYQVVTLLTTNGQAPFVTVFMYLNEAKNEQEKKDLAIIIEEVLKQRIKGTKNEVGVWVTPAFPKLIYVLEEDNITEDSRFWYLTKLAAECTAKRMVPDYISEKIMLELKIDKNGNGNCYTCMGCRSFLTPYVDENGKPKYYGRFNQGVVTINLVDVACTAARDGNKSEEKFWQVLDERLELCHRALQCRHERLEGTLSDAAPILWQYGALARLKKGEPIDKLLHGGYSTLSLGYAGLWECVYEITGKKLTEKEGEEFGLRVMQRLNDACAEWKAAENIDYSIYGTPLESTTYKFAKCLQNRFGIIKGVTDRNYITNSYHIHVTEKIDAFSKLELESKFQKLSPGGAISYVEVPNMQQNIPAVLEVMKFIYNNIMYAELNTKSDYCQVCGYDGEIQIVEEDGKLVWRCPNCGNEDQSKMNVARRTCGYIGSQFWNQGRTQEIKERVLHL

SEQ ID NO: 937 - protein, 768 aa, unidentified
  REGION 1..768: note = Description of Unknown: uncultivated organism sequence
  REGION 1..768: note = Category: MG60 effectors
  REGION 1..768: note = Description: MG60-150 effector
MFCSCKKNLRVVIYIYDATKTYDCAKKLIVYKSIIKGAEVMKIIKRNGAEETFDRQKIKDAIAKANNETDGTPELTDRQIDYISLVIEDHCNEMNRALSVEEIQELVETHIILQGAPETAKRYIRYRFTRNLARASNTTDNQILSLIECNNEEVKQENSNKNPTVNSVQRDYMAGEVSKDLTKRILLPEDIVKAHEEGLIHFHDADYFAQHMHNCDLVNLEDMLQNGTVISGTMIEKPHSFSTACNIATQIIAQVASNQYGGQSISLAHLAPFVQISREKITRQVRAEMEEFGIAADDEQVKSLVEKRVRDEIKRGVQTIQYQVVTLLTTNGQAPFVTVFMYLNEAKNEQEKKDLAIIIEEVLKQRIKGTKNEVGVWVTPAFPKLIYVLEEDNITEDSRFWYLTKLAAECTAKRMVPDYISEKIMLKLKIDKNGNGNCYTCMGCRSFLTPYVDENGKPKYYGRFNQGVVTINLVDVACTAARDGSKNEEKFWQVLDERLELCHRALQCRHERLEGTLSDAAPILWQYGALARLKKGEPIDKLLHGGYSTLSLGYAGLWECVYEITGKKLTEKEGEEFGLRVMQRLNDACAEWKAAENIDYSIYGTPLESTTYKFAKCLQNRFGIIKGVTDRNYITNSYHIHVTEKIDAFSKLELESKFQKLSPGGAISYVEVPNMQQNIPAVLEVMKFIYNNIMYAELNTKSDYCQVCGYDGEIQIVEEDGKLVWRCPNCGNEDQSKMNVARRTCGYIGSQFWNQGRTQEIKERVLHL

SEQ ID NO: 938 - protein, 844 aa, unidentified
  REGION 1..844: note = Description of Unknown: uncultivated organism sequence
  REGION 1..844: note = Category: MG60 effectors
  REGION 1..844: note = Description: MG60-151 effector
MPLDERIARLKKKLLTSPYEVCMARAYHFTQAYKETEGLDPAMRNALALKKTLENQKIFIYPDEFLAGSKTEKFLAGPLSVERGDFLRTLQMEMDILHLKQRPFLITEEEKKLFREVILPYWDGKTLRDHKAKEWEKKGLIDRKQGFFKRLFRMIKFMRYVGRENLRKIAGANRKAPLTFRRLKNLHALRYELACNNPSPAVFCFDVQGHLSLGVNKVIENGMDGIIKKAEDRLKRLEVEEPYNEKKKNFLKAVIISLESAIRYSERFAKLAEEMAKKTEDEKEKSRLLLIAKHCRHVPRYKPRTFHEALQSAWITHLVGEIQYGTHEVFAPGRIDQFLYPFYENDIRSGRITRDEAKALIQEFLIKLESNVEPIPEVGMETNAVLGNSQHVVTIGGLKRDGEDGTNELSYLILEAYEEMGGAVNQLAVRISKKTPFDFLKRACAVFRKANGIAFYNDEAIIEGLLADGMSIEDARDYCIVGCIETSGQSNTHGCVGGHELVLPVVLMQTLTRGKEPPPFIGQKEGIDCGDPSSFKTFEDFISAFKKQLAHQIKILVEATEGKDKAYREILPAPYVSALMDDCIEKAMDVTEGGARYDFTSIDVRGLATLVDSLLAIKRFVYEKKELSLTEFIKIIRNNFKGHEVLRQRIINEAPKFGRGDREADEMAKNVLHWIYEISQRYRNIRGGRFRVCYYSYGNHVIDGFMLGATPDGRLKGEPISNGVSPVNMGDFSCGPMGPMRSVAKFPPREISSGIALNMRFHPSFIKTQEGLITFAKMIKTYFEMGGMHIQPNVVSSETLRDAQKNPERYRDLIVKVSGYSAYFTDLGKSIQEDIISRYEFCRS

SEQ ID NO: 939 - protein, 1216 aa, unidentified
  REGION 1..1216: note = Description of Unknown: uncultivated organism sequence
  REGION 1..1216: note = Category: MG60 effectors
  REGION 1..1216: note = Description: MG60-152 effector
MKRSFILFLLFILIVAIFVLPSLFTSSPKVQHLLKDTVSRELKAKVNYSDITWYWFPLPHLAFREAKVESPNFILYGSNAEIYPDWLSMLHGRFGVAGISLDDFHLLIKKISNDQDTSPNLPRWIKVRNGFIEISKNVSLPFPFPFKDRRPYIKKLYGKIGIDGPSVRLDLKGNTRQAQLIELKGNADLHQLTYSLKGHLRQFDLSALKINKLTKVKQFPHYGFINLDFSVSGNGVERSEGHIKAYSNCFVSGKSKKRVSAIFSCGSLELRYKYADGEANVVLESLDFKHPRLHLTGTLHFWKKDGLPWLKVDAKGRRLDLAEIRKVLLALSIRDKDVDDYCNVIRAGTVNWARVHLDAPASKWHSLSDMYIEGRAEDVKVYVKDEDFFVDSVSGPFEIVDGVLHVKEGLARLRNTKGSSGRLIFGLSKGREQFKLDIVLSAPPEDVKWALMKFTHEDTLHRELKRLSKLSGRIVGRLIIGDKKHDKKVKVQVQEARLSAFYKTLGAKVSIVQAHARYFDDTFSVSNFSGGVGPNFFKDVSAKVSWKDGHFKIKVNRGMGSVLAESILDFCNRFNLGQEFIDKYHVSASGRFRVKRLNLFFDAKVPSSFSYLVAGSPLGVSVETSLLPHKVFLKGGKLLVSTDKVSASRLKLSMAGSRFAIGLDLDHNHFHRWSGSVKVSGPIRRNLWKWLEKKGVELDEFTPRVPFFVRDFKLRFTKGEPREFVGTLYWKDDGISLFINARKSKGLFDLKRLSINAAGKRAELSFLKALGIKKRFSLGFKGELLGDTLDSILVENNMLDGRLQGDFSFGFSAHEKKAYSIDGRIHIEGFRWIWGLNDNLRFKKLDIEANKSHRGNISGLIRLFDDKIGINGTFKNGVGRLVCSLNLSAPVLSSQTISFIQKMSEAQKGTDAGTSSLSDQEQAKLFRELAKRLDLKIGFKVKEARYAVTDFSKEKKQGSHEVVLKNLKGNAEVQKSRLKRLEAFSDDTCGLDVYLKKERIGDRVISEFSVITPKGRQALFEQVLDCLGVEQDLITGPVTFNLYLRGGERVLLGNGNLGIKAKDGYIHRFGLISKIFSVVNIVDIFSLNKGLLEGTSPYKKMLIDAKIASGRVHLEKAYIKGSGINFYGTGDVYLDSKMLDLIIFVQPLKTVDTIITSLPIIGGIIGGKNKSLFAIPVKVSGDWNDPKVDTLQTKTVTDIFKKLIFNVLTAPFSLGH

SEQ ID NO: 940 - protein, 813 aa, unidentified
  REGION 1..813: note = Description of Unknown: uncultivated organism sequence
  REGION 1..813: note = Category: MG60 effectors
  REGION 1..813: note = Description: MG60-153 effector
MQTNKQLDLAFDFVQFTGQNIFLTGKAGTGKTTFLKSLKEKSPKRMIVVAPTGVAAINAGGVTIHSFFQLSFAPQIGLENVQEKQNRFNKEKINIIRSLDLLVIDEISMVRADILDAIDRVLRRFRNRNRPFGGVQVLMIGDLQQLAPVIKNDEWNLLKREYETVYFFSSKALRETSYVSIELTHVFRQQDDKFIAILNKVRNNQLDQNALESLNERYIPNFKPDDSEGFITLCTHNLHAHRINEAKLIQLKTNKQLFTAKVEGKFPEYSYPTEFKLEVKVGAQVMFVKNDPEPEKLFYNGKIGQVTRINQDIIYVICPDEEEEIAVTQLLWENVKYTIDKKTAEISESVEGSFYQYPLKLAWAITIHKSQGLTFERAIIDAEASFAHGQVYVALSRCKTLEGMVLSSQISNRSIINDGTVSGFIQNVEENQPGDKELSDSKLAYQKDLLLDVFRFENIKMHVNIISKLLRENSSAIPEVVTEHIRKIKSAVYSDLVDVSEKFQNQITHLLSAQPDIEQNPKLLERVSKAAGYFSEKVKAILIDNFSKADLDVDNRTLRKQLKNSSGRLTEETELKLASFEICKAGFQVKQLLDTRAKTLIDNNKPTSKKQKAKEIINLESIPHPELYNTLRAWRLEKASELEKPAFFVFSQKTLIEMVNYLPVETATLKLINGFGSRKIEQFGADIIQIIQKYCDENNVQRMEIPLKEVVEKKPKIDTKKLSFELYQAGKIVAEIAKERALTTNTIENHLAHYVKLGELDISKLISKEKLKIITDYFEKAESKSFGEAKTALGEQVSYGELRMGLSYFESRE

SEQ ID NO: 941 - protein, 750 aa, unidentified
  REGION 1..750: note = Description of Unknown: uncultivated organism sequence
  REGION 1..750: note = Category: MG60 effectors
  REGION 1..750: note = Description: MG60-154 effector
MVKKFLSKGAYHYQNDFFNDKIGFVILGGNMMRVIKRNGHTVDFDATKIENAILKAMKCGSGIIDEQCAKDIAREIEEWHRYSDGDISIYRIEGQVFEKLIEKGQILTAKAYEGYRKVREFQRETNTIDNEIYGIVNQTNKEAMEENSNKDATVLATQRDLIAGEFSKDYCRRLLLPPKIVQAHDDGIIHFHDMDYYIQKMHNCDLVNLKDMFAQGTVINDKLIETPKSLQTACTVATQIVQQVANGQYGGQTISLAHLSPYVRISYEKHKKNVINEGKMIGIDYSDEQIEKIAKSRLKDEIKAGIQTIQYQINTFSTTNGQAPFLSVFMYLKEEPEYIEETAMLIEETLRQRYVGMKNPVGAYVTPAFPKLLYVLDDNNVPQDSKYRYLTDLAVKCVAKRMMPDFISAKIMRENYEGQVFPCMGCRSFLSPWKDENGEYKWYGRFNQGVVTLNLADAGLSADHNLDNFWKILDERLELCKEALLLRHESLKGTIADVSPIHWRYGALARLKSGEKIDKLLENGYSTISLGYIGLYECVVALIGQTHTSKEGNELATKIMERLREACDSWKEETGLGFGLYGTPAESTTYTFARALKKRFGIVPGVTDKDYLTNSYHVNVREHIDAFSKLEVEAKFQKLSSGGAISYVEVTNMSQNLDALSALIDYMYETIQYAEINTKSDYCQECGFDGEILLDENREWYCPNCGNRNHKTLNVCRRTCGYLGDNFWNQGRTQEIAERFVHLDNHLYGE

SEQ ID NO: 942 - protein, 768 aa, unidentified
  REGION 1..768: note = Description of Unknown: uncultivated organism sequence
  REGION 1..768: note = Category: MG60 effectors
  REGION 1..768: note = Description: MG60-155 effector
MFCSCKKNLRVVIYIYNATKTYDCAKKLIVYKSIIKGAEVMKIIKRNGAEETFDRQKIKDAISKANNETDGTPELTDRQIDYISLVIEDHCNEMNRALSVEEIQELVETHIILQGAPETAKRYIRYRFTRNLARASNTTDNQILSLIECNNEEVKQENSNKNPTVNSVQRDYMAGEVSKDLTKRILLPEDIVKAHEEGLIHFHDADYFAQHMHNCDLVNLEDMLQNGTVISGTMIEKPHSFSTACNIATQIIAQVASNQYGGQSISLAHLAPFVQISREKITRQVRAEMEEFGIAADDEQVKSLVEKRVRDEIKRGVQTIQYQVVTLLTTNGQAPFVTVFMYLNEAKNEQEKKDLAIIIEEVLKQRIKGTKNEVGVWVTPAFPKLIYVLEEDNITEDSRFWYLTKLAAECTAKRMVPDYISEKIMLKLKIDKNGNGNCYTCMGCRSFLTPYVDENGKPKYYGRFNQGVVTINLVDVACTAARDGNKSEEKFWQVLDERLELCHRALQCRHERLEGTLSDAAPILWQYGALARLKKGEPIDKLLHGGYSTLSLGYAGLWECVYEIKGKKLTEKEGEEFGLRVMQRLNDACAEWKAAENIDYSIYGTPLESTTYKFAKCLQNRFGIIKGVTDRNYITNSYHIHVTEKIDAFSKLELESKFQKLSPGGAISYVEVPNMQQNIPAVLEVMKFIYNNIMYAELNTKSDYCQVCGYDGEIQIVEEDGKLVWRCPNCGNEDQSKMNVARRTCGYIGSQFWNQGRTQEIKERVLHL

SEQ ID NO: 943 - protein, 769 aa, unidentified
  REGION 1..769: note = Description of Unknown: uncultivated organism sequence
  REGION 1..769: note = Category: MG60 effectors
  REGION 1..769: note = Description: MG60-156 effector
MKVIKRDGTIVEYDREKIRIAIEKANKEVSRKEKATDSEIEEIMSYIEDLKKGRILVEDIQDIIEEKLMEIKRYELAKKYITYRYTRALVRKANTTDQSIKELIEGESEYWNNENANKNARVVTTQRDYLAGITSTDITRRFLLPEDVVKAHDEGIIHFHDADYFAQNALTNCELINLEDMLQNGTIMNGVMIEKPHRFITACTIATQIILAVTSSTYGGATVSLAHLAPFVRSSYEKYYKKYKENGLSKEQCEKFAKEDTKKEVADGVQTFNYQVNSMTNTNGQAPFLSVCMYLGETDEYKEELAMIIEEFLNQRILGFKNEKGVYITPAFPKLLYVLEEDNIHENSKYWYLTELAAKCTAKRMVPDYISEKIMKQMKVDANGDGQCYPCMGCRSFLTPYIDPVTKKPKYYGRFNQGVVTINLVDVALSSGKDLKKFWKIYDERLELCHKALQVRHERLAKATSDIAPILWQHGAFARLPKGASIHPLLHGGYSTISLGYAGLYECVKYMTGKSHTDNGDGKDFAIEVMKKMNEKCAEWKEAEDIDYSVYGTPIESTTYKFAKCLQKRFGKIKGITDKNYITNSYHVPVFEEIDAFSKLKLESEFQRLSPGGAISYVETPNLQNNLEVVLQIMKFIYDNIMYAELNTKSDYCQKCGYTGEILIDDNLEWYCPNCGNRDHNTLNVARRTCGYIGSNFWNKGRTQEIKERVLHIDNKDDDCDCDECNCDHANTDTSKEEKSEEKQMNFMDYDVEEEITKSKKHMKQPAMV

SEQ ID NO: 944 - protein, 868 aa, unidentified
  REGION 1..868: note = Description of Unknown: uncultivated organism sequence
  REGION 1..868: note = Category: MG60 effectors
  REGION 1..868: note = Description: MG60-157 effector
MRVIPKDTKLRATVYKNFTIWDIFVAIGVIGIEVLIGFSNLPGKVWIMLVAGVIMAPLFFPTDDGGRFYQNIVSMIQFRFMKKAYVGAEIKRFVPYKEIRDDGIIVYPDYFARVISVGQTEFRLLDEGMQNTKIAYFERVLKLTDIGASMDIVKIDRPINFDAFSASLFERVEKEKNELKKAVLEDRISQIDRLNNETKQFRPYYYIVIYDAKEDSLKDNTDTAVQMLNQMGLDSVILGQKEVVNFLKYCHTRFFDEREIDNVEPKDYVDYIMPKKLKFAGRNYTVDDVKAFTMTISDYPLSVANAWGSEIFNIDNTKVVLKIRPVDRLKAVKRIDKVVMELGSREENIRKASELIAKESHVESMGATLMSLQNENEVLFDCSLTVTAFNNANEDQLSFRKSIRHRIIQEGFKINNLSSQQINGFLASNISQVRSLKRYERGINSSSLAAVFPFVETSIIDEPNGIILGCNSHPVALDITKRDGSHTNSNVLILGKPGSGKTYAVKSIITQLYADNWRIHVLDVENEFSTLAKNVGGMIIDVGSATQGRINPFHIYGLLTDDGKQASPENIFDAHLIALESFFKIILEGISSDALEYINNLVVKCYEKRGITKSTDCSKFTAAQFPTFDDLMKILQEQPREGINPLDLANLQRAETYVAKFASGGRYASLWNGPSTLTTSSQFTVFNFQSLLSNKNTVVANAQMLLVMRYLEQEVINARDQNRDGKNLIRTAIVAEEAHAFTDPKFPVALDFLYQMAKRIRKYAGALFFITQNLRDGRSTPEIEAKTTAIFNCCQYSFIFSLPPQDINDLVELYKSSGGINEAEQQEIVTNQQGTAFLISSATERTSFSIVTTGVVESLFIREDEKQL

SEQ ID NO: 945 - protein, 773 aa, unidentified
  REGION 1..773: note = Description of Unknown: uncultivated organism sequence
  REGION 1..773: note = Category: MG60 effectors
  REGION 1..773: note = Description: MG60-158 effector
MSAAYGITIFSVRRVDFACQSPTTGHRKGLTSMKIIKRNGSEAVFDIMKIITAVTKANNVVKEDEQLTPMQIRRIAESVENSCLGMNRALSVEEIQDLVEHQIMAHGAYEVAKQYITYRYTRSLVRKSNTTDEKILSLIESNNEEVKQENSNKNPTVNAVQRDYMAGEVSKDLTARMLLPKEIVDAHEAGIIHFHDADYFAQHMHNCDLVNLEDMLQNGTVISGTLIEKPHSFSTACNISTQIIAQIASNQYGGQSISLTHLAPFVDISRQKIRKTVLEEIRTLGAAPDEAAISKVVEDRLREEIRRGVQTIQYQVVTLMTTNGQAPFITVFMYLGEARNEQEKHDLAIIIEETLKQRIEGVKNEKGVWITPAFPKLIYVLEEDNIHEGTKYWELTKLAARCTAKRMVPDYISEKKMRELKLSKGETPGHGDVYTCMGCRSFLTPDRSGNGWNNIANAGNYEPGKPKYYGRFNQGVVTINLVDVALSSGGAVDKFWRIFDERLELCYEALMCRHNRLKGTLSDAAPILWQYGALARLGKGEPIDKLLYGGYSTISLGYAGLYECVKYMTGKSHTDPAATPFALEVMQHMNDKCAEWKQKENIDFSLYGTPLESTTYKFAKCLQKRFGIIEGITDKNYITNSYHIHVSEHINAFDKLAFESQFQALSPGGAISYVEVPNMQNNIDAVLQVMQFIYENIMYAELNTKSDYCQICGFDGEIEIKEDKDGKLVWTCPQCGNTDQSKMNVARRTCGYIGTQYWNQGRTQEIRDRVLHL

SEQ ID NO: 946 - protein, 756 aa, unidentified
  REGION 1..756: note = Description of Unknown: uncultivated organism sequence
  REGION 1..756: note = Category: MG60 effectors
  REGION 1..756: note = Description: MG60-159 effector
MSFYDRRTTWLTPCGFTYSKADPLRDKDTLSERTRTIMKIIKRNGSEAEFDKNKIIRAISKANITVDESIRLTGKQIDRIAESVVLSCERLGRSPGVEEVQDMVEHQIMAHGAFEVAKNYITYRYTHDLIRRSNTTDEKILSLIECNNEEAKQENSNKNPVINSTQRDYMAGEVSRDLTDRLLLPPDIVKAHEEGIIHFHDTDYFAQHMHNCDLVNLEDMLQNGTVVTGTMLERPHSFSTACNIATQIIAQVASNQYGGQSISLAHLAPFVQVSREKIRRSVIAESKDFEIPLNEEQITNIVERRLREEISRGVQTIQYQVLTLLTTNGQAPFVTVFMYLGEAKNEREKKDLAMIIEETLEQRYKGVKNETGVWVTPAFPKLIYVLEEDNITEDSEYWYLTKLAAKCTAKRLVPDYISEKKMKELKEGNCFPVMGCRSALSPWKDENGNYKFYGRFNQGVVTLNLVDIACSSGGNYDKFWKIFDERLDLCYRALMCRHNRLMGTLSDAAPILWQYGACARLKKGEPIDKLLVGGYSTISLGYAGLCECVRYMTGKSHTDPSATPFALEVMRHMNDACEKWKKETTIGFGLYGTPLESTTYKFAKCLQKRFGIIPGVTDKGYITNSYHVHVTEHIDAFEKLKFESQFQALSTGGAISYVEVPNMQQNLDAVLEIIKFIYDNIMYAELNTKSDYCQVCGYDGEIEIKERDGKLVWVCPNCGNDDQNKMNVARRTCGYIGTQFWNQGRTQEIKERVLHL

SEQ ID NO: 947 - protein, 753 aa, unidentified
  REGION 1..753: note = Description of Unknown: uncultivated organism sequence
  REGION 1..753: note = Category: MG60 effectors
  REGION 1..753: note = Description: MG60-160 effector
MLEIVKRDCSKTNFDKQKIFNAIMKAMKSGSGIVKSEIAEKIANEIEHEAKSMEEIDIYQIEAMVFQKLIENNQILTAKAYESYRSVREFQRNTTNSTDDVILELLAGQSEYWNEENSNKNAMLITTQRDYIAGIESEDISKRMLLTPEIVHAQENGIAHFHDIDYFAMKAMYNCCLINLEDMLQNGTVISNVLIEKPHSFSTACNVATQIIAQVASSQFGGQTISLSHLAPFVDISRQRIKKQVEKELINANLSSVEYHNLVDSIVAERLKEEIKKGVQTIQYQVVTLMTTNGQAPFLSVFMYLNEVKDKQTKHDLAMLIEEVLLQRIQGVKNEKGVWVTPAFPKLLYVLEEDNIHKDSPYYYLTELAAKCTAKRMVPDYISEKKMKEYKIDKNGKGQCFPAMGCRSFLSPYLDKNNQPKYYGRFNQGVVTINLADVALSALKEYEESKFNLHDTSVESIFWKVLDERLELCHRTLRLRHERLKGTVSDVAPILWQHGAIARLDKGEKIDKLLYNDYSTISLGYAALYECVKTITGHSLTDNGIGEKFGLQVMQRLTDKCNQWKEEENIGYSVYGTPLESTTYKFAKCLRKRFGVIEGITDRDYVTNSYHIPVFENINAFDKLLIESKFQKLSAGGAISYVEVPNLTDNIEIVIQIIQYIYEHIMYAELNTKSDYCHVCGYDKEIEIVTDENTGKLIWKCPQCGNTDQRKMSVTRRTCGYLGSNFWNQGRTQEIKERVLHIDDIDLNESENV

SEQ ID NO: 948 - protein, 1045 aa, unidentified
  REGION 1..1045: note = Description of Unknown: uncultivated organism sequence
  REGION 1..1045: note = Category: MG60 effectors
  REGION 1..1045: note = Description: MG60-161 effector
MIKVIKRDCSEIQFDKNKISKAILKAMKNGSGIIKPKIADDIANEIEQYCIDNQFDNIDISDIESIVYDKLISKKQRLTAKAYEGYRRIREFQRENVNTTDEEIEELLTGTSEYWMNENSNKDEKLVTTQRDYMAGIVSKDMSRRYLLTPEIVQAHDEGIIHFHDVDYFGQKTLHNCFSADTEFVTSCGVKKFSDFHDGDNVVVLDKDGMWRNATVKQFGKQEMYDVTFQSTRRTKTVTCTKNHRWILNDGSVTTNLKIGDSLIGLKDMLCTYKTETYDECNLFALGFLIGDGCDHNSANYYQVRLCGHKIEYADIFKKAGYKIDNIGDTNDLIAYKTGTIKQDFINSKAWKYMDRKSRALLFLGLYAADGTVNANKICTTDERIAEFIRDNSCLCGYHITSETTEIRDTNYKKDSKLIAFRFSKHQPMNQLWKVKSIVPHYNYHYENRGNKKEENAPINAWCVVEPITHSFTLSNGMVTGNCDLIDLEDMLQNGTVISGTLIEKPHSFSTACNIATQIIAQVASSQYGGQTITLSHLAPFVDVSRKKIREEVEEELNYINGGGIYKDQLSTIDEITESRLAKEVKKGVQTIQYQVVTLMTTNGQAPFLSVNMYLNEVKDEQTKADLALIIEEVLKQRIQGVKNEQGVWITPAFPKLLYVLEDDNIHEGDKYWYLTKLAAQCTAKRMVPDYISEKKMLEYKVDKNGNGNCYPCMGCRSFLTPYVDTNGKPKYYGRFNQGVVTINLPDIALSSNGDVETFWEIFDERTELCHKALQIRHKRLEGTPSDVAPILWRYGALARLKKGEVIDKLLHGGYSTLSLGYAGLYECVKFMTGNSHTDGDKGEKFGLEVMQALNDKCNKWKKEENIDYSLYGSPIESTTYKFAKCLKKRFGVIEGITDRDYITNSYHVPVFEKIDPFTKLSIESKFQKLSPGGAISYIECADLTHNTEAVLKVMQFIYDNIMYAELNTKSDYCQVCGYDGEIKIVDENNELIWECPNCGNRDKNKMNVARRTCGYIGSNFWNKGRTEEIAERYVHLDDHEHEVE

SEQ ID NO: 949 - protein, 921 aa, unidentified
  REGION 1..921: note = Description of Unknown: uncultivated organism sequence
  REGION 1..921: note = Category: MG60 effectors
  REGION 1..921: note = Description: MG60-162 effector
MKIVKRNGTEVEFDIKKIINAITKANETVEEKDKLSIEEIKNISDCVMVRVSQLPVDTNVEVIQDIVEEELDKHNASYTLKRNYMLYRYQHNELRKSNTIDKTILSLIKCENEDIKQENSNKNPVIISTQRDYMAGEVSKDLMRRYFIDPDLMKAHDEGLIHIHDMDYILQNCHNCDLINLEDMLNNGTVISGTAIDKPHSFSTACNIATQIIAQVASSQYGGQSITLSHLAPFVDVSRKAILKELKEEFPSIDEDKLKEVCHRRLLKEINKGVQIIQYQVVTLMTTNGQAPFITVFMYLNECKDEQTKNDLALIIEEVLKQRIIGVKNEKGVYITPAFPKLIYVLQEDNIEKGSKYYYLTELAAKCTAKRMVPDYISEKIMKEMKEGQVYPSMGAVVPESKVYWKIDGKAYYGPIEKMYHSMIDRYDDLEEDCQFGQEGNPNKDINLKDYNVEIYDNGAGKYVKCLMMNMNLASQFRMYKIRTYNPIDDTDINLVVTHDHPMMKLKSEFDPNLVTIDWNDPKDIDNKCEEIQAEYLKTGDYVFFTKEQRGIRTVEIVDQTIPKPVQILKVPIINNYDFVYDVTTETEHFMVNNLWSHNCRSFLTPWKDKNGKYKFYGRFNQGVCTINLIDVACSSGKNIDKFWKIFDERLDMCRRVLMIKHNRLLGTVSDVAPILWQNGALARLNKGEKIDKLLYGGYSTISLGYAGLYECVYYMTGKSHTDPSVKDFALSIMQHMNDICNKWKKETNIGFSVYGTPLESVTYKFAKCLKKRFGEIPEVTDHNYITNSYHCNVREHINAFDKLTMESEFQRLSPGGAISYVEVPNMQNNIPAVLQLLKHIYNTIMYAEINTKSDYCHECGYTGEIVIEENKDHKLIWKCPNCGNTDQTKMNVARRTCGYIGTNFWNQGRTQEIKDRVLHL

SEQ ID NO: 950 - protein, 768 aa, unidentified
  REGION 1..768: note = Description of Unknown: uncultivated organism sequence
  REGION 1..768: note = Category: MG60 effectors
  REGION 1..768: note = Description: MG60-163 effector
MFCSCKKNLCVVIYIYNATKTYDCVKKLIVYKSIIKGAEVMKIIKRNGAEETFDRQKIKDAIAKANNETDGTPELTDRQIDYISLVIEDHCNEMNRALSVEEIQELVETHIILQGAPETAKRYIRYRFTRNLARASNTTDNQILSLIECNNEEVKQENSNKNPIVNSVQRDYMAGEVSKDLTKRILLPEDIVKAHEEGLIHFHDADYFAQHMHNCDLVNLEDMLQNGTVISGTMIEKPHSFSTACNIATQIIAQVASNQYGGQSISLAHLAPFVQISREKITRQVRAEMEEFGIDADDEQVKSLVEKRVRDEIKRGVQTIQYQVVTLLTTNGQAPFVTVFMYLNEAKNEQEKKDLAIIIEEVLKQRIKGTKNEVGVWVTPAFPKLIYVLEEDNITEDSRFWYLTKLAAECTAKRMVPDYISEKIMLKLKIDKNGNGNCYTCMGCRSFLTPYVDENGKPKYYGRFNQGVVTINLVDVACTAARDGSKSEEKFWQVLDERLELCHRALQCRHERLEGTLSDAAPILWQYGALARLKKGEPIDKLLHGGYSTLSLGYAGLWECVYEITGKKLTEKEGEEFGLRVMQRLNDACAEWKAAENIDYSIYGTPLESTTYKFAKCLQNRFGIIKGVTDRNYITNSYHIHVTEKIDAFSKLELESKFQKLSPGGAISYVEVPNMQQNIPAVLEVMKFIYNNIMYAELNTKSDYCQVCGYDGEIQIVEEDGKLVWRCPNCGNEDQSKMNVARRTCGYIGSQFWNQGRTQEIKERVLHL

SEQ ID NO: 951 - protein, 773 aa, unidentified
  REGION 1..773: note = Description of Unknown: uncultivated organism sequence
  REGION 1..773: note = Category: MG60 effectors
  REGION 1..773: note = Description: MG60-164 effector
MSAAYGITIFSVRRVDFACQSPTTGHRKGLTSMKIIKRNGSEAVFDIMKIITAVTKANNVVKEDEQLTPMQIRRIAESVENSCLGMNRALSVEEIQDLVEHQIMAHGAYEVAKQYITYRYTRSLVRKSNTTDEKILSLIESNNEEVKQENSNKNPTVNAVQRDYMAGEVSKDLTARMLLPKEIVDAHEAGIIHFHDADYFAQHMHNCDLVNLEDMLQNGTVISGTLIEKPHSFSTACNISTQIIAQIASNQYGGQSISLTHLAPFVDISRQKIRKTVLEEIRTLGAAPDEAAISKVVEDRLREEIRRGVQTIQYQVVTLMTTNGQAPFITVFMYLGEARNEQEKHDLAIIIEETLKQRIEGVKNEKGVWITPAFPKLIYVLEEDNIHEGTKYWELTKLAARCTAKRMVPDYISEKKMRELKLSKGETPGHGDVYTCMGCRSFLTPDRSGNGWNNIANAGNYEPGKPKYYGRFNQGVVTINLVDVALSSGGAVDKFWRIFDERLELCYEALMCRHNRLKGTLSDAAPILWQYGALARLGKGEPIDKLLYGGYSTISLGYAGLYECVKYMTGKSHTDPAATPFALEVMQHMNDKCAEWKQKENIDFSLYGTPLESTTYKFAKCLQKRFGLVEGITDKNYITNSYHIHVSEHINAFDKLAFESQFQALSPGGAISYVEVPNMQSNIDAVLQVMQFIYENIMYAELNTKSDYCQICGFDGEIEIKEDKDGKLVWTCPQCGNTDQSKMNVARRTCGYIGTQYWNQGRTQEIRDRVLHL

SEQ ID NO: 952 - protein, 756 aa, unidentified
  REGION 1..756: note = Description of Unknown: uncultivated organism sequence
  REGION 1..756: note = Category: MG60 effectors
  REGION 1..756: note = Description: MG60-165 effector
MQQSIFDVCVIIGLWFKKKRRSEVFTMKVIKRDGHIVDYSPDKIEEAVSKANLEVSEEDRVSDIQIRNIIKYIEGLHKKRMLVEDIQDVIEKRLMTLGKYELAKEYITYRYTRELVRRSNTTDKSIKELIDGESEYWNTENSNKNAKVVTTQRDYLAGITSTDITRRFLLPEDIVTAHDQGIIHFHDADYFAQNALHNCDLINLDDMLQNGTNINGVMIEKPHRFLTAMTIATQLITAVSSSQYGGCTITLTHLAPFVRSSKEFYLKKYKNRKLTKAQVEKFANEDLKKEITDGVQTFQYQINSMTTTNGQAPFLSVCMYLGETEEYKDELAMIIEEVLKQRMEGMKNEKGVYITPAFPKLLYVLEEENINPKGKYYYLTELAARCTAKRMVPDYISEKVMKENKINSLGNGECFPCMGCRSFLTPDRMFNVGNISKALNYVENKGKYYGRFNQGVVTINLPDVALTSGKDMELFWKVFDDRLELCHRALQIRHKRLSKVTSDVAPILWQHGALARLEKGESIHELLHHGYSTISLGYAGLYECVKYMTGHSHTDNGKGHEFALEVMQHMNDKCNEWKEAEDIDYSLYGTPIESTTYKFAKCLRDRFGKIKGITDRDYITNSYHVPVFEEIDAFTKLKLESEFQRLSPGGAISYIETPNLENNIDVVMEVINFIYENIMYAELNTKSDYCQKCGYNGEILLDDDLEWYCPECGNRDHDTLNVARRTCGYIGTNFWNKGRTQEIKERVVHIDNKDDE

SEQ ID NO: 953 - protein, 1231 aa, unidentified
  REGION 1..1231: note = Description of Unknown: uncultivated organism sequence
  REGION 1..1231: note = Category: MG60 effectors
  REGION 1..1231: note = Description: MG60-166 effector
MSLKIEDLETFKRHRYAVSESLSTDIVGRDREIEEISSKIDSVYCLTITGPAGVGKSRLAVAAIEHYCASHTDFEVLCTKSFSDYISALDEAIEEGRRYIIFIDDANTYPRLIELLEFLKYRNQEGNIKAILTVRDYLKGCLDSDIYMGFYEVKPLNDKSIEDALVKNTTIRNEDWLKQIAKIANGNIRVAFLAANEAIKNNKSLGSIYNQKDVLNRFYKDEMSKIDHSESLLITAGVIAFFKSIYLEQLFYIVPILKSVNLSKKSFIENVNILIKMKIVDDYHDVVKIADQCFADFLLNYTIVEKRYLKIKDLLLVGFKYYKERIVESIHTILHVYNTEEFVDHLRKEVTDACNNLEDDVSLKHDLESCFVQVIPEYVSREYIEGVENYSDKKDIKWLINVFSGLAFSNYNEIANKGILKLLKKTKNKTKEVYDAIKNTYEMRAERANERFQYQIALIKELQNGGLYNDEFNALVSSYLNFRFSYSCFTSKREMMHYTFSVDDNTAGILELRSTCWGYLFNCELSKAIDSIMDFANRHYIERNLEIIKNDLRCINTYLCEHDQSGFLNSVLYVKFIDEAKEYCFTDLLTANEKYLDFLDIVFERKLLGANYEGYEARYKNRVADYYNLHKDDIYDILNETDLFLNKYYKYQKTRLVNALVEVVDKFSNALFFLCTKNVIFPHLVIEEFLKNRNLDEAYALINQIDDETIKDEYLYNFYSYLSKENIEKDYGFIGWMNSKGDFKTNRTYHRDAMSLKNIAEKCGLDYVALLRKLYSKEKYNKFIAKAYLSYLIDNVETFKELLSLNQNLAIKIYEFLIANGEKDYESSVLIEILDVKRSYIKVFAKAFIEEEYYNDCNLDFIFEKEYCDSFLDECMKVMLSQKINFAPFKLRILISRNINQPNMERWIEKYIESNYKEDNVIELFFQALSEIDHQHKNAYLVLYYQKGHDINVLRQAILKKSHSYSNAKEHFGNEIKWLETLKKSLLNWNNTEEVKFIDTVIDDYKVRIKNDEIESLVDYGNQNILNELRERDFKTEVPLKDAFELYQSNKKFRDMLSSGYLSYKDGSFVNGKNDAVKFIDKLKDKKIICVEIKPVDKVGRLDYEQYLSSMKSIAKEFDNPKLVSLNDYLNALIAERKWNAQEFKDYTFLSRDIFSKIRNNKKNKMDKRTLVQILIGLRVSKRERDYLLELNQTSLSKYVKEDVLYSFILDAKLDIEVADELLRDIGEDGF

SEQ ID NO: 954 - protein, 783 aa, unidentified
  REGION 1..783: note = Description of Unknown: uncultivated organism sequence
  REGION 1..783: note = Category: MG60 effectors
  REGION 1..783: note = Description: MG60-167 effector
MMRVVKRDGKIVDFDESRIKIAIGKANNEVDESQRATEEEIEKIVEYVKKVKKDRILVEDIQDIIENKLMEYKRFELAKAYITYRYSRALVRKANTTDQTVKELVEGNSEYWNNENSNKNARVVTTQRDYLAGITSTDITRRLLLPPEIVKAHDEGIIHFHDADYFAQNALTNCCLINLNDMLQNGTVINGVMIEKPHRFVTACTIATQIILGVSSSQYGGCTVTLTHLAPFVRDSYNRSLKKYQDRNLPEEECKKFAMQDTKKEIADGVQTFNYQVNSMTNTNGQAPFLSVNMYLGETDEYKDELAMIIEEFLRQRMLGFKNEKGVYITPAFPKLLYVLEEDNIHKDSKYWYLTELAAKCTAKRMVPDYISEKMMKKLKINQYGEGDCYPCMGCRSFLTPDRVKGNVAKAKDYVEGKGKYYGRFNQGVVTINLPDVALSSKKDEKEFWKIFDERLELCHEALQLRHKRLSGITSDVAPLLWQYGAYARLNKGEKLDKLLHGGYSTLSLGYAGLYECVKYMTGDSHTDGGKGEKFALEVMQHMNDKCAEWKKAEDIDYSLYGTPIESTTYKFAKCLKKRFGTVEGVTDRNYITNSYHVPVFEEIDAFSKLKLESEFQRLSPGGAISYVETPNLQNNIEVVEQIIEFIYNNIMYAELNTKSDYCQKCGYTGEILIDDNLEWYCPNCGNRDHRTLNVARRTCGYIGTNFWNKGRTQEIKERVLHIDNKDFDAEKCTKCDEEANVASKCCNDSNESTECDKNVEKHEKKTRAKVSAKEKAMASVHA

SEQ ID NO: 955 - protein, 818 aa, unidentified
  REGION 1..818: note = Description of Unknown: uncultivated organism sequence
  REGION 1..818: note = Category: MG60 effectors
  REGION 1..818: note = Description: MG60-168 effector
MQTNKQLDLARNFVQYTGQNIFLTGKAGTGKTTFLKSLKEHSPKRMIVVAPTGVAAINAGGVTIHSFFQLSFAPQIGLENDRDKQNRFNKEKISIIRSLDLLVIDEISMVRADTLDAIDRVLRRFRSKSKPFGGVQVLMIGDLQQLAPVVKNEEWGLLRREYETVFFFSSKVLRKTSFVSIELTEVFRQHDDKFISILNKVRDNQLDQKSLEALNKRYLPGFVPGEDEGFITLCTHNIQAHRINESKLIQLKTDKKSYTAEIEGKFPEYSYPTDFKLVVKPGAQVMFVKNDPEPEKRFYNGKIGKITRFEEDVIYVNCPGDMEEIAVTPLLWENVKYTIDTKTAEISESVEGTFMQYPLKLAWAITIHKSQGLTFEKAIIDAGASFAHGQVYVALSRCKTLEGMVLSTPISERSIINDGTVSGFIQNVEENQPGEIELKNAKLAYQKELLFDIFSFETVKMQVNIINKLLRENSSSVPEVVVEHLKKIKSAVYSDLVEVAEKFQKQISTLLKDQPDVEQNNQLLERISKAATYFSEKTETIIETDFTRADLEVDNRVLRKQLKNSSTKLLEEANLKQVSFAICKNGFNVKELLTERAKAIVANNKPAGKKKKAKEIVNPENIPHPELYNTLREWRLEKAHEIEKPAFVVFSQKTLVELVNYLPVETATLKLINGFGERKIEQFGAGIIEIIRDYCDKNNIQRAEIPLKEGKEKKPKIDTKKVSFEMFKEGKTVEEIAVERALTPGTIENHLAHFVRLGELDIKLILDNDKLKKITDYFKSTKNKSFGDAKAHFGDAISYGELRMGLSYLESLEQTQSK

SEQ ID NO: 956 - protein, 753 aa, unidentified
  REGION 1..753: note = Description of Unknown: uncultivated organism sequence
  REGION 1..753: note = Category: MG60 effectors
  REGION 1..753: note = Description: MG60-169 effector
MKKLNIDHAQRSLILSRLEEKGIQEFVEFLQSKFKSESITRIMGSSHLFINSCPLCGHVGCFNIDSTMGIFNCFSCRGSGNAADLPMLFTNDIQEGLQALQEFTGLTLQLDKEDVQAQRKTNLYADVTEIYHKQLLDNEVVLNYLIQVRKRQIETIEKMQTGFCTSRADTSSQLKELGYSDEEKSKVLVPEGLFVYPYPDRYGVIQRFNTKNYFKATMRVSDGTQKVIEGYSIDKKKLLFNPNQKYAYGIIVEGEQDFAAIIENGDGNVVAMGGSPSADQINELRQFKKLYLCFDSDEPGKAFTQKVNNTLPDVKIYSIEIPHGYKDIDEYYTSYSNPVPVQSLLDSAQELINTESHGSVINNKVMLKNRDWQIEFDLTQLDIAKQMYKGNLKNTVNGKIVDNKNSIFLPNGMPKPLIEYADKLSQTIDEHYNCNFNKKTLFELSDIFYFSYNKPDIIKAAAVQLLEIEDKKERDACIASLTDKSFRNSVVREIIATENEMLKDQAVHYPLIKPGQAYIISEENPVAYIYFNKSEDDGKGNLIEMPCLLSSDKRIITLSDYTKVSPNQIVIVDGRFRLRDVIKGPLLSTDFCSLKQGYAKRYIEGEIEQEYLKPEYIIRKFEELFAKVYYNPDSNIYKVLALFSYATYLADLFGVLPYIYCTAQKGSGKSTILALLSKLCFNSVFVTDVTTASFIRISNLCATLIVDEFEGHSSRSKNQEDDLIPLIKSGYSKSSGGATRTNIEETYILLLKW

SEQ ID NO: 957 - protein, 844 aa, unidentified
  REGION 1..844: note = Description of Unknown: uncultivated organism sequence
  REGION 1..844: note = Category: MG60 effectors
  REGION 1..844: note = Description: MG60-170 effector
MPLDERIGRLKKKLLTSPYEVCMARAYHFTQAYKETEGLDPAIRNALALKKTLENQKIFIYPDEFLAGSKTEKFLSGPLSVERGDFLRTLQMEMDILHLKQRPFLITEEEKKLFREVILPYWDGKTLRDHKAKEWEKKGLIDRKQGFFKRLFRMIKFMRYVGRENLRKIAGANRKAPLTFRRLKNLHALRYELACNNPSPAVFCFDVQGHLSLGVNKVIENGMEGIIKKAEDRLKRLEVEEPYNEKKKNFLKAVTISLESAIRYSEKFAELSEEIAKKTEDEKEKNRLLLIAKHCRHVPRYKPRTFHEALQSAWITHLVGEIQYGTHEVFAPGRIDQFLYPFYENDIKSGRITRDEAKALIQEFLIKLESNVEPIPEVGMETNAVLGNSQHVVTIGGLKKDGEDGTNELSYLILEAYEEIGGAVNQLAVRISKKTPFDFLKRACAVFRKANGIAFYNDEAIIEGLLADGMSIEDARDYCIVGCIETSGQSNTHGCVGGHELVLPVVLIQTLTRGKEPPPFIGQKEGIDCGDPSSFKTFEDFISAFKKQLAHQIKILVEATEGKDKAYREILPAPYVSALMDDCIEKTMDVTEGGARYDFTSIDVRGLATLVDSLLAIKRFVYEKKELSLTDFIKIIRNNFKGHEVLRQRIINEAPKSGRGDGEADEMAKNVLHWIYEISQRYRNIRGGRFRVCYYSYGNHVIDGFMLGATPDGRLKGEPISNGVSPVNMGDFSCGPMGPMRSVAKFPPREISSGIALNMRFHPSFIKTEEGLITFAKMIKTYFEMGGMHIQPNVVSSETLMDAQKNPERYRDLIVKVSGYSAYFTDLGKSIQEDIISRYEFCRS

SEQ ID NO: 958 - protein, 625 aa, unidentified
  REGION 1..625: note = Description of Unknown: uncultivated organism sequence
  REGION 1..625: note = Category: MG60 effectors
  REGION 1..625: note = Description: MG60-171 effector
MQEEYLFKDNETICAFLKRLKDKDIASYKEILNETHCSKAYNDLKEHILQTLASLNRVKKAQELSKHKEYDLIRIYEEIQSMPSALFSYFKVSMNDIEAAMSASKKRLYLFKISNKDLSYAETSSQGKRKSRGRENLHTMYLKALLDGNKAFDIGSGSIYFRRKTDFGYTKETWEKGHHYAELKDRFLYPIISKRRYTVDHLQFHLSMTINYNADKNCKNINEMVNETIRNGAIEHIIGIDRGERNLLYASVIDLHGNIIEQCSLNIIPNKHNDLGTDYLKLLKERESIRQEERRSWDSIEKINELKTGYVSQAVHQVVKMVLKYHAIIVLEDLNEGFIRSRQKRERTVYAQFEKQLIEKLNYLVDKGIAEGEPGSATNGYQLTNPTNNNVKSNQSGILFYIPAWNTSNIDPTTGFVNLFNLRYQNREKTREFFDKFKSIKYNSEKKWLEFTFDYNDFTSKGKETQTIWTVCTYGPRIEAHKDSPKIWKKKTVEDINNKWLGFFNKWNITISEDLKEQIVKQDKKEFYKHLLDLFKLTLQMRNSDDKDDYIISPVMNTAHKFFKSCKDDTTLPIDADANGAYNIARKGLMWIKQMKDYKDTKKFKPDLKNRKWLNFAQQKPYKDE

SEQ ID NO: 959 - protein, 763 aa, unidentified
  REGION 1..763: note = Description of Unknown: uncultivated organism sequence
  REGION 1..763: note = Category: MG60 effectors
  REGION 1..763: note = Description: MG60-172 effector
MMRVVKRDGKIVDFDESRIKIAIGKANNEVDESQRATEEEIEKIVEYVKKVKKDRILVEDIQDIIENKLMEYKRFELAKAYITYRYSRALVRKANTTDQTVKELVEGNSEYWNNENSNKNARVVTTQRDYLAGITSTDITRRLLLPPEIVQAHDEGIIHFHDADYFAQNALTNCCLINLNDMLQNGTVINGVMIEKPHRFVTACTIATQIILGVSSSQYGGCTVTLTHLAPFVRDSYNRSLKKYQDRNLPEEECKKFAMQDTKKEIADGVQTFNYQVNSMTNTNGQAPFLSVNMYLGETDEYKDELAMIIEEFLKQRMLGFKNEKGVYITPAFPKLLYVLEEDNIHKDSKYWYLTELAAKCTAKRMVPDYISEKMMKKLKINQYGEGDCYPCMGCRSFLTPDRVKGNVAKAKDYVEGKGKYYGRFNQGVVTINLPDVALSSKKDEKEFWKIFDERLELCHEALQLRHKRLSGITSDVAPLLWQYGAYARLNKGEKLDKLLHGGYSTLSLGYAGLYECVKYMTGDSHTDGGKGEKFALEVMQHMNDKCAEWKKAEDIDYSLYGTPIESTTYKFAKCLKKRFGTVEGITDRNYITNSYHVPVFEEIDAFSKLKLESEFQRLSPGGAISYVETPNLQNNIEVVEQIIEFIYNNIMYAELNTKSDYCQKCGYTGEILIDDNLEWYCPNCGNRDHRTLNVARRTCGYIGTNFWNKGRTQEIKERVLHIDNKDFDAEKCTKCDENVEKPEKKTRAKVSAKEKAMASVHA

SEQ ID NO: 960 - protein, 783 aa, unidentified
  REGION 1..783: note = Description of Unknown: uncultivated organism sequence
  REGION 1..783: note = Category: MG60 effectors
  REGION 1..783: note = Description: MG60-173 effector
MMRVVKRDGKIVDFDESRIKIAIGKANNEVDESQRATEEEIEKIVEYVKKIKKDRILVEDIQDIIENKLMEYKRFELAKAYITYRYSRALVRKANTTDQTVKELVEGNSEYWNNENSNKNARVVTTQRDYLAGITSTDITRRLLLPPEIVKAHDEGIIHFHDADYFAQNALTNCCLINLNDMLQNGTVINGVMIEKPHRFVTACTIATQIILGVSSSQYGGCTVTLTHLAPFVRDSYNRSLKKYQDRNLPEEECKKFAMQDTKKEIADGVQTFNYQVNSMTNTNGQAPFLSVNMYLGETDEYKDELAMIIEEFLKQRMLGFKNEKGVYITPAFPKLLYVLEEDNIHKDSKYWYLTELAAKCTAKRMVPDYISEKMMKKLKINQYGEGDCYPCMGCRSFLTPDRVKGNVAKAKDYVEGKGKYYGRFNQGVVTINLPDVALSSKKDEKEFWKIFDERLELCHEALQLRHKRLSGITSDVAPLLWQYGAYARLDKGEKLDKLLHGGYSTLSLGYAGLYECVKYMTGDSHTDGGKGEKFALEVMQHMNDKCAEWKKAEDIDYSLYGTPIESTTYKFAKCLKKRFGTVEGITDRNYITNSYHVPVFEEIDAFSKLKLESEFQRLSPGGAISYVETPNLQNNIEVVEQIIEFIYNNIMYAELNTKSDYCQKCGYTGEILIDDNLEWYCPNCGNRDHRTLNVARRTCGYIGTNFWNKGRTQEIKERVLHIDNKDFDAEKCTKCDEEANVVSKCCNDSNESTECNKNVEKHEKKTRAKVSAKEKAMASVHA

SEQ ID NO: 961 - protein, 1222 aa, unidentified
  REGION 1..1222: note = Description of Unknown: uncultivated organism sequence
  REGION 1..1222: note = Category: MG60 effectors
  REGION 1..1222: note = Description: MG60-174 effector
MLESFKDLYEVRKTVRFSLLKQNYEDFCKFENNILKDISFLNSLLKFEDEIKNIQKSNGKKMQDLLSKDILEDIIKNSFQTLKNQICSVIYNKVVFDTKTSERNKRYLIYIKTETWENLDFFIPKDYNNNWNYIPEEDFYKVKDSEIWYAIKFISKLIIDNELIPFNEGKFRNKLKNINKYNSNFWNFFELNTLNPFTVNRWKISEIVNSYELSLSQYKETLEDLNKEASTIANTILSDRYFENCRNQNESDGTVRYLFHIFSNCKNSSEKNIWQINHLILLVNKYESLKNGKKKYTNDEIEPKIKRLNKELRQLAKVRSELLWYQIHLIDNFQTEKFSFLIQSWKYYFVGMKKIWWENNLSQFQEFIDGLEGGNDKLLYLDSMTWGWFKKLFLSKQSDVVFTDGTRIKDLNGSILAKEEEILQLKKWIIEKIEKDINTFISKVTNDIFNEINSKEKIKFIEYLSQKWKKVDNLFKLWKKNKKQLIYGKELKEFCNSLYNFDSIKETYNLTKLEKEYLNQVMILLQTIKDKKYKIGTVEKDLSFLWGGFVEKAFDILDDLKNYFNDLGYKVIQKDVDLEKMLKQVKTWELEIFQIKSKDMPFHQDFINDRNCWIIEEVKNEKSDGFKKDLNTLYFEEFFKDIKNNNRNSRIWADFKIRWINSSENNDYESFWKKEKNQLRHSNNKENIEKFKNRFKRDRYSIEFSINLNATNHLTEEDFNTKISNKLKEKRETWSLRILSLDHGESSFLTYKIYQVEGNKYSIINQGWNFDNFKEIQDWEDKTTKRQENIQIDEKAIPYKDQKILDNYITKYHAMIQDQKRERQVEEAIKHFARKSISKIKEIISADTVDKNKEWVSDITKANVKKFIQYAIGHKEVFSLSNEENSIRNKNKGSNKSIENKKNGVEYSKRIEEFFQNKRLDVISLWEDTIRFDKINIFHILDYEFHFSYIKQEEWFIQQFPDQENIKEKIDYYLNQIQELLDDENKLIAFCNEIKNSFDGKSLADIDKLYNTPFYAYKNNFSLQLEQINNLKKWYASVLVGTISKRIMNGEVDIIVLENNLLYYGVDNSESFQKHMWAENHATFAEALINKLSFCLDKETSESYQFCYPIKVTERPQKFKNKNNGILFFVDENTTSLICPKCDQKLNRSKQDGDDHLHHNNKNPAWDECKKEPFEIQKSKNIVGEYQGMLFHDWDDLATYNIAKKALEYLEYLESQNNDETK

SEQ ID NO: 962 - protein, 885 aa, unidentified
  REGION 1..885: note = Description of Unknown: uncultivated organism sequence
  REGION 1..885: note = Category: MG60 effectors
  REGION 1..885: note = Description: MG60-175 effector
MKIIKRDGTIVDYDPEKIRVAIGKANNEVSKKEKATEEDINNIISYIEDLKKSRILVEDIQDIIEKKLMEIGKYQLAKQYITYRYTRALVRKANTTDQSIKELIDGESEYWNTENSNKNARVVTTQRDYLAGITSTDITRRFLLPEDVVKAHDEGIIHFHDADYFAQNALHNCDLINLEDMLQNGTSINGVMIEKPHRFLTAMTIATQIITAVNSSQYGGVTVTMTHLAPFVRESYKRILKKYQDRKFSKEDCEKYAKEDLRKEVKDGVQTFQYQINSMTTTNGQAPFLSVCLYLGETEEYKEELAMIIEEVLKQRTLGMKNEKGVYITPAFPKLIYVLEEDNMHENSKYWYLTELAAKCTAKRMVPDYISEKKMLELKVDKNGEGHCYPCMGCRSFLTPYVDPKTNKPKYYGRFNQGVVTINLVDAALSSGKDMEKFWKLFDERLELCHKALKIRHERLSKATSDVAPILWQHGALARLKKGESIHPLLHGGYSTLSLGYAGLYECVKYMTGHSHTDNGVGKEFGLKVMQKLNDKCKEWKEQEDIDYSVYGTPIESTTYKFSKCLRKRFGKIKGITDRDYITNSYHVPVFEEIDAFSKLKLESEFQQLSPGGAISYVETPNLQDNLEVVLQIIKFIYNNIMYAELNTKSDYCQKCGYDGEILIDDNLEWYCPNCGNRDHDTLNVARRTCGYIGSNFWNKGRTLINLYLPEIIAFKRGMINMRYNKIRKMDIADGPGVRVSIFMQGCTFNCKNCFNPETHDFNGGKEFTDSTINRVLELCENENIEGLSILGGEPMNPKNIEGTTKLAKAFKQKFPDKNLWAWSGFRFDKELKDKEVVKYLDVLVDGQYMDDLHNPTLKWKGSSNQRVINVQESLKKNEVILMQS

SEQ ID NO: 963 - protein, 755 aa, unidentified
  REGION 1..755: note = Description of Unknown: uncultivated organism sequence
  REGION 1..755: note = Category: MG60 effectors
  REGION 1..755: note = Description: MG60-176 effector
MHELIEKREPKEEKPMKIIKRNGAEVVFDIDKIIMAVTKANDAVDEKVRMTPLQIERISQSVQIACEEMGRSPSVEEIQDLVEKAIMAHGAFEVAKEYITYRYTRSLLRQSNTTDDRILSLIECNNEEVKQENANKNPTINAVQRDYMAGEVSKDITSRILLPKEVVDAHEAGIIHFHDADYYAQHMHNCDLVNLEDMLQNGTVISGTLIEKPHSFSTACNIATQIIAQVASNQYGGQSISLTHLAPFVQVSREKIRKTVEREMAAFGVAPAEETISKVVEDRLREEVRRGVQTIQYQVVTLMTTNGQAPFITVFMYLNEAKSEQEKKDLAMIIEETLRQRYEGVKNEKGVWITPAFPKLIYVLEEDNVREGTPYWYLTRLAAQCTAKRMVPDYISEKKMREYKLSKGETPGHGDVYTCMGCRSFLTPDRSGNGWDNVARAGNYEPGKPKYYGRFNQGVVTINLVDVALSSGRDMTKFWEVFEDRLELCHRALRCRHERLKGTLSDAAPILWQYGALARLPKGEPIDKLLYGGYSTISLGYAGLYECVKYMTGKSHTDDEAKPFALSVMQKMNDKCLQWKTAENIDYSLYGTPLESTTYKFAKCLQKRFGLIPGITDKSYITNSYHVHVTEPIDAFTKLRFEAEFQQLSPGGAISYVEVPNMQNNIDAVLEVMQFIYDNIMYAELNTKSDYCQVCGYDGEIEIKEDDGKLVWVCPQCGNTDQNKMNVARRTCGYIGTQFWNQGRTQEIKDRVLHL

SEQ ID NO: 964 - protein, 768 aa, unidentified
  REGION 1..768: note = Description of Unknown: uncultivated organism sequence
  REGION 1..768: note = Category: MG60 effectors
  REGION 1..768: note = Description: MG60-177 effector
MFCSCKKNLRVVIYIYDATKTYDCAKKLIVYKSIIKGAEVMKIIKRNGAEETFDRQKIKDAIAKANNETDGTPELTDRQIDYISLVIEDHCNEMNRALSVEEIQELVETHIILQGAPETAKRYIRYRFTRNLARASNTTDNQILSLIECNNEEVKQENSNKNPTVNSVQRDYMAGEVSKDLTKRILLPEDIVKAHEEGLIHFHDADYFAQHMHNCDLVNLEDMLQNGTVISGTMIEKPHSFSTACNIATQIIAQVASNQYGGQSISLAHLAPFVQISREKITRQVRAEMEEFGIAADDEQVKSLVEKRVRDEIKRGVQTIQYQVVTLLTTNGQAPFVTVFMYLNEAKNEQEKKDLAIIIEEVLKQRIKGTKNEVGVWVTPAFPKLIYVLEEDNITEDSRFWYLTKLAAECTAKRMVPDYISEKIMLKLKIDKNGNGNCYTCMGCRSFLTPYVDENGKPKYYGRFNQGVVTINLVDVACTAARDGNKSEEKFWQVLDERLELCHRALQCRHERLEGTLSDAAPILWQYGALARLKKGEPIDKLLHGGYSTLSLGYAGLWECVYEITGKKLTEKEGEEFGLRVMQRLNDACAEWKAAENIDYSIYGTPLESTTYKFAKCLQNRFGIIKGVTDRNYITNSYHIHVTEKIDAFSKLELESKFQKLSPGGAISYVEVPNMQQNIPAVLEVMKFIYNNIMYAELNTKSDYCQVCGYDGEIQIVEEDGKLVWRCPNCGNEDQSKMNVARRTCGYIGSQFWNQGRTQEIKERVLHL

SEQ ID NO: 965 - protein, 1488 aa, unidentified
  REGION 1..1488: note = Description of Unknown: uncultivated organism sequence
  REGION 1..1488: note = Category: MG60 effectors
  REGION 1..1488: note = Description: MG60-178 effector
MKVNDSSLIDCYTRLPSHTARNIRELVESANLESRNALWREIDRFMTDISTAIQPFVFFIIGEWGEGKTTAFEGYLKFESEKANIQSTLISARTLFNCLKKIKEKEILESNVTSAILVAAILWAIVDEEKARGTKSYNIPDPRSLSIRDAVDYVYNALDCLFSSMKPSNKRLVVFIDEFEEILTIREEEIKDLIISGIVEFIEGKLGIISEKGKYAGMFHLVVSVTPAAYHMLGKDKRLTQLIGRFKRRIYRYQLKSITKEEAYRYIIAAIKYSFNRKQFDIPFSSPGIINTCYFITKGNLGALTQLFNILLTQSRSESPYKCKMYRIDYKRFLKYVKGKTIFVYGDEAKIIDEKFFNMLRMLEEELRNYPNIRRNNLINIFDIIWLLSVEYEPKSKLEIMRKLGLQEVDDVDTCVNILNGLFRARKRKMGKTIYEVYYVPWYSGIEEDLRKLFSEMSAILNLKLDDETIEKIIDLLTFYEISDDRLIPYLIWPAQETDSYYLVELTEGLIQEEEAIEIRRQFIKYVKDEGIRRDKMLIISHEILKNLYPAPEITYLDFIIDRNDRMRLWREARRELINNLLPEEKYINALSKLFENQSPLYGLKYGSEVFYLLEHSTGDVKYEIPTLIRVFVRPPDEEEINKFVKFLKNFMPPLTLIFHAHGFQKVQETIKITCGKVLELCTLQFVLLSQTTLLQLISYLKAIEEEKNSSHKRLLDEDKLKIRFKEIFEELEFPKIISEIIRDGIDKGWIIRDLDLQSTSDPSNLVDAFICFLSYPKRKMTIGDVWNFYKQLNELKIFGTKPGFSPRDIESYQQFYNYAQDLIKNGFLKIDGQYVEPVLTKIEERILKIIDNYDSSPIPISELKERFVTIAKTSNLFKDVFLNALEKRGIIEIRKNLLFKADIAERQEKLQRLYNTFKARIEKLKEEKIINVFRFVVSTKERGCNVIDPFEIEKFVDKIYHKVEYAQLSDENLFLRLATFLINFLNYHLNERIGIFTLINKAYNEALKERALFKQEIDNVKKKIHKIVVFLSSISHVPIEQIQLDELTTLKEIHYDVESVFSKSPGKSEVKDAVSKDSEAYKKFWIKRVKELRSSPIEYDFLNYGYYQLIKKKEKSKQLLLKIKDLISRIEEKERNIGERFNKLQEYLIRIEKMKSVDNENEFLGPSFSGELAQLLEKNIKSPTFYFKDIKNLTDVKSFLDNFLKEMIDIFENIRISVESLSNLQQSEFLIKKLYDFQAKKYNLSKKFLENSSYSQQLIELWTQFEKSISDQLKALKDEYEKELRIIKKTYIGSAVVSRIQELAKKISDKLISLKEKIQTNTKKILSLVKESIDELEKLYKRADQLYFAIEAVVGDSSKKKEAEYLHDEITVVSKEWKQLEKIFVAENSDSAEIIEFKKFLDMKSLLFSSLQKLEEILLTSGRLDNLDLKIFEITKEISEKEQTNIPISSIISYILNNVNQKLTENEILFKLYKLSNYGLIQINVVA

SEQ ID NO: 966 - protein, 756 aa, unidentified
  REGION 1..756: note = Description of Unknown: uncultivated organism sequence
  REGION 1..756: note = Category: MG60 effectors
  REGION 1..756: note = Description: MG60-179 effector
MQQSIFLVCVIIGLWFKKKRRSEVFIMKVIKRDGHIVDYSPDKIEEAVNKANLEVSEEDRVSDIQIRNIIKYIEGLHKKRMLVEDIQDVIEKRLMTLGKYELAKEYITYRYTRELVRRSNTTDKSIKELIDGESEYWNTENSNKNAKVVTTQRDYLAGITSTDITRRFLLPEDIVTAHDQGIIHFHDADYFAQNALHNCDLINLDDMLQNGTNINGVMIEKPHRFLTAMTIATQLITAVSSSQYGGCTITLTHLAPFVRSSKEFYLKKYKERKLTKAQIEKFAMEDLKKEITDGVQTFQYQINSMTTTNGQAPFLSVCMYLGETEEYKEELAMIIEEVLKQRMEGMKNEKGVYITPAFPKLLYVLEEENINPKGKYYYLTELAARCTAKRMVPDYISEKVMKENKINSLGNGDCFPCMGCRSFLTPDRMFNVGNISKALNYVENKGKYYGRFNQGVVTINLPDVALTSGKDMELFWKVFDDRLELCHRALQIRHKRLSKVTSDVAPILWQHGALARLEKGESIHELLHHGYSTISLGYAGLYECVKYMTGHSHTDNGKGHDFAIEVMQYMNDKCSEWKEAEDIDYSLYGTPIESTTYKFAKCLRDRFGKIKGITDRDYITNSYHVPVFEEIDAFTKLKLESEFQRLSPGGAISYIETPNLENNIDVVMEVINFIYENIMYAELNTKSDYCQKCGYSGEILLDDDLEWYCPECGNRDHDTLNVARRTCGYIGTNFWNKGRTQEIKERVVHIDNKDDE

SEQ ID NO: 967 - protein, 774 aa, unidentified
  REGION 1..774: note = Description of Unknown: uncultivated organism sequence
  REGION 1..774: note = Category: MG60 effectors
  REGION 1..774: note = Description: MG60-180 effector
MEKKIGRNDPCPCGSGKKFKHCCGKTPVLRALTQEEWEELYHSLNQRLIQYLRQPRFVDDFESAWDLYWDGEYEIEELNRLSKWEMGTFVNFLVFGYLLLSSNRSVIDHFLNKYRADLTLPERTMLDNMRKAFYGVYEVQEVRPGQGMKVKNIFDGTEFEIKEISGSKETVKWDVISGYICKIGEHYEFTGFINFVPRQIVGSLQAMLLNEHRMYQDEIESVNFSVFLKNNAFIVDQFIREYDAKPPVIVNKEGDEIVLCKLTYKIREKEKVLEWFASNSMFDIIPEKGKKTGDSRAHYTWWLKGDVARRLMYSKKEIKEPYSVFADVVIEKTSMTVELTSERRRDIAKTYLKKQLGNLIRLTKTEIKSLEEAQDEHKGDLNLHQSEHDELMMDPEVQKLIKQRMENYYYEEWVDKPIPALGGLTPIEAYSEAPDELEELLKTFEQQELRNKSNLNVYHLDVDKLRAHIAKMARESTADIPDSNFGEEEKLLVSGITYRIMQQFEIDPDKKNEFVIKEDRMGIFWIDEHPIIGVILDIRKNTITVDVLGITDKIISTDDVLYIFPPEKEDILLMTIDNMMRGIARGFEFYQQHNLELTSKAGRAFHAMITMLPEICELIIATVEKYSNKEVNITMKELRKDQCGKTVFIMKRKTLELAEEDFFRAILYPEKFFGPYLKLPQSKIKKFTDRFVRFIAYMASMCLFSLEYKRRYEFDDQRFDNLFFFVYDKQSKVLAEQLLPILEINGGCTPKNIERLKAYIPLHNFRLLRKVTIP

SEQ ID NO: 968 - protein, 1231 aa, unidentified
  REGION 1..1231: note = Description of Unknown: uncultivated organism sequence
  REGION 1..1231: note = Category: MG60 effectors
  REGION 1..1231: note = Description: MG60-181 effector
MSLKIEDLETFKRHRYAVSESLSTDIVGRDREIEEISSKIDSVYCLTITGPAGVGKSRLAVAAIEHYCANHTDFEVLCTKSFSDYISALDEAIEEGRKYVIFIDDANTYPRLIELLEFLKYRNQEGNIKAILTVRDYLKGCLDSDIYMEFYEVKPLNDKSIEDALVKNTTIRNEDWLKQIAKIANGNIRVAFLAANEAIKNNKSLDSIYNQKDVLNRFYKDEISKIDHSESLLITAGIIAFFKSIYLEQLFYIVPILKSVNLSKKSFIENVNILIKMEIVDNYHDVVKIADQCFADFLLNYTIVEKRYLKIKDLLLVGFKYYKERIVESIHTILHVYNTEEFVDHLRKEVTDACNNLEDDVSLKHGIESCFAQVIPEYVSREYIEGVEKYSDQKDIKWLINVFSGLAFSNYNEIANKGVLKLLKKTKNKTKEVYDAIKNTYEMRAERANERFQYQIALIKELQNGGLYNDEFNALVSSYLNFRFSYSCFTSKREMMHYTFSVDDNTAGILELRSACWGYLFNCELSKAIDSIMDFANRHYIERNLEIIKNDLRCINTYLCEHDQSGFLNSVLYVKFIDEAKEYCFTDLLTANKKYLDFLDIVFERKLLGKNYEGYEARYKNRVTDYYNLHKDDIYDILNETDLFLNKYYKYQKTRLVNALVEVVDKFSNALFFLCTKNGIFPHLVIEEFLKNRNLDEVYALINQIDDETIKDEYLYNFYSYLSKENIEKDYGFIGWINSKGDFKTNRTYHRDAVSLNNIAEKCGLDYVALLKKLYSKEKYNKFIAKAYLSYLIDNVETFKELLSLNQNLAIKIYEFLIANGEKDYESSVLIEILDVKRSYIKVFAKAFIKEEYYNDCNLDFIFEKEYCDSFFNECMKVMLSQKTNSASSKLRILISKNINQPNMERWIEKYIESNYKEDNVIELFFQALSEIDHQHKNAYLVLYYQKGHDINVLRQAILNKSHSYSNAKEHFGNEIKWLETLKKSLLNWNNTEEVKFIDTVIDDYKVQIKNDEIESLVDYGNQNILNELRERDLKTEVSLKDAFELYQSDEKFRDMLSSGYLSYKDGSFVNGKNDPVKFIEKLKDKKIISVEIKPVDEVGRLDYEQYLSSMKSIAKEFDNPKLASLNDYLNALIDERGWKAQEFKENTFLSRDIFSKIRNNKKNKMDKKTLVQILIGLQVSKRERDYLLELNQTSLSKYVKEDVLYSFILDAKLDIGVADELLRDIGEDGF

SEQ ID NO: 969 - protein, 755 aa, unidentified
  REGION 1..755: note = Description of Unknown: uncultivated organism sequence
  REGION 1..755: note = Category: MG60 effectors
  REGION 1..755: note = Description: MG60-182 effector
MHELIEKREPKEEKPMKIIKRNGAEVVFDIDKIIMAVTKANDAVDEKVRMTPLQIERISQSVQIACEEMGRSPSVEEIQDLVEKAIMAHGAFEVAKEYITYRYTRSLLRQSNTTDDRILSLIECNNEEVKQENANKNPTINAVQRDYMAGEVSKDITSRILLPKEVVDAHEAGIIHFHDADYYAQHMHNCDLVNLEDMLQNGTVISGTLIEKPHSFSTACNIATQIIAQVASNQYGGQSISLTHLAPFVQVSREKIRKTVEREMAAFGVAPAEETISKVVEDRLREEVRRGVQTIQYQVVTLMTTNGQAPFITVFMYLNEAKSEQEKKDLAMIIEETLRQRYEGVKNEKGVWITPAFPKLIYVLEEDNVREGTPYWYLTRLAAQCTAKRMVPDYISEKKMREYKLSKGETPGHGDVYTCMGCRSFLTPDRSGNGWDNVARAGNYEPGKPKYYGRFNQGVVTINLVDVALSSGRDMTKFWEVFEDRLELCHRALRCRHERLKGTLSDAAPILWQYGALARLPKGEPIDKLLYGGYSTISLGYAGLYECVKYMTGKSHTDDEAKPFALSVMQKMNDKCLQWKTAENIDYSLYGTPLESTTYKFAKCLQKRFGLIPGITDKSYITNSYHVHVTEPIDAFTKLRFEAEFQQLSPGGAISYVEVPNMQNNIDAVLEVMQFIYDNIMYAELNTKSDYCQVCGYDGEIEIKEDDGKLIWVCPQCGNTDQNKMNVARRTCGYIGTQFWNQGRTQEIKDRVLHL

SEQ ID NO: 970 - protein, 768 aa, unidentified
  REGION 1..768: note = Description of Unknown: uncultivated organism sequence
  REGION 1..768: note = Category: MG60 effectors
  REGION 1..768: note = Description: MG60-183 effector
MFCSCKKKLCVVIYIYNATKTYDCAKKLIVYKSIIKGAEVMKIIKRNGAEETFDRQKIKDAIAKANNETDGTPELTDRQIDYISLVIEDHCNEMNRALSVEEIQELVETHIILQGAPETAKRYIRYRFTRNLARASNTTDNQILSLIECNNEEVKQENSNKNPTVNSVQRDYMAGEVSKDLTKRILLPEDIVKAHEEGLIHFHDADYFAQHMHNCDLVNLEDMLQNGTVISGTMIEKPHSFSTACNIATQIIAQVASNQYGGQSISLAHLAPFVQISREKITRQVRAEMEEFGIDADDEQVKSLVEKRVRDEIKRGVQTIQYQVVTLLTTNGQAPFVTVFMYLNEAKNEQEKKDLAIIIEEVLKQRIKGTKNEVGVWVTPAFPKLIYVLEEDNITEDSRFWYLTKLAAECTAKRMVPDYISEKIMLELKIDKNGNGNCYTCMGCRSFLTPYVDENGKPKYYGRFNQGVVTINLVDVACTAARDGNKSEEKFWQVLDERLELCHRALQCRHERLEGTLSDAAPILWQYGALARLKKGEPIDKLLHGGYSTLSLGYAGLWECVYEITGKKLTEKEGEEFGLRVMQRLNDACAEWKAAENIDYSIYGTPLESTTYKFAKCLQNRFGIIKGVTDRNYITNSYHIHVTEKIDAFSKLELESKFQKLSPGGAISYVEVPNMQQNIPAVLEVMKFIYNNIMYAELNTKSDYCQVCGYDGEIQIVEEDGKLVWRCPNCGNEDQSKMNVARRTCGYIGSQFWNQGRTQEIKERVLHL

SEQ ID NO: 971 - protein, 750 aa, unidentified
  REGION 1..750: note = Description of Unknown: uncultivated organism sequence
  REGION 1..750: note = Category: MG60 effectors
  REGION 1..750: note = Description: MG60-184 effector
MVKKFLSKGAYHYQNNFFNDKIGFVILGGNMMRVIKRNGHTVDFDATKIENAILKAMKCGSGIIDEQCAKDIAREIEEWHRYSDGDISIYRIEGQVFEKLIEKGQILTAKAYEGYRKVREFQRETNTIDNEIYGIVNQTNKEAMEENSNKDATVLATQRDLIAGEFSKDYCRRLLLPPKIVQAHDDGIIHFHDMDYYIQKMHNCDLVNLKDMFAQGTVINDKLIETPKSLQTACTVATQIVQQVANGQYGGQTISLAHLSPYVRISYEKHKKNVINEGKMIGIDYSDEQIEKIAKSRLKDEIKAGIQTIQYQINTFSTTNGQAPFLSVFMYLKEEPEYIEETAMLIEETLRQRYVGMKNPVGAYVTPAFPKLLYVLDDNNVPQDSKYRYLTDLAVKCVAKRMMPDFISAKIMRENYEGQVFPCMGCRSFLSPWKDENGEYKWYGRFNQGVVTLNLADAGLSADHNLDNFWKILDERLELCKEALLLRHESLKGTIADVSPIHWRYGALARLKSGEKIDKLLENGYSTISLGYIGLYECVVALIGQTHTSKEGNELATKIMERLREACDSWKEETGLGFGLYGTPAESTTYTFARALKKRFGIVPGVTDKDYLTNSYHVNVREHIDAFSKLEVEAKFQKLSSGGAISYVEVTNMSQNLDALSALIDYMYETIQYAEINTKSDYCQECGFDGEILLDENREWYCPNCGNRNHKTLNVCRRTCGYLGDNFWNQGRTQEIAERFVHLDNHLYGE

SEQ ID NO: 972 - protein, 768 aa, unidentified
  REGION 1..768: note = Description of Unknown: uncultivated organism sequence
  REGION 1..768: note = Category: MG60 effectors
  REGION 1..768: note = Description: MG60-185 effector
MFCSCKKKLCVVIYIYNATKTYDCAKKLIVYKSIIKGAEVMKIIKRNGAEETFDRQKIKDAIAKANNETDGTPELTDRQIDYISLVIEDHCNEMNRALSVEEIQELVETHIILQGAPETAKRYIRYRFTRNLARASNTTDNQILSLIECNNEEVKQENSNKNPTVNSVQRDYMAGEVSKDLTKRILLPEDIVKAHEEGLIHFHDADYFAQHMHNCDLVNLEDMLQNGTVISGTMIEKPHSFSTACNIATQIIAQVASNQYGGQSISLAHLAPFVQISREKITRQVRAEMEEFGIAADDEQVKSLVEKRVRDEIKRGVQTIQYQVVTLLTTNGQAPFVTVFMYLNEAKNEQEKKDLAIIIEEVLKQRIKGTKNEVGVWVTPAFPKLIYVLEEDNITEDSRFWYLTKLAAECTAKRMVPDYISEKIMLKLKIDKNGNGNCYTCMGCRSFLTPYVDENGKPKYYGRFNQGVVTINLVDVACTAARDGSKNEEKFWQVLDERLELCHRALQCRHERLEGTLSDAAPILWQYGALARLKKGEPIDKLLHGGYSTLSLGYAGLWECVYEITGKKLTEKEGEEFGLRVMQRLNDACAEWKAAENIDYSIYGTPLESTTYKFAKCLQNRFGIIKGVTDRNYITNSYHIHVTEKIDAFSKLELESKFQKLSPGGAISYVEVPNMQQNIPAVLEVMKFIYNNIMYAELNTKSDYCQVCGYDGEIQIVEEDGKLVWRCPNCGNEDQSKMNVARRTCGYIGSQFWNQGRTQEIKERVLHL

SEQ ID NO: 973 - protein, 755 aa, unidentified
  REGION 1..755: note = Description of Unknown: uncultivated organism sequence
  REGION 1..755: note = Category: MG60 effectors
  REGION 1..755: note = Description: MG60-186 effector
MHELIEKREPKEEKPMKIIKRNGAEVVFDIDKIIMAVTKANDAVDEKVRMTPLQIERISQSVQIACEEMGRSPSVEEIQDLVEKAIMAHGAFEVAKEYITYRYTRSLLRQSNTTDDRILSLIECNNEEVKQENANKNPTINAVQRDYMAGEVSKDITSRILLPKEVVDAHEAGIIHFHDADYYAQHMHNCDLVNLEDMLQNGTVISGTLIEKPHSFSTACNIATQIIAQVASNQYGGQSISLTHLAPFVQVSREKIRKTVEREMAAFGVAPAEETISKVVEDRLREEVRRGVQTIQYQVVTLMTTNGQAPFITVFMYLNEAKSEQEKKDLAMIIEETLRQRYEGVKNEKGVWITPAFPKLIYVLEEDNVREGTPYWYLTRLAAQCTAKRMVPDYISEKKMREYKLSKGETPGHGDVYTCMGCRSFLTPDRSGNGWDNVARAGNYEPGKPKYYGRFNQGVVTINLVDVALSSGRDMTKFWEVFEDRLELCHRALRCRHERLKGTLSDAAPILWQYGALARLPKGEPIDKLLYGGYSTISLGYAGLYECVKYMTGKSHTDDEAKPFALSVMQKMNDKCLQWKTAENIDYSLYGTPLESTTYKFAKCLQKRFGLVPGITDKSYITNSYHVHVTEPIDAFTKLRFEAEFQQLSPGGAISYVEVPNMQNNIDAVLEVMQFIYDNIMYAELNTKSDYCQVCGYDGEIEIKEDDGKLIWVCPQCGNTDQNKMNVARRTCGYIGTQFWNQGRTQEIKDRVLHL

SEQ ID NO: 974 - protein, 755 aa, unidentified
  REGION 1..755: note = Description of Unknown: uncultivated organism sequence
  REGION 1..755: note = Category: MG60 effectors
  REGION 1..755: note = Description: MG60-187 effector
MHELIEKREPKEEKPMKIIKRNGAEVVFDIDKIIMAVTKANDAVDEKVRMTPLQIERISQSVQIACEEMGRSPSVEEIQDLVEKAIMAHGAFEVAKEYITYRYTRSLLRQSNTTDDRILSLIECNNEEVKQENANKNPTINAVQRDYMAGEVSKDITSRILLPKEVVDAHEAGIIHFHDADYYAQHMHNCDLVNLEDMLQNGTVISGTLIEKPHSFSTACNIATQIIAQVASNQYGGQSISLTHLAPFVQVSREKIRKTVEREMAAFGVAPAEETISKVVEDRLREEVRRGVQTIQYQVVTLMTTNGQAPFITVFMYLNEAKSEQEKKDLAMIIEETLRQRYEGVKNEKGVWITPAFPKLIYVLEEDNVREGTPYWYLTRLAAQCTAKRMVPDYISEKKMREYKLSKGETPGHGDVYTCMGCRSFLTPDRSGNGWDKVARAGNYEPGKPKYYGRFNQGVVTINLVDVALSSGRDMTKFWEVFEDRLELCHRALRCRHERLKGTLSDAAPILWQYGALARLPKGEPIDKLLYGGYSTISLGYAGLYECVKYMTGKSHTDDEAKPFALSVMQKMNDKCLQWKTAENIDYSLYGTPLESTTYKFAKCLQKRFGLVPGITDKSYITNSYHVHVTEPIDAFTKLRFEAEFQQLSPGGAISYVEVPNMQNNIDAVLEVMQFIYDNIMYAELNTKSDYCQVCGYDGEIEIKEDDGKLIWVCPQCGNTDQNKMNVARRTCGYIGTQFWNQGRTQEIKDRVLHL

SEQ ID NO: 975 - protein, 755 aa, unidentified
  REGION 1..755: note = Description of Unknown: uncultivated organism sequence
  REGION 1..755: note = Category: MG60 effectors
  REGION 1..755: note = Description: MG60-188 effector
MHELIEKREPKEEKPMKIIKRNGAEVVFDIDKIIMAVTKANDAVDEKVRMTPLQIERISQSVQIACEEMGRSPSVEEIQDLVEKAIMAHGAFEVAKEYITYRYTRSLLRQSNTTDDRILSLIECNNEEVKQENANKNPTINAVQRDYMAGEVSKDITSRILLPKEVVDAHEAGIIHFHDADYYAQHMHNCDLVNLEDMLQNGTVISGTLIEKPHSFSTACNIATQIIAQVASNQYGGQSISLTHLAPFVQVSREKIRKTVEREMAAFGVAPAEETISKVVEDRLREEVRRGVQTIQYQVVTLMTTNGQAPFITVFMYLNEAKSEQEKKDLAMIIEETLRQRYEGVKNEKGVWITPAFPKLIYVLEEDNVREGTPYWYLTRLAAQCTAKRMVPDYISEKKMREYKLSKGETPGHGDVYTCMGCRSFLTPDRSGNGWDNVARAGNYEPGKPKYYGRFNQGVVTINLVDVALSSGRDMTKFWEVFEDRLELCHRALRCRHERLKGTLSDAAPILWQYGALARLPKGEPIDKLLYGGYSTISLGYAGLYECVKYMTGKSHTDDEAKPFALSVMQKMNDKCLQWKTAENIDYSLYGTPLESTTYKFAKCLQKRFGLVPGITDKSYITNSYHVHVTEPIDAFTKLRFEAEFQQLSPGGAISYVEVPNMQSNIDAVLEVMQFIYDNIMYAELNTKSDYCQVCGYDGEIEIKEDDGKLVWVCPQCGNTDQNKMNVARRTCGYIGTQFWNQGRTQEIKDRVLHL

SEQ ID NO: 976 - protein, 773 aa, unidentified
  REGION 1..773: note = Description of Unknown: uncultivated organism sequence
  REGION 1..773: note = Category: MG60 effectors
  REGION 1..773: note = Description: MG60-189 effector
MSAAYGITIFSVRRVDFACQSPTTGHRKGLTSMKIIKRNGSEAVFDIMKIITAVTKANNVVKEDEQLTPMQIRRIAESVENSCLGMNRALSVEEIQDLVEHQIMAHGAYEVAKQYITYRYTRSLVRKSNTTDEKILSLIESNNEEVKQENSNKNPTVNAVQRDYMAGEVSKDLTARMLLPKEIVDAHEAGIIHFHDADYFAQHMHNCDLVNLEDMLQNGTVISGTLIEKPHSFSTACNISTQIIAQIASNQYGGQSISLTHLAPFVDISRQKIRKTVLEEIRTLGAAPDEAAISKVVEDRLREEIRRGVQTIQYQVVTLMTTNGQAPFITVFMYLGEARNEQEKHDLAIIIEETLKQRIEGVKNEKGVWITPAFPKLIYVLEEDNIHEGTKYWELTKLAARCTAKRMVPDYISEKKMRELKLSKGETPGHGDVYTCMGCRSFLTPDRSGNGWNNIANAGNYEPGKPKYYGRFNQGVVTINLVDVALSSGGAVDKFWRIFDERLELCYEALMCRHNRLKGTLSDAAPILWQYGALARLGKGEPIDKLLYGGYSTISLGYAGLYECVKYMTGKSHTDPAATPFALEVMQHMNDKCAEWKQKENIDFSLYGTPLESTTYKFAKCLQKRFGLVEGITDKNYITNSYHIHVSEHVNAFDKLAFESQFQALSPGGAISYVEVPNMQSNIDAVLQVMQFIYENIMYAELNTKSDYCQICGFDGEIEIKEDKDGKLVWTCPQCGNTDQSKMNVARRTCGYIGTQYWNQGRTQEIRDRVLHL

SEQ ID NO: 977 - protein, 896 aa, unidentified
  REGION 1..896: note = Description of Unknown: uncultivated organism sequence
  REGION 1..896: note = Category: MG60 effectors
  REGION 1..896: note = Description: MG60-191 effector
MAKTSTFAEATKRNVLEFARYKDFDRSLVQLGRRGGKYQKAADRIDSVLGKASRGESNPFHGLKVTKHGENRVDKCVKYDLGDGIRLITIQDSGVVLFCFAGTHTECDEWLDRNRGSTLIRDSKGQIKLNPLNIVKEGFAGFREPLKPITGKLYELIKPDYYFDKLVDSLPRSVVREIEGLEAWASDEDLLAIAERIDDQEVSDAFLDVFALLKKDEIEKAVERIRLFMGESQPIAMLTKEEIAALAESDQIRKISPNDPNYPEVLRHFARHGSYMDWMLYLHPDQQDIVDRTFSGPAKLVGVSGSGKTCVIVKRAIRLARDNPDEKVLVLTLNRQLARLIEDMVEAAAVEEIASRVLVLPLFRLCQELLHRFEPKNDRLYDDITWKSHEHIDEIWREFYRCELNNNDAAVLLPLHDSLISRGIDAEEYIREEFDWIRSAFPPDRRTDYLHAERVGRSYPLDKRFRAIILEGLEAWELKMKHIGVTDYLGLSTALNRHLDKLHEEYRFVLIDESQDFGTIEFRLVRRLTMEGQDSLFLCGDAAQQVQTKHGSLRDAGINIPSARSIRLTKNYRNSREILSAAYEVLVNNLSEEMLDSPDFDVLDPEHGNFSSSAPLILEADSLEEEIAYAREFVEDVVENKGEQKCCIALCGYSLYQIQEFGKRIGVPVLDGNIVVGKEDLYLSDLEHTKGFEFDAMLILNCKHGVIPNPGVPEKEQYRDLARFYVAMTRAKNHLVLSFSSTQSPYLVGVDEYFLSERWENYIDRERLRIVGVPLTIDEIRADHEQIEHVPDLLDMSGTEFLYTRHAIGLSSLLIDKLRRLIAGSKTRGAGGKQTPIGWRSIRAAAHDIEVYPGSRQVFGAEGLRQFRELVEKISEIDETSEQSPACPNWRPTKKR

SEQ ID NO: 978 - protein, 1025 aa, unidentified
  REGION 1..1025: note = Description of Unknown: uncultivated organism sequence
  REGION 1..1025: note = Category: MG60 effectors
  REGION 1..1025: note = Description: MG60-192 effector
MEKFKNIFEVRKALRFELKASKITRENLEKENIYKNPVNILYKNKLEKWLNYSRTVFENDLKYFLDNSKNIILNLEKIKNLLDNTRFSEIFVEKKIFELIDKDFYIKFAKNKLSWWRSSSLQEIKKNLDWKWINLIKNYYLEIFENIENLIISIENLSEKESSFSKNEIKKFLRKISLEFIRIYNFLEKFDIKNKDFNKNLKEYIKKVINFKTFFEEIKSYYFISENQSSWILVRRFWFNEKSLKRRQPKEIKEELEENLKSFNEKLEIKEKLEEERQKLIQDFDLKLKTEKFEELLHPEKWSEIRKKKEKTKEEQEKLDDIDNQFKELKKLRNKDEEISKKTQELNRYKKDLWNLKVKINNLEKELENNLALTHYAKLLTNEINWEKLYYLVLIPIENKFILDEYISDEWNLEILEYNTLTFSALKKLALSYDWTMGIYWDKKEEINKKSNLKRWIVDLYIDLENWERQEEFYKIKRYVINLIKTYKNIFGNIYFDFKRLYDTKSLDEFKIEFDKQWYNLKWKNIDLEIIKKLEKEWKLEFYQIYNKDFYKNPDFFDIPYSIKEQKEERQRRRKSQNVKWNNNLFTIYWENFINDIANWNEEVRLNSDCWYFVKLKKEDKENHRYDRNKIIWNFGLIFNPGKKLTKKYDEKENIKKFNEIYKKEIKKVKNKSFIWIDRWEKELLTFCLIDENWNCIKNKNWEYIIWDFNLINNKWDFIPKDKCKYIDISWKEYKDLLGNFLPDFTHPENIISWKKSFQFDDEKNLYYFKLNHNARLYLLEWENKRYKIVNKEWKEIFLKDENWNNVIDYYLLFQSEVYKRHILKKTWNIKLEDVQELRWWYISNIIKQLNNWIVKYNWIIILENLDKTQIDEKWNIYKTNKEKVLEKTLWATIYQEIETLLNRKYNYFIFKDQDIWWLQLTPKVNNISDIKNLEKSKKNVNLWNIVFIDEYLTSKECPICKNQLFRDKKKWDNVYHNEKYPWNNWCSFDTRTNTYWFDFIKSWDDLAAYNIAKKGKEYIENLSN

SEQ ID NO: 979 - protein, 755 aa, unidentified
  REGION 1..755: note = Description of Unknown: uncultivated organism sequence
  REGION 1..755: note = Category: MG60 effectors
  REGION 1..755: note = Description: MG60-193 effector
MHELIEKREPKEEKPMKIIKRNGAEVVFDIDKIIMAVTKANDAVDEKVRMTPLQIERISQSVQIACEEMGRSPSVEEIQDLVEKAIMAHGAFEVAKEYITYRYTRSLLRQSNTTDDRILSLIECNNEEVKQENANKNPTINAVQRDYMAGEVSKDITSRILLPKEVVDAHEAGIIHFHDADYYAQHMHNCDLVNLEDMLQNGTVISGTLIEKPHSFSTACNIATQIIAQVASNQYGGQSISLTHLAPFVQVSREKIRKTVEREMAAFGVAPAEETISKVVEDRLREEVRRGVQPIQYQVVTLMTTNGQAPFITVFMYLNEAKSEQEKKDLAMIIEETLRQRYEGVKNEKGVWIAPAFPKLIYVLEEDNVREGTPYWYLTRLAAQCTAKRMVPDYISEKKMREYKLSKGETPGHGDVYTCMGCRSFLTPDRSGNGWDNVARAGNYEPGKPKYYGRFNQGVVTINLVDVALSSGRDMTKFWEIFEDRLELCHRALRCRHERLKGTLSDAAPILWQYGALARLPKGEPIDKLLYGGYSTISLGYAGLYECVKYMTGKSHTDDEAKPFALSVMQKMNDKCLQWKTAENIDYSLYGTPLESTTYKFAKCLQKRFGLIPGITDKSYITNSYHVHVTEPIDAFTKLRFEAEFQQLSPGGAISYVEVPNMQNNIDAVLEVMQFIYDNIMYAELNTKSDYCQVCGYDGEIEIKEDDGKLVWVCPQCGNTDQNKMNVARRTCGYIGTQFWNQGRTQEIKDRVLHL

SEQ ID NO: 980 - protein, 768 aa, unidentified
  REGION 1..768: note = Description of Unknown: uncultivated organism sequence
  REGION 1..768: note = Category: MG60 effectors
  REGION 1..768: note = Description: MG60-194 effector
MFCSCKKKLCVVIYIYDATKTYDCAKKLIVYKSIIKGAEVMKIIKRNGAEETFDRQKIKDAIAKANNETDGTPELTDRQIDYISLVIEDHCNEMNRALSVEEIQELVETHIILQGAPETAKRYIRYRFTRNLARASNTTDNQILSLIECNNEEVKQENSNKNPTVNSVQRDYMAGEVSKDLTKRILLPEDIVKAHEEGLIHFHDADYFAQHMHNCDLVNLEDMLQNGTVISGTMIEKPHSFSTACNIATQIIAQVASNQYGGQSISLAHLAPFVQISREKITRQVRAEMEEFGIDADDEQVKSLVEKRVRDEIKRGVQTIQYQVVTLLTTNGQAPFVTVFMYLNEAKNEQEKKDLAIIIEEVLKQRIKGTKNEVGVWVTPAFPKLIYVLEEDNITEDSRFWYLTKLAAECTAKRMVPDYISEKIMLELKIDKNGNGNCYTCMGCRSFLTPYVDENGKPKYYGRFNQGVVTINLVDVACTAARDGNKSEEKFWQVLDERLELCHRALQCRHERLEGTLSDAAPILWQYGALARLKKGEPIDKLLHGGYSTLSLGYAGLWECVYEITGKKLTEKEGEEFGLRVMQRLNDACAEWKAAENIDYSIYGTPLESTTYKFAKCLQNRFGIIKGVTDRNYITNSYHIHVTEKIDAFSKLELESKFQKLSPGGAISYVEVPNMQQNIPAVLEVMKFIYNNIMYAELNTKSDYCQVCGYDGEIQIVEEDGKLVWRCPNCGNEDQSKMNVARRTCGYIGSQFWNQGRTQEIKERVLHL

SEQ ID NO: 981 - protein, 755 aa, unidentified
  REGION 1..755: note = Description of Unknown: uncultivated organism sequence
  REGION 1..755: note = Category: MG60 effectors
  REGION 1..755: note = Description: MG60-195 effector
MHELIEKREPKEEKPMKIIKRNGAEVVFDIDKIIMAVTKANDAVDEKVRMTPLQIERISQSVQIACEEMGRSPSVEEIQDLVEKAIMAHGAFEVAKEYITYRYTRSLLRQSNTTDDRILSLIECNNEEVKQENANKNPTINAVQRDYMAGEVSKDITSRILLPKEVVDAHEAGIIHFHDADYYAQHMHNCDLVNLEDMLQNGTVISGTLIEKPHSFSTACNIATQIIAQVASNQYGGQSISLTHLAPFVQVSREKIRKTVEREMAAFGVAPAEETISKVVEDRLREEVRRGVQPIQYQVVTLMTTNGQAPFITVFMYLNEAKSEQEKKDLAMIIEETLRQRYEGVKNEKGVWIAPAFPKLIYVLEEDNVREGTPYWYLTRLAAQCTAKRMVPDYISEKKMREYKLSKGETPGRGDVYPCMGCRSFLTPDRSGNGWDNVARAGNYEPGKPKYYGRFNQGVVTINLVDVALSSGRDMTKFWEIFEDRLELCHRALRCRHERLKGTLSDAAPILWQYGALARLKKGEKIDKLLYGGYSTISLGYAGLYECVKYMTGKSHTDDEAKPFALSVMQKMNDKCLQWKTAENIDYSLYGTPLESTTYKFAKCLQKRFGLIPGITDKSYITNSYHVHVTEPIDAFTKLRFEAEFQQLSPGGAISYVEVPNMQNNIDAVLEVMQFIYDNIMYAELNTKSDYCQVCGYDGEIEIKEDDGKLVWVCPQCGNTDQNKMNVARRTCGYIGTQFWNQGRTQEIKDRVLHL

SEQ ID NO: 982 - protein, 817 aa, unidentified
  REGION 1..817: note = Description of Unknown: uncultivated organism sequence
  REGION 1..817: note = Category: MG60 effectors
  REGION 1..817: note = Description: MG60-196 effector
MAETLICTQCGSHKLKKLSDTQYVCDSCGTTTDLDLFNNEIGLKLNLAMTTRQTAKFDEAKSLYEQVKSILRPDQCAPEVYFGLFACEYKVLFELDNRTGNRVPIFYSSSESNVFDNKNLKKALEQARDVSFSKFEEYNELAMKVEAARMSYQKLSKLVTPFDIFICFKKTDLDGISDTRDYSTAMSLYSKLVDKFPKYHIFFSEKTLAEIPLTEYEPNIYYALHTSKILMVVSSKRDYLESQWVKNEWTRFLAINKANAIIPIYLKGTNVNIFPSEILKNNAYEEGDYDRIFTSIDSIMNSERYVKERDAEKKRKKDEIFEEVQKRLSKSFNAPNSNLSNMFKRMINDLSDGVFENAQKICDSIFNVDAEHPLAWLYSYLIDKKLTSLEQLKDQYESNWTEDRAIKKAIEFSKIDGYQDERNKIEDELYKWISYMVTEAIDLTHRKKYDDARSKLVKVATHVEEFGRDHRFDYFYHNFLLEMNCTNTNDLVSLQGIEKNAYFSKALKYANENQHIQLDEIIKVAKDNASKYQEQIIKNNTQLEASFAKLDLAVKSKFDEGNKLIELCHENEKEAKIKIKNFEDEAKKSKEQVILQKAEIIEKKAELAKYYSSRSEKMSRFLCNIRAIILGTVTYSILFIYAPGTVILSFTFIIPLLIIAILFNFINISIHKRQRDGRTIKGFVIFGIISGMILLNIPLLIGYSRNRYYKKIDSKTRKLDNDIYSKDQQLKTIEDKKQIDIKSEKEFIDRRMQYAKKVTEIMDTITSRSNQLKKDYPIFSLDKGITLKVKLEKDMNMFKESMVKLDEQIYDISHIAF

SEQ ID NO: 983 - protein, 755 aa, unidentified
  REGION 1..755: note = Description of Unknown: uncultivated organism sequence
  REGION 1..755: note = Category: MG60 effectors
  REGION 1..755: note = Description: MG60-197 effector
MHELIEKREPKEEKPMKIIKRNGAEVVFDIDKIIMAVTKANDAVDEKVRMTPLQIERISQSVQIACEEMGRSPSVEEIQDLVEKAIMAHGAFEVAKEYITYRYTRSLLRQSNTTDDRILSLIECNNEEVKQENANKNPTINAVQRDYMAGEVSKDITSRILLPKEVVDAHEAGIIHFHDADYYAQHMHNCDLVNLEDMLQNGTVISGTLIEKPHSFSTACNIATQIIAQVASNQYGGQSISLTHLAPFVQVSREKIRKTVEREMAAFGVAPAEETISKVVEDRLREEVRRGVQTIQYQVVTLMTTNGQAPFITVFMYLNEAKSEQEKKDLAMIIEETLRQRYEGVKNEKGVWITPAFPKLIYVLEEDNVREGTPYWYLTRLAAQCTAKRMVPDYISEKKMREYKLSKGETPGHGDVYTCMGCRSFLTPDRSGNGWDNVARAGNYEPGKPKYYGRFNQGVVTINLVDVALSSGRDVTKFWEVFEDRLELCHRALRCRHERLKGTLSDAAPILWQYGALARLPKGEPIDKLLYGGYSTISLGYAGLYECVKYMTGKSHTDDEAKPFALSVMQKMNDKCLQWKTAENIDYSLYGTPLESTTYKFAKCLQKRFGLVPGITDKSYITNSYHVHVTEPIDAFTKLRFEAEFQQLSPGGAISYVEVPNMQNNIDAVLEVMQFIYDNIMYAELNTKSDYCQVCGYDGEIEIKEDDGKLIWVCPQCGNTDQNKMNVARRTCGYIGTQFWNQGRTQEIKDRVLHL

SEQ ID NO: 984 - protein, 755 aa, unidentified
  REGION 1..755: note = Description of Unknown: uncultivated organism sequence
  REGION 1..755: note = Category: MG60 effectors
  REGION 1..755: note = Description: MG60-198 effector
MHELIEKREPKEEKPMKIIKRNGAEVVFDIDKIIMAVTKANDAVDEKVRMTPLQIERISQSVQIACEEMGRSPSVEEIQDLVEKAIMAHGAFEVAKEYITYRYTRSLLRQSNTTDDRILSLIECNNEEVKQENANKNPTINAVQRDYMAGEVSKDITSRILLPKEVVDAHEAGIIHFHDADYYAQHMHNCDLVNLEDMLQNGTVISGTLIEKPHSFSTACNIAAQIIAQVASNQYGGQSISLTHLAPFVQVSREKIRKTVEREMAVFGVSPAEETISKVVEDRLREEVRRGVQTIQYQVVTLMTTNGQAPFITVFMYLNEAKNEQEKKDLAMIIEETLRQRYEGVKNEKGVWITPAFPKLIYVLEEDNVREGTPYWYLTRLAAQCTAKRMVPDYISEKKMREYKLSKGETPGHGDVYTCMGCRSFLTPDRSGNGWDNVARAGNYEPGKPKYYGRFNQGVVTINLVDVALSSGRDMTKFWEVFEDRLELCHRALRCRHERLKGTLSDAAPILWQYGALARLPKGEPIDKLLYGGYSTISLGYAGLYECVKYMTGKSHTDDEAKPFALSVMQKMNDKCLQWKTAENIDYSLYGTPLESTTYKFAKCLQKRFGLIPGITDKSYITNSYHVHVTEPIDAFTKLRFEAEFQQLSPGGAISYVEVPNMQNNIDAVLEVMQFIYDNIMYAELNTKSDYCQVCGYDGEIEIKEDDGKLIWVCPQCGNTDQNKMNVARRTCGYIGTQFWNQGRTQEIKDRVLHL

SEQ ID NO: 985 - protein, 832 aa, unidentified
  REGION 1..832: note = Description of Unknown: uncultivated organism sequence
  REGION 1..832: note = Category: MG60 effectors
  REGION 1..832: note = Description: MG60-199 effector
MSLSFFATCPKGLENLLLKELVSLGATEVKETVAGVSFKGDFALGMRVCMWTRLASRVLLEISEFYAGTDTDLYLGALAVDYEKYFEVSNTIAVSFKGTSEAIRNTQYGALKIKDAVCDYFLKRNGIRPNVDKDNPDILITCHLDRKDNAHLLFDLSGNALHMRDFNRHTGMAPLKENLACAMLLRSGYNGSNLVDPMCGSGTLLLEAAAMATDTAPGICRDHYGFLQLKLCDRSAYTSLVEEMHKRSREGMLKFKQSGYKLFGFDADERIIDIALENAKKSGFADIIQFQVQSVETLVNPFDDLNDETQNKNAPSFFVITNPPYGQRMGNFNELISLYTKLGAVFKEQFRGAVCAVISSSEDLLSCLRLHADKIYKLYNGELLCQLRIFSIRQGEEGSESLSKDNLATDFANRLRKNLLKMNKWAKTLGLEAYRVYDADVPEYAAAIDYYKGYYVISTYKAQNKVSEKIEKRHELDMLGATIEVTGVSGSKVILKSREVKKGNSQYERLREDNSALIEIREGPFAFKVNLYDYLDTGLFLDGRLIRQYLYEHASNCSVLNLFAYTCSASVAAALGGASLITSVDMSKTYLEWGYENFLLNQIEAHSHEFIQADVLAFVSKDPEHKYDLIYVDPPTFSNSKRMQNTFDVRRDHLQLLGNLTRFLRDGAEVVFCTNLRSFRIDERLDEFGYSVTDLSSKTLPFDFKRNEHIHHCYSLIYHEKERRCEPVAFVSSNVNPKWSKVLYGIRKTNEQEITPKNKSVNGRPSRASTMVRFNASGMTEIHTDGNRDTSAFRHNNNRNFKSSKLRPAALRPKSSAKPRVFGPEGVKEGVQ

SEQ ID NO: 986 - protein, 1202 aa, unidentified
  REGION 1..1202: note = Description of Unknown: uncultivated organism sequence
  REGION 1..1202: note = Category: MG60 effectors
  REGION 1..1202: note = Description: MG60-200 effector
MFDDLKNLYEVRKTVRFELKPYRKTREVLKWNDSYDNLDAFIKHIKEDFQKDFNWNEFCKWQYQYFLDESRILFDFISHHICIHISDDDWNIKTTTSIQFNFKWLKGIFKNIPALKKCLDFKSLMKKILEIEEEYSECFRFFEMEKERKNEKQSDISEYLRKIAFLNRNTLTIFQFLWNNQERTTDEHILKRYQAMLSDLWETFEKLNNTIIASHQNETTGACFGKFTFNKYALFRREAEDLKEKYKQHKQKVEKYVDRMIQDEDFTEDNGRNITIDTWTIHKLVLKKENSGLQSILKTFNFHRDLDEVISELDEINGNLLNQYIQEFQDEYKKDTSIIDVEFHVFKTKEWREMKIYDKTGKPPKLKELFDRDYNATIKVQPWQTLEGYEYLYLIWKENTTWEEKKKQKLANKFLRILFKQEFINSDFNTIKKFRDALSRQRGKIRQDVRTSGREFIQEAMIRYYGNILEKDWYYFLALTRKEDIPDNSIENITMEKYIRNMAEKWDFSIFLYSQLSFRSLEKLCLMEDGDLIIHSELTEQWNKYKNQKKDIEWGCRHHKTSFDKYCEECNLVKEGKQKQFLERFRDHIVDAIEKLRNDSKYKGEDWSIFIPEIEKLSSIEKIVHFIDEKFYKLKKKYINANKVFELAEQWKVLLFQLYNKDFSIYDENFVSHEERLEENEHWEATKMQSSTKRASNKQPNLFTLYWKEIFQLSDTSLWQEGGIFFRKADTEKIEKRFRNNKFFWAFDVRFNKWKVIAKTKLCEKKEKFQQSTIDAINIITKRNVVNNQKIKENIVFVGIDRGKKEHLSIGFYDNNLNHLWIIGNTNFVKKIGVNQINFSICFRSKITYFDDQTELNIYKQIATNEYYFDEYWKVEEGHHLELLGLRDYHVKRIFTQDINGNYFVWLKNGWRFILNKWKYWYKIVDKDNNELVLHDTLDGKEIIDYYLLFESERYKRILDINSELQYSTNMKNLKKWYIAIVKDFFKQKIQEFSEKWKEIVFALENQSTNKGTITKDYKGASIISEIEEELLNSFVYLKYKAKSLLNGIQLGITIKKDELNTLSKSGKKTNAEYGHYWHFLFVNPDFTSEACPVCNKDINLFDIDRWNDKEENKNNQKSLSKLYWHWKWKLWESNMHHCDNPGNCPNIESHISTQNTSKCDYHMKDNRKWFDFLTSWDDLATYNIAKKAKEYLEFLSEQSSR

SEQ ID NO: 987 - protein, 755 aa, unidentified
  REGION 1..755: note = Description of Unknown: uncultivated organism sequence
  REGION 1..755: note = Category: MG60 effectors
  REGION 1..755: note = Description: MG60-201 effector
MHELIEKREPKEEKPMKIIKRNGAEVVFDIDKIIMAVTKANDAVDEKVRMTPLQIERISQSVQIACEEMGRSPSVEEIQDLVEKAIMAHGAFEVAKEYITYRYTRSLLRQSNTTDDRILSLIECNNEEVKQENANKNPTINAVQRDYMAGEVSKDITSRILLPKEVVDAHEAGIIHFHDADYYAQHMHNCDLVNLEDMLQNGTVISGTLIEKPHSFSTACNIATQIIAQVASNQYGGQSISLTHLAPFVQVSREKIRKTVEREMAAFGVAPAEETISKVVEDRLREEVRRGVQTIQYQVVTLMTTNGQAPFITVFMYLNEAKSEQEKKDLAMIIEETLRQRYEGVKNEKGVWITPAFPKLIYVLEEDNVREGTPYWYLTRLAAQCTAKRMVPDYISEKKMREYKLSKGETPGHGDVYTCMGCRSFLTPDRSGNGWDNVAGAGNYEPGKPKYYGRFNQGVVTINLVDVALSSGRDMTKFWEVFEDRLELCHRALRCRHERLKGTLSDAAPILWQYGALARLPKGEPIDKLLYGGYSTISLGYAGLYECVKYMTGKSHTDDEAKPFALSVMQKMNDKCLQWKTAENIDYSLYGTPLESTTYKFAKCLQKRFGLIPGITDKSYITNSYHVHVTEPIDAFTKLRFEAEFQQLSPGGAISYVEVPNMQNNIDAVLEVMQFIYDNIMYAELNTKSDYCQVCGYDGEIEIKEDDGKLIWVCPQCGNTDQNKMNVARRTCGYIGTQFWNQGRTQEIKDRVLHL

SEQ ID NO: 988 - protein, 755 aa, unidentified
  REGION 1..755: note = Description of Unknown: uncultivated organism sequence
  REGION 1..755: note = Category: MG60 effectors
  REGION 1..755: note = Description: MG60-202 effector
MHELIEKREPKEEKPMKIIKRNGAEVVFDIDKIIMAVTKANDAVDEKVRMTPLQIERISQSVQIACEEMGRSPSVEEIQDLVEKAIMAHGAFEVAKEYITYRYTRSLLRQSNTTDDRILSLIECNNEEVKQENANKNPTINAVQRDYMAGEVSKDITSRILLPKEVVDAHEAGIIHFHDADYYAQHMHNCDLVNLEDMLQNGTVISGTLIEKPHSFSTACNIATQIIAQVASNQYGGQSISLTHLAPFVQVSREKIRKTVEREMAAFGVAPAEETISKVVEDRLREEVRRGVQTIQYQVVTLMTTNGQAPFITVFMYLNEAKSEQEKKDLAMIIEETLRQRYEGVKNEKGVWITPAFPKLIYVLEEDNVREGTPYWYLTRLAAQCTAKRMVPDYISEKKMREYKLSKGETPGHGDVYTCMGCRSFLTPDRSGNGWDNVARAGNYEPGKPKYYGRFNQGVVTINLVDVALSSGRDMTKFWEVFEDRLELCHRALRCRHERLKGTLSDAAPILWQYGALARLPKGEPIDKLLYGGYSTISLGYAGLYECVKYMTGKSHTDDEAKPFALSVMQKMNDKCLQWKTAENIDYSLYGTPLESTTYKFAKCLQKRFGLVPGITDKSYITNSYHVHVTEPIDAFTKLRFEAEFQQLSPGGAISYVEVPNMQNNIDAVLEVMQFIYDNIMYAELNTKSDYCQVCGYDGEIEIKEDDGKLVWVCPQCGNTDQNKMNVARRTCGYIGTQFWNQGRTQEIKDRVLHL

SEQ ID NO: 989 - protein, 761 aa, unidentified
  REGION 1..761: note = Description of Unknown: uncultivated organism sequence
  REGION 1..761: note = Category: MG60 effectors
  REGION 1..761: note = Description: MG60-203 effector
MHKAALPFGAVMFALYSSVSYFSEGCFSVMKIIKRNGSEAAFDISKIIVAIGKANATVDESIRMTPVQIQRIAESVVLSCERLGRSPSVEEVQDMVEKQIMAHGAFEVAKNYITYRYTRTLVRQSNTTDDKILSLIECNNEEAKQENSNKNPVVNSTQRDYMAGEVSRDITNRILLPKEIVEAHNEGVIHFHDTDYFAQHMHNCDLVNLEDMLQNGTVITGTLIERPHSFSTACNIATQIIAQVASNQYGGQSISLAHLAPFVDVSRKKIRAQVEAEMAELGVERDEAKLSSIVEKRLREEIRRGVQTIQYQVVTLLTTNGQAPFVTVSMYLGEAKNEQEKKDLAMVIEETLLQRYQGVKNEKGVWVTPAFPKLIYTLDEDNIYPDSPYYYLTELAAKCTARRMVPDYISAKKMRELKGDVYTCMGCRSFLTPDRFTDAGVGNIANALNYEPGKHKYYGRFNQGVVTINLPDVALSSGGNVEKFWQIFEDRLELCHRALQYRHNRLKGTLSDAAPILWQYGACARLKKGEPIDKLLYDGYSTISLGYAGLYECVKFMTGRSHTDPTATPFALQIMQKMNDKCKQWKEAENIDYSLYGTPLESTTYKFAKCLQKRFGIIPGVTDKGYITNSYHVHVTEKIDAFTKLGFEAQFQHLSPGGAISYVEVPDMQNNIEAVLQVMRFIYDNIIYAELNTKSDYCQKCGWDGEITIKEQDGKLVWTCPQCGNQDQDTMNVARRTCGYIGTQFWNQGRTQEIKDRVLHL

SEQ ID NO: 990 - protein, 768 aa, unidentified
  REGION 1..768: note = Description of Unknown: uncultivated organism sequence
  REGION 1..768: note = Category: MG60 effectors
  REGION 1..768: note = Description: MG60-204 effector
MFCSCKKNLCVVIYIYDATKTYDCAKKLIVYKSIIKGAEVMKIIKRNGAEETFDRQKIKDAIAKANNETDGTPELTDRQIDYISLVIEDHCNEMNRALSVEEIQELVETHIILQGAPETAKRYIRYRFTRNLARASNTTDNQILSLIECNNEEVKQENSNKNPTVNSVQRDYMAGEVSKDLTKRILLPEDIVKAHEEGLIHFHDADYFAQHMHNCDLVNLEDMLQNGTVISGTMIEKPHSFSTACNIATQIIAQVASNQYGGQSISLAHLASFVQISREKITRQVRAEMEEFGIAADDEQVKSLVEKRVRDEIKRGVQTIQYQVVTLLTTNGQAPFVTVFMYLNEAKNEQEKKDLAIIIEEVLKQRIKGTKNEVGVWVTPAFPKLIYVLEEDNITEDSRFWYLTKLAAECTAKRMVPDYISEKIMLKLKIDKNGNGNCYTCMGCRSFLTPYVDENGKPKYYGRFNQGVVTINLVDVACTAARDGNKSEEKFWQVLDERLELCHRALQCRHERLEGTLSDAAPILWQYGALARLKKGEPIDKLLHGGYSTLSLGYAGLWECVYEITGKKLTEKEGEEFGLRVMQRLNDACAEWKAAENIDYSIYGTPLESTTYKFAKCLQNRFGIIKGVTDRNYITNSYHIHVTEKIDAFSKLELESKFQKLSPGGAISYVEVPNMQQNIPAVLEVMKFIYNNIMYAELNTKSDYCQVCGYDGEIQIVEEDGKLVWRCPNCGNEDQSKMNVARRTCGYIGSQFWNQGRTQEIKERVLHL

SEQ ID NO: 991 - protein, 755 aa, unidentified
  REGION 1..755: note = Description of Unknown: uncultivated organism sequence
  REGION 1..755: note = Category: MG60 effectors
  REGION 1..755: note = Description: MG60-205 effector
MHELIEKREPKEEKPMKIIKRNGAEVVFDIDKIIMAVTKANDAVDEKVRMTPLQIERISQSVQIACEEMGRSPSVEEIQDLVEKAIMAHGAFEVAKEYITYRYTRSLLRQSNTTDDRILSLIECNNEEVKQENANKNPTINAVQRDYMAGEVSKDITSRILLPKEVVDAHEAGIIHFHDADYYAQHMHNCDLVNLEDMLQNGTVISGTLIEKPHSFSTACNIATQIIAQVASNQYGGQSISLTHLAPFVQVSREKIRKTVEREMAAFGVAPAEETISKVVEDRLREEVRRGVQTIQYQVVTLMTTNGQAPFITVFMYLNEAKSEQEKKDLAMIIEETLRQRYEGVKNEKGVWITPAFPKLIYVLEEDNVRDGTPYWYLTRLAAQCTAKRMVPDYISEKKMREYKLSKGETPGHGDVYTCMGCRSFLTPDRSGNGWDNVARAGNYEPGKPKYYGRFNQGVVTINLVDVALSSGRDMTKFWEVFEDRLELCHRALRCRHERLKGTLSDAAPILWQYGALARLPKGEPIDKLLYGGYSTISLGYAGLYECVKYMTGKSHTDDEAKPFALSVMQKMNDKCLQWKTAENIDYSLYGTPLESTTYKFAKCLQKRFGLIPGITDKSYITNSYHVHVTEPIDAFTKLRFEAEFQQLSPGGAISYVEVPNMQNNIDAVLEVMQFIYDNIMYAELNTKSDYCQVCGYDGEIEIKEDDGKLIWVCPQCGNTDQNKMNVARRTCGYIGTQFWNQGRTQEIKDRVLHL

SEQ ID NO: 992 - protein, 761 aa, unidentified
  REGION 1..761: note = Description of Unknown: uncultivated organism sequence
  REGION 1..761: note = Category: MG60 effectors
  REGION 1..761: note = Description: MG60-206 effector
MHKAALPFGAVMFALYSSVSYFSEGCFSVMKIIKRNGSEAAFDISKIIVAIGKANATVDESTRMTPVQIQRIAESVVLSCEKLGRSPSVEEVQDMVEKQIMAHGAFEVAKNYITYRYTRTLVRQSNTTDDKILSLIECNNEEAKQENSNKNPVVNSTQRDYMAGEVSRDITNRILLPKEIVEAHNEGVIHFHDTDYFAQHMHNCDLVNLEDMLQNGTVITGTLIERPHSFSTACNIATQIIAQVASNQYGGQSISLAHLAPFVDVSRKKIRAQVEAEMAELGVERDEAKLSSIVEKRLREEIRRGVQTIQYQVVTLLTTNGQAPFVTVSMYLGEAKNEQEKKDLALVIEETLLQRYQGVKNEKGVWVTPAFPKLIYTLDEDNIYPDSPYYYLTELAAKCTARRMVPDYISAKKMRELKGDVYTCMGCRSFLTPDRFTDAGVGNIANALNYEPGKHKYYGRFNQGVVTINLPDVALSSGGNVEKFWQIFEDRLELCHRALQYRHNRLKGTLSDAAPILWQYGACARLKKGEPIDKLLYDGYSTISLGYAGLYECVKFMTGRSHTDPTATPFALQIMQKMNDKCKQWKEAENIDYSLYGTPLESTTYKFAKCLQKRFGIIPGVTDKGYITNSYHVHVTEKIDAFTKLGFEAQFQHLSPGGAISYVEVPDMQNNIEAVLQVMRFIYDNIIYAELNTKSDYCQKCGWDGEIIIKEQDGKLVWTCPQCGNQDQDTMNVARRTCGYIGTQFWNQGRTQEIKDRVLHL

SEQ ID NO: 993 - protein, 768 aa, unidentified
  REGION 1..768: note = Description of Unknown: uncultivated organism sequence
  REGION 1..768: note = Category: MG60 effectors
  REGION 1..768: note = Description: MG60-207 effector
MFCSCKKNLCVVIYIYNATKTYDCAKKLIVYKSIIKGAEVMKIIKRNGAEETFDRQKIKDAIAKANNETDGTPELTDRQIDYISLVIEDHCNEMNRALSVEEIQELVETHIILQGAPETAKRYIRYRFTRNLARASNTTDNQILSLIECNNEEVKQENSNKNPTVNSVQRDYMAGEVSKDLTKRILLPEDIVKAHEEGLIHFHDADYFAQHMHNCDLVNLEDMLQNGTVISGTMIEKPHSFSTACNIATQIIAQVASNQYGGQSISLAHLAPFVQISREKITRQVRAEMEEFGIAADDEQVKSLVEKRVRDEIKRGVQTIQYQVVTLLTTNGQAPFVTVFMYLNEAKNEQEKKDLAIIIEEVLKQRIKGTKNEVGVWVTPAFPKLIYVLEEDNITEDSRFWYLTKLAAECTAKRMVPDYISEKIMLKLKIDKNGNGNCYTCMGCRSFLTPYVDENGKPKYYGRFNQGVVTINLVDVACTAARDGSKSEEKFWQVLDERLELCHRALQCRHERLEGTLSDAAPILWQYGALARLKKGEPIDKLLHGGYSTLSLGYAGLWECVYEITGKKLTEKEGEEFGLRVMQRLNDACAEWKAAENIDYSIYGTPLESTTYKFAKCLQNRFGIIKGVTDRNYITNSYHIHVTEKIDAFSKLELESKFQKLSPGGAISYVEVPNMQQNIPAVLEVMKFIYNNIMYAELNTKSDYCQVCGYDGEIQIVEEDGKLVWRCPNCGNEDQSKMNVARRTCGYIGSQFWNQGRTQEIKERVLHL

SEQ ID NO: 994 - protein, 755 aa, unidentified
  REGION 1..755: note = Description of Unknown: uncultivated organism sequence
  REGION 1..755: note = Category: MG60 effectors
  REGION 1..755: note = Description: MG60-208 effector
MHELIEKREPKEEKPMKIIKRNGAEVVFDIDKIIMAVTKANDAVDEKVRMTPLQIERISQSVQIACEEMGRSPSVEEIQDLVEKAIMAHGAFEVAKEYITYRYTRSLLRQSNTTDDRILSLIECNNEEVKQENANKNPTINAVQRDYMAGEVSKDITSRILLPKEVVDAHEAGIIHFHDADYYAQHMHNCDLVNLEDMLQNGTVISGTLIEKPHSFSTACNIATQIIAQVASNQYGGQSISLTHLAPFVQVSREKIRKTVEREMAAFGVAPAEETISKVVEDRLREEVRRGVQTIQYQVVTLMTTNGQAPFITVFMYLNEAKSEQEKKDLAMIIEETLRQRYEGVKNEKGVWITPAFPKLIYVLEEDNVREGTPYWYLTRLAAQCTAKRMVPDYISEKKMREYKLSKGETPGHGDVYTCMGCRSFLTPDRSGNGWDNVARAGNYEPGKPKYYGRFNQGVVTINLVDVALSSGRDVTKFWEVFEDRLELCHRALRCRHERLKGTLSDAAPILWQYGALARLPKGEPIDKLLYGGYSTISLGYAGLYECVKYMTGKSHTDDEAKPFALSVMQKMNDKCLQWKTAENIDYSLYGTPLESTTYKFAKCLQKRFGLIPGITDKSYITNSYHVHVTEPIDAFTKLRFEAEFQQLSPGGAISYVEVPNMQNNIDAVLEVMQFIYDNIMYAELNTKSDYCQVCGYDGEIEIKEDDGKLIWVCPQCGNTDQNKMNVARRTCGYIGTQFWNQGRTQEIKDRVLHL

SEQ ID NO: 995 - protein, 939 aa, unidentified
  REGION 1..939: note = Description of Unknown: uncultivated organism sequence
  REGION 1..939: note = Category: MG60 effectors
  REGION 1..939: note = Description: MG60-209 effector
MFNFTPKIGEKEISIVKALTTNEIEDLRNRIASYDPFQLFEVNPHNDKEIICPICGNGNGENHTGVKPSNENNHWIFHCFKCERFNGDLLSVIASENNLSTKGEDFFKVLTIGARIINFNFNLNHTTFSSNKKTKKDVPKAELDLIHTDILETQKNLRDLIEEQGGKWRGLTLETLEHFHCGYILNWIPPKIRLKYAQGQRDKLPVTSRRVILPTQNHYNAVMIDSDRNTENKSYWKMHAGHKEPFGLDFIPADADLIIIVEGEVDAMSIYQATDTNIYVFSTGGAGEKKFISELEEKFQGRKLPHIIILFDSDESGRNGANNLRENLIQRGFLVVVKFIDESDIKIDSNDILQEQGDAALKLRLDNLISAAQIEFAEIEKEMAESEAKRKSDPLYLDEETRAKLFGGGITDFDNAERLVLLFGDKFRYFKDLDRWVFYTNDFWTIAPTGKSSALFHFGRKTAEFIEFNATADADKKIAENFVKKFENHRYLSPICSMVKGLEEIYITQEDLDKHQMLLNCANGVVDLETGKLYKHDPSLYFTKKSPVVYNPECNSIDFEKFMQDVLPNEETRRAVLRYLGYCLCGDIREEKALFIVGDGRNGKGTLAKVLMAILDDYATPFKIDALLQRRFDKDGDAATPEFAKLEGRRLAIANEIPQGKNLDVAHFKDLTGGDQISIRRLHQEATTIKNPTHHFILCGQHYPEIKDANDLGLRERIIAVRFPQSFTGENCDPNLKKKLLTPENLSGALNILVQECINWQREGLIISDDMKAEKQEYLDANNFIQDFISEYCVFDADKKILRKELLSVLKENYRSEIAGLSDQALTDMLKKIEGVEYKNNIGKKHLSYFYGIGLSDEKQNSLEFAAVNKNDKTFNLQEHSNNLSDSEAEKLVLKMESEGYSNEEIIEELIKGGIDSSFAHEHLNHLKPENIPDHCIPF

SEQ ID NO: 996 - protein, 755 aa, unidentified
  REGION 1..755: note = Description of Unknown: uncultivated organism sequence
  REGION 1..755: note = Category: MG60 effectors
  REGION 1..755: note = Description: MG60-210 effector
MHELIEKREPKEEKPMKIIKRNGAEVVFDIDKIIMAVTKANDAVDEKVRMTPLQIERISQSVQIACEEMGRSPSVEEIQDLVEKAIMAHGAFEVAKEYITYRYTRSLLRQSNTTDDRILSLIECNNEEVKQENANKNPTINAVQRDYMAGEVSKDITSRILLPKEVVDAHEAGIIHFHDADYYAQHMHNCDLVNLEDMLQNGTVISGTLIEKPHSFSTACNIATQIIAQVASNQYGGQSISLTHLAPFVQVSREKIRKTVEREMAAFGVAPADETISKVVEDRLREEVRRGVQTIQYQVVTLMTTNGQAPFITVFMYLNEAKSEQEKKDLAMIIEETLRQRYEGVKNEKGVWITPAFPKLIYVLEEDNVREGTPYWYLTRLAAQCTAKRMVPDYISEKKMREYKLSKGETPGHGDVYTCMGCRSFLTPDRSGNGWDNVARAGNYEPGKPKYYGRFNQGVVTINLVDVALSSGRDMTKFWEVFEDRLELCHRALRCRHERLKGTLSDAAPILWQYGALARLPKGEPIDKLLYGGYSTISLGYAGLYECVKYMTGKSHTDDEAKPFALSVMQKMNDKCLQWKTAENIDYSLYGTPLESTTYKFAKCLQKRFGLVPGITDKSYITNSYHVHVTEPIDAFTKLRFEAEFQQLSPGGAISYVEVPNMQNNIDAVLEVMQFIYDNIMYAELNTKSDYCQVCGYDGEIEIKEDDGKLVWVCPQCGNTDQNKMNVARRTCGYIGTQFWNQGRTQEIKDRVLHL

SEQ ID NO: 997 - protein, 783 aa, unidentified
  REGION 1..783: note = Description of Unknown: uncultivated organism sequence
  REGION 1..783: note = Category: MG60 effectors
  REGION 1..783: note = Description: MG60-211 effector
MMRVVKRDGKIVDFDESRIKIAIGKANNEVDESQRATEEEIEKIVEYVKKVKKDRILVEDIQDIIENKLMEYKRFELAKAYITYRYSRALVRKANTTDQTVKELVEGNSEYWNNENSNKNARVVTTQRDYLAGITSTDITRRLLLPPEIVKAHDEGIIHFHDADYFAQNALTNCCLINLNDMLQNGTVINGVMIEKPHRFVTACTIATQIILGVSSSQYGGCTVTLTHLAPFVRDSYNRSLKKYQDRNLPEEECKKFAMQDTKKEIADGVQTFNYQVNSMTNTNGQAPFLSVNMYLGETDEYKDELAMIIEEFLRQRMLGFKNEKGVYITPAFPKLLYVLEEDNIHKDSKYWYLTELAAKCTAKRMVPDYISEKMMKKLKINQYGEGDCYPCMGCRSFLTPDRVKGNVAKAKDYVEGKGKYYGRFNQGVVTINLPDVALSSKKDEKEFWKIFDERLELCHEALQLRHKRLSGITSDVAPLLWQYGAYARLNKGEKLDKLLHGGYSTLSLGYAGLYECVKYMTGDSHTDGGKGEKFALEVMQHMNDKCAEWKKAEDSDYSLYGTPIESTTYKFAKCLKKRFGTVEGVTDRNYITNSYHVPVFEEIDAFSKLKLESEFQRLSPGGAISYVETPNLQNNIEVVEQIIEFIYNNIMYAELNTKSDYCQKCGYTGEILIDDNLEWYCPNCGNRDHRTLNVARRTCGYIGTNFWNKGRTQEIKERVLHIDNKDFDAEKCTKCDEDVNVVSKCCNDSNESTESDKNVEKHEKKTRAKVSAKEKAMASVHA

SEQ ID NO: 998 - protein, 762 aa, unidentified
  REGION 1..762: note = Description of Unknown: uncultivated organism sequence
  REGION 1..762: note = Category: MG60 effectors
  REGION 1..762: note = Description: MG60-212 effector
MRVVKRDGKIVDFDESRIKIAIGKANNEVDESQRATEEEIEKIVEYVKKVKKDRILVEDIQDIIENKLMEYKRFELAKAYITYRYSRALVRKANTTDQTVKELVEGNSEYWNNENSNKNAKVVTTQRDYLAGITSTDITRRLLLPPEIVKAHDEGIIHFHDADYFAQNALTNCCLINLNDMLQNGTVINGVMIEKPHRFLTACTIATQIILGVSSSQYGGCTVTLTHLAPFVRDSYNRILKKYQDRNLPEEECKKFAMQDTKKEIADGVQTFNYQVNSMTNTNGQAPFLSVNMYLGETDEYKDELAMIIEEFLKQRMLGFKNEKGVYITPAFPKLLYVLEEDNIHKDSKYWYLTELAAKCTAKRMVPDYISEKMMKKLKINQYGEGDCYPCMGCRSFLTPDRVKGNVAKAKDYVEGKGKYYGRFNQGVVTINLPDVALSSKKDEKEFWKIFDERLELCHEALQLRHKRLSGITSDVAPLLWQYGAYARLDKGEKLDKLLHGGYSTLSLGYAGLYECVKYMTGDSHTDGGKGEKFALEVMQHMNDKCAEWKKAEDIDYSLYGTPIESTTYKFAKCLKKRFGTVEGITDRNYITNSYHVPVFEEIDAFSKLKLESEFQRLSPGGAISYVETPNLQNNIEVVEQIIEFIYNNIMYAELNTKSDYCQKCGYTGEILIDDNLEWYCPNCGNRDHRTLNVARRTCGYIGTNFWNKGRTQEIKERVLHIDNKDFDAEKCTKCDENVEKHEKKTRAKVSAKEKAIASVHA

SEQ ID NO: 999 - protein, 763 aa, unidentified
  REGION 1..763: note = Description of Unknown: uncultivated organism sequence
  REGION 1..763: note = Category: MG60 effectors
  REGION 1..763: note = Description: MG60-213 effector
MYIQPIITVSDTTHKFNFVKLFFQKNKNSLRDVWRGNGMKIIKRNGEEVVFDLKKIITAISKANNEVPPSEQLAGSTINSIAENIEKQCAAENHEMNVEAIQDLVEKAIMKAGAFDIAKKYITYRYQHQLMRRANSTDSQILSLLECNNEEVKQENSNKNSTVVSVQRDYMAGEVSKDITKRFLLDEDIVKAHDEGLIHFHDADYFAQHMHNCDLVNLEDMLQNGTVISGTKIDTPHSFSTACNIATQIIAQVASSQYGGQSISLAHLAPFVEVSRKKFQRETMRVEEQTGVKFTDEQFKKIVEMRIRDEITRGVQTIQYQVVTLMTTNGQSPFITVFMYLNEAKNEQEKADLAMIIEEMLKQRYQGVKNEKGFWVTPAFPKLIYVLEPDNIEPGSKYYSLTELAAKCTARRLVPDYISEKKMLELKVDANGKGNCYPCMGCRSFLTPYLDEHGKPKYYGRFNQGVVTINLVDVACSSNGDYKSFWEIFDERLELCHKALMRRHQRLLGTPSDVAPILWQHGALARLEKGETIDKLLFGGYSTISLGYAGLCECVRYMTGKPHTDPSATPFAIEIMKHLNEKCAEWKAESNIAFSLYGTPLESTTYKFAKCLKKRFGEIPGVTDKNYITNSYHVHVTEQMDAFTKLSFESQFQELSPGGAVSYVEVPNMENNIPAVMTLLKHIYENIMYAELNTKSDCCQKCGYTGEIQIVTDSDNKLVWQCPNCGNKDQATMNVARRTCGYIGTQYWNQGRTQEIKERVLHL

SEQ ID NO: 1000 - protein, 756 aa, unidentified
  REGION 1..756: note = Description of Unknown: uncultivated organism sequence
  REGION 1..756: note = Category: MG60 effectors
  REGION 1..756: note = Description: MG60-214 effector
MQQSIFDVCVIIGLWFKKKRRSEVFTMKVIKRDGHIVDYSPDKIEEAVSKANLEVSEEDRVSDIQIRNIIKYIEGLHKKRMLVEDIQDVIEKRLMTLGKYELAKEYITYRYTRELVRRSNTTDKSIKELIDGESEYWNTENSNKNAKVVTTQRDYLAGITSTDITRRFLLPEDIVTAHDQGIIHFHDADYFAQNALHNCDLINLDDMLQNGTNINGVMIEKPHRFLTAMTIATQLITAVSSSQYGGCTITLTHLAPFVRSSKEFYLKKYKNRKLTKAQVEKFATEDLKKEITDGVQTFQYQINSMTTTNGQAPFLSVCMYLGETEEYKDELAMIIEEVLKQRMEGMKNEKGVYITPAFPKLLYVLEEENINPKGKYYYLTELAARCTAKRMVPDYISEKVMKENKINSLGNGECFPCMGCRSFLTPDRMFNVGNISKALNYVENKGKYYGRFNQGVVTINLPDVALTSGKDMELFWKVFDDRLELCHRALQIRHKRLSKVTSDVAPILWQHGALARLEKGESIHELLHHGYSTISLGYAGLYECVKYMTGHSHTDNGKGHEFALEVMQHMNDKCNEWKEAEDIDYSLYGTPIESTTYKFAKCLRDRFGKIKGITDRDYITNSYHVPVFEEIDAFTKLKLESEFQRLSPGGAISYIETPNLENNIDVVMEVINFIYENIMYAELNTKSDYCQKCGYNGEILLDDDLEWYCPECGNRDHDTLNVARRTCGYIGTNFWNKGRTQEIKERVVHIDNKDDE

SEQ ID NO: 1001 - protein, 753 aa, unidentified
  REGION 1..753: note = Description of Unknown: uncultivated organism sequence
  REGION 1..753: note = Category: MG60 effectors
  REGION 1..753: note = Description: MG60-215 effector
MLEIVKRDCSKTNFDKQKIFNAIMKAMKSGSGIVKSEIAEKIANEIENEVKSMEEIDIYQIEAMVFQKLIENNQILTAKAYESYRSVREFQRNTTNSTDDAILELLAGQSEYWNEENSNKNAMLITTQRDYMAGIESEDISKRMLLTPEIVHAHENGIIHFHDIDYFAMKAMYNCCLINLEDMLQNGTVISNVLIEKPHSFSTACNVATQIIAQVASSQFGGQTISLSHLAPFIDVSRQKIKKQVEKELINANLTSVEYHNLVDSIVAKRLKEEIKKGVQTIQYQVVTLMTTNGQAPFLSVFMYLNEVKDKQTKHDLAMLIEEVLLQRIQGVKNEKGVWVTPAFPKLLYVLEEDNIHKNSPYYYLTELAAKCTVKRMVPDYISEKKMKECKIDKNGKGQCFPCMGCRSFLSPYLDKNSQPKYYGRFNQGVVTINLADVALSALKEYEESKLNLHNTSVESIFWKILDERLELCHRTLRLRHERLKGTVSDVAPILWQHGAIARLNKGEKIDKLLYNDYSTISLGYAALYECVKAITKHTLTDNGIGEKFGLQVMQRLTDKCNQWKEEENIGYSVYGTPLESTTYKFAKCLRKRFGVIEGITDRDYVTNSYHIPVFENINAFDKLLIESKFQKLSAGGAISYVEVPNLTDNIEIVIQIIQYIYEHIMYAELNTKSDYCHVCGYDKEIEIVTDANTGKLIWKCPQCGNTDQRKMSVTRRTCGYLGSNFWNQGRTQEIKERVLHIDDMDLNESENV

SEQ ID NO: 1002 - protein, 768 aa, unidentified
  REGION 1..768: note = Description of Unknown: uncultivated organism sequence
  REGION 1..768: note = Category: MG60 effectors
  REGION 1..768: note = Description: MG60-216 effector
MFCSCKKNLCVVIYIYDATKTYDCAKKLIVYKSIIKGAEVMKIIKRNGAEETFDRQKIKDAIAKANNETDGTPELTDRQIDYISLVIEDHCNEMNRALSVEEIQELVETHIILQGAPETAKRYIRYRFTRNLARASNTTDNQILSLIECNHEEVKQENSNKNPTVNSVQRDYMAGEVSKDLTKRILLPEDIVKAHEEGLIHFHDADYFAQHMHNCDLVNLEDMLQNGTVISGTMIEKPHSFSTACNIATQIIAQVASNQYGGQSISLAHLAPFVQISREKITRQVRAEMEEFGIDADDEQVKSLVEKRVRDEIKRGVQTIQYQVVTLLTTNGQAPFVTVFMYLNEAKNEQEKKDLAIIIEEVLKQRIKGTKNEVGVWVTPAFPKLIYVLEEDNITEDSRFWYLTKLAAECTAKRMVPDYISEKIMLKLKIDKNGNGNCYTCMGCRSFLTPYVDENGKPKYYGRFNQGVVTINLVDVACTAARDGNKSEEKFWQVLDERLELCHRALQCRHERLEGTLSDAAPILWQYGALARLKKGEPIDKLLHGGYSTLSLGYAGLWECVYEITGKKLTEKEGEEFGLRVMQRLNDACAEWKAAENIDYSIYGTPLESTTYKFAKCLQNRFGIIKGVTDRNYITNSYHIHVTEKIDAFSKLELESKFQKLSPGGAISYVEVPNMQQNIPAVLEVMKFIYNNIMYAELNTKSDYCQVCGYDGEIQIVEEDGKLVWRCPNCGNEDQSKMNVARRTCGYIGSQFWNQGRTQEIKERVLHL

SEQ ID NO: 1003 - protein, 769 aa, unidentified
  REGION 1..769: note = Description of Unknown: uncultivated organism sequence
  REGION 1..769: note = Category: MG60 effectors
  REGION 1..769: note = Description: MG60-218 effector
MKVIKRDGTIVEYDREKIRIAIEKANKEVSRKEKATDSEIEEIMSYIEDLKKGRILVEDIQDIIEEKLMEIKRYELAKKYITYRYTRALVRKANTTDQSIKELIEGESEYWNNENANKNARVVTTQRDYLAGITSTDITRRFLLPEDVVKAHDEGIIHFHDADYFAQNALTNCELINLEDMLQNGTIMNGVMIEKPHRFITACTIATQIILAVTSSTYGGATVSLAHLAPFVRSSYEKYYKKYKDNGLSKEQCEKFAKEDTKKEVADGVQTFNYQVNSMTNTNGQAPFLSVCMYLGETDEYKEELAMIIEEFLNQRILGFKNEKGVYITPAFPKLLYVLEEDNIHENSKYWYLTELAAKCTAKRMVPDYISEKIMKQMKVDANGDGQCYPCMGCRSFLTPYIDPVTKKPKYYGRFNQGVVTINLVDVALSSGKDLKKFWKIYDERLELCHKALQARHERLAKATSDIAPILWQHGAFARLPKGASIHPLLHGGYSTISLGYAGLYECVKYMTGKSHTDNGDGKDFAIEVMKKMNEKCAEWKDAEDIDYSVYGTPIESTTYKFAKCLQKRFGKIKGITDKNYITNSYHVPVFEEIDAFSKLKLESEFQRLSPGGAISYVETPNLQNNLEVVLQIMKFIYDNIMYAELNTKSDYCQKCGYTGEILIDDNLEWYCPNCGNRDHNTLNVARRTCGYIGSNFWNKGRTQEIKERVLHIDNKDDDCDCDECNCDHANTDTNKEEKSEEKQMNFIDYDVEEEITKSKKRMKQPAMV

SEQ ID NO: 1004 - protein, 755 aa, unidentified
  REGION 1..755: note = Description of Unknown: uncultivated organism sequence
  REGION 1..755: note = Category: MG60 effectors
  REGION 1..755: note = Description: MG60-219 effector
MHELIEKREPKEEKPMKIIKRNGAEVVFDIDKIIMAVTKANDAVDEKVRMTPLQIERISQSVQIACEEMGRSPSVEEIQDLVEKAIMAHGAFEVAKEYITYRYTRSLLRQSNTTDDRILSLIECNNEEVKQENANKNPTINAVQRDYMAGEVSKDITSRILLPKEVVDAHEAGIIHFHDADYYAQHMHNCDLVNLEDMLQNGTVISGTLIEKPHSFSTACNIATQIIAQVASNQYGGQSISLTHLAPFVQVSREKIRKTVEREMAAFGVVPAEETISKVVEDRLREEVRRGVQTIQYQVVTLMTTNGQAPFITVFMYLNEAKSEQEKKDLAMIIEETLRQRYEGVKNEKGVWITPAFPKLIYVLEEDNVREGTPYWYLTRLAAQCTAKRMVPDYISEKKMREYKLSKGETPGHGDVYTCMGCRSFLTPDRSGNGWDNVARAGNYEPGKPKYYGRFNQGVVTINLVDVALSSGRDMTKFWEVFEDRLELCHRALRCRHERLKGTLSDAAPILWQYGALARLPKGEPIDKLLYGGYSTISLGYAGLYECVKYMTGKSHTDDEAKPFALSVMQKMNDKCLQWKTAENIDYSLYGTPLESTTYKFAKCLQKRFGLIPGITDKSYITNSYHVHVTEPIDAFTKLRFEAEFQQLSPGGAISYVEVPNMQNNIDAVLEVMQFIYDNIMYAELNTKSDYCQVCGYDGEIEIKEDDGKLIWVCPQCGNTDQNKMNVARRTCGYIGTQFWNQGRTQEIKDRVLHL

SEQ ID NO: 1005 - protein, 1226 aa, unidentified
  REGION 1..1226: note = Description of Unknown: uncultivated organism sequence
  REGION 1..1226: note = Category: MG60 effectors
  REGION 1..1226: note = Description: MG60-220 effector
MKVIKRNGSEVLYNQQKIKDAVSKANAEVSRVERLSQAQITAIANNVTKIIEQSSHAVSIEDIQNYVEKEIMAMRGYEVAQKYITYRYKRALARQSNTTDERILSIIGLENEEVKQENANKNPTINSTQRDYMAGEVSKDLTTRILLPQDIVDAHNNGLIHFHDADYYAQKMHNCFTGDTKFMTHKGAKRFDSFKDGESVFVRDMHNEIRKATVHIYGEQRVQKVTFKMLGKNKKKTVKCTPNHRWILEDKKVTTALKVGDVLFSNSYSHYEKWKVEKIEFKGIEKVYCVEEPITHSFTLEDGMVTGNCDLINLEDMLQNGTVISGTMIEKPHSFHTACNITTQVIAQVASSQFGGQSFSLAHLVPFVDISRKKIKKEILEENLINKIVESDEIINKKVEFRLKEEIKRGIQTIQYQILTLMTTNGQAPFVTMFLWLDEVEEGQARDDMAMLVEEVLNQRIQGVKNEKGVYITPAFPKVIYLLDEDNIHEDSKYYYLTELAAKCTAKRMVPDYISGKVMRELKEGDIYPCMGCVDGAEVVTYKYLDNVYVESFERMWNRLSNYFKVELQPNKKDFVMKTPGVKIYDHQSGYVDNYGIIKNHTNRWLQISFSNGRVLTCTPDHPFETTDKRIIMAKDLTPNDMINIDTLSNYSSNNLISMKENRAWLYGFALCDSTYYDNFTASIAENSENEIKEFFTNMLLSEYKLETKCIYRNRGEKGKYIDLRAVSNNDNSLMNLKLDFIKAFEGKAKKDRHIPNEVFSWQNSAKLAFLAGMIDADGYLNSSMRLTKIQLGSTNKELAIQQALLAQTCGMPSRIYLNHYKSNCRDMIRYRVEFIPSIDLLKYIKCEKKYSLKDSTIARKNSSISDNDFVTITSVDELEKAGFSYDVTTESEHFTVSGLYSHNCRSFLTVDRTKENLGNAKNYNPNKHKYYGRFNQGVVTINLVDVACSSYGDMNKFWEILDERLELCHRALKERHKRLLGTPSDVAPILWQHGALARLEKGEKIDKLLYDGYSTISLGYAGLYEMCMRMTEKSHTDPEAKPFALAVMQKLNDKCNEWKEKENIDYSLYGTPMESTTFKFARCLQRRFGIIKDVTDHDYITNSYHVNVRENIDAFTKLSFESEFQKLSPGGAISYVEVPNMQDNIPAVLAVLKHIYNNIMYAELNTKSDYCQVCGYEGEIQIVRDKHKKLIWKCPNCGNTDHNKMNTARRTCGYIGTNDFNQGVT

SEQ ID NO: 1006 - protein, 752 aa, unidentified
  REGION 1..752: note = Description of Unknown: uncultivated organism sequence
  REGION 1..752: note = Category: MG60 effectors
  REGION 1..752: note = Description: MG60-221 effector
MIFLLIFIKNTISCGHQQKQTQNIVSKVTSYFFYKLSSLIPMAIKKVIKRNGSEAVYDPEKIRVAIQKANHEVPEDDQASDFLISEIIRSLELAKKWTVPIEEIQDFIEMQLIKMNKAELAKKYIIYRYQRALVRKANTTDDSILTLIHNDNKEVGQENSNKDASIASTQRDLIAWEVSKDLTRRMLLPDDIREAHDEGVLHFHDMDYFIQPIFNCCLVNIKDMFENGTVMNGKLVETPKSFQVACTVMTQIIASVASSQYGGQSVNIKHLGKYLYATKQKYLKKYKESCPELSDEEIQKIVDIRVKDELASWVQTIQYQINTLMTTNGQSPFVTLFLELDEKDEYIQETAEIIEEIFKQRLQGIKNEVWVYVTPAFPKLVYVLDECNILKGGKYDYLTKLAVKCSAKRMYPDYISAKKMREIECGNVFAPMGCRSFLAPWKDENWEYKFEGRFNQWVVTINLPQIWILANHSEEKYFKLLDERLELCRKALMCRHERLKGTVSDISPIHWQYWAIARLKKGEKIDKYLYGWYSTISLGYIGLYESSILITGEPHTTEKWQAFALKVMRTLKAAVTKWKEESGIGFALYGTPAESLCYRFAKIDKKKFGEIKDVTDKWYYTNSYHVDVREHIDALSKLAFEAQFQSISTWGAISYIEMPNMQKNLPALESLVQFMYDNIMYAEFNTKSDYCHCCGFDGEIIVNEDNEWECPQCHNKNQRKMNVTRRTCWYLGENFWNAGKTKEISKRVLHVS

SEQ ID NO: 1007 - protein, 783 aa, unidentified
  REGION 1..783: note = Description of Unknown: uncultivated organism sequence
  REGION 1..783: note = Category: MG60 effectors
  REGION 1..783: note = Description: MG60-222 effector
MMRVVKRDGKIVDFDESRIKIAIGKANNEVDESQRATEEEIEKIVEYVKKVKKDRILVEDIQDIIENKLMEYKRFELAKAYITYRYSRALVRKANTTDQTVKELVEGNSEYWNNENSNKNARVVTTQRDYLAGITSTDITRRLLLPPEIVKAHDEGIIHFHDADYFAQNALTNCCLINLNDMLQNGTVINGVMIEKPHRFVTACTIATQIILGVSSSQYGGCTVTLTHLAPFVRDSYNRSLKKYQDRNLPEEECKKFAMQDTKKEIADGVQTFNYQVNSMTNTNGQAPFLSVNMYLGETDEYKDELAMIIEEFLRQRMLGFKNEKGVYITPAFPKLLYVLEEDNIHKDSKYWYLTELAAKCTAKRMVPDYISEKMMKKLKINQYGEGDCYPCMGCRSFLTPDRVKGNVAKAKDYVEGKGKYYGRFNQGVVTINLPDVALSSKKDEKEFWKIFDERLELCHEALQLRHKRLSGITSDVAPLLWQYGAYARLNKGEKLDKLLHGGYSTLSLGYAGLYECVKYMTGDSHTDGGKGEKFALEVMQHMNDKCAEWKKAEDIDYSLYGTPIESTTYKFAKCLKKRFGTVEGVTDRNYITNSYHVPVFEEIDAFSKLKLESEFQRLSPGGAISYVETPNLQNNIEVVEQIIEFIYNNIMYAELNTKSDCCQKCGYTGEILIDDNLEWYCPNCGNRDHRTLNVARRTCGYIGTNFWNKGRTQEIKERVLHIDNKDFDAEKCTKCDEDVNVVSKCCNDSNESTESDKNVEKHEKKTRAKVSAKEKAMASVHA

SEQ ID NO: 1008 - protein, 1125 aa, unidentified
  REGION 1..1125: note = Description of Unknown: uncultivated organism sequence
  REGION 1..1125: note = Category: MG60 effectors
  REGION 1..1125: note = Description: MG60-223 effector
MLEIVKRDCSKTNFDKQKIFNAIMKAMKSGSGIVKSEIAEKIANEIENEVKSMEEIDIYQIEAMVFQKLIENNQILTAKAYESYRSVREFQRNTTNSTDDAILELLAGQSEYWNEENSNKNAMLITTQRDYMAGIESEDISKRMLLTPEIVHAHENGIIHFHDIDYFAMKAMYNCCLINLEDMLQNGTVISNVLIEKPHSFSTACNVATQIIAQVASSQFGGQTISLSHLAPFIDVSRQKIKKQVEKELINANLTSVEYHNLVDSIVAKRLKEEIKKGVQTIQYQVVTLMTTNGQAPFLSVFMYLNEVKDKQTKHDLAMLIEEVLLQRIQGVKNEKGVWVTPAFPKLLYVLEEDNIHKNSPYYYLTELAAKCTVKRMVPDYISEKKMKECKIDKNGKGQCFPCMGCVDGKEVVTYKYNNDVYTESFERMWDRLSKYFEISKQPNLVDFVMKTHGVKIYDQKAGFVDNYGIIKNHNSEWLRITFSNGRTIMCTPDHPFETTDGRVISAKNLTENDFIEIDKTSSFKTPSIYTMKENRAWLYGFALCDSTYYDGFTASIASVNETEIETNFVNIINDEYGLNTNSINRERGKKGTYKDLRVVSNGDNEYIKLRIELIKAFEGKAKANRHIPNEVFSWTQNAKLAFIAGMIDADGYLNTTAKKAIVQIGSINKELAIQQALLVQTCGMFAKIYHNHYNANHKDKIRYRVEFTPTEKLLSFIKCNKKTDLFNSILKNTKKSIADTNICAITNVEHIHKEGFSYDVTTSSEHFTVSGIYSHNCRSFLSPYLDKNSQPKYYGRFNQGVVTINLADVALSALKEYEESKLNLHNTSVESIFWKILDERLELCHRTLRLRHERLKGTVSDVAPILWQHGAIARLNKGEKIDKLLYNDYSTISLGYAALYECVKAITKHTLTDNGIGEKFGLQVMQRLTDKCNQWKEEENIGYSVYGTPLESTTYKFAKCLRKRFGVIEGITDRDYVTNSYHIPVFENINAFDKLLIESKFQKLSAGGAISYVEVPNLTDNIEIVIQIIQYIYEHIMYAELNTKSDYCHVCGYDKEIEIVTDTNTGKLIWKCPQCGNTDQRKMSVTRRTCGYLGSNFWNQGRTQEIKERVLHIDDMDLNESENV

SEQ ID NO: 1009 - protein, 921 aa, unidentified
  REGION 1..921: note = Description of Unknown: uncultivated organism sequence
  REGION 1..921: note = Category: MG60 effectors
  REGION 1..921: note = Description: MG60-224 effector
MKIVKRNGTEVEFDIKKIINAITKANKTVEEKDKLSIEEIKNISDCVMVRVSQLPVDTNVEVIQDIVEEELDKHNASYTLKRNYMLYRYQHNELRKSNTIDKTILSLIKCENEDIKQENSNKNPVIISTQRDYMAGEVSKDLMRRYFIDPDLMKAHDEGLIHIHDMDYILQNCHNCDLINLEDMLNNGTVISGTAIDKPHSFSTACNIATQIIAQVASSQYGGQSITLSHLAPFVDVSRKAILKELKEEFSSIDDDKLKEVCHRRLLKEINKGVQIIQYQVVTLMTTNGQAPFITVFMYLNECKDEQTKNDLALIIEEVLKQRIIGVKNEKGVYITPAFPKLIYVLQEDNIEKGSKYYYLTELAAKCTAKRMVPDYISEKIMKEMKEGQVYPSMGAVVPESKVYWKIDGKAYYGPIEKMYHSMIDRYDDLEEECQFGQEGNPNKDIDLKDYNIEIYDNGAGKYVKCLMMNMNLASQFRMYKIRTYNPIDDTDINLVVTHDHPMMKLKSGFDPNLVTIDWNDPKDIDNKCEEIQAEYLKTGDYVFFAKEQRGIRTVEIVDQTIPKPVQILKVPIINNYDFVYDVTTESEHFMVNNLWSHNCRSFLRPWKDENGKYKFYGRFNQGVCTINLIDVACSSGKNIEKFWKIFDERLDMCRRVLMIKHNRLLGTVSDVAPILWQNGALARLNKGEKIDKLLYGGYSTISLGYAGLYECVYYMTGKSHTDPSVKDFALSIMQHMNDMCAKWKKETNIGFSVYGTPLESVTYKFAKCLKKRFGEIPEVTDHNYITNSYHCNVREHINAFDKLTMESEFQRLSPGGAISYVEVPNMQNNIPAILQLLKHIYNTIMYAEINTKSDYCHECGYTGEIVIEENEDHKLIWKCPNCGNTDQTKMNVARRTCGYIGTNFWNQGRTQEIKDRVLHL

SEQ ID NO: 1010 - protein, 1019 aa, unidentified
  REGION 1..1019: note = Description of Unknown: uncultivated organism sequence
  REGION 1..1019: note = Category: MG60 effectors
  REGION 1..1019: note = Description: MG60-225 effector
MKIIKRNGEEAIFDYHKIEIAISKANLEAPMKEQLSAETIHNIALNIEKQCQKENHEMNVEDIQDIVEKEIMKAGAFDIAKKYITYRYQHELMRKANSTDSQIMSLLECNNEEVKQENSNKNSTVVSVQRDYMAGEVSKDITKRFLLDEDIVQAHNEGIIHFHDSDYFAQHMHNCLAKETRFITDKGVRSFADFSDGERVTVLTKDGNWKGATVKKYGTQKLYRFTFYNSKKEHTQQVLATENHRWYLADGTVTTALKEGDKLVSAPVLYHQDEDYHSFNENEKLLWCKGFALGDSTVEYLAADTQNNSTRIRLCGEKDSQWLERFSIAGCKVREQVFENGDKSAVVYDYHKEIPAFKNVGEIRAFLNGLYCADGKMAVNNPHSRTYRIQSSNKTVIDFLREYAPVAGLYITAENDLTGENGRPYTILFSFNPDFSFAYTVLSKEFAREDEVWCLEVDDEHNFVLANGIVTGNCDLVNLEDMLQNGTVISGTKIDTPHSFSTACNIATQIIAQVASSQYGGQSISLTHLAPFVDVSRKKIAREMHRMEEETGVYYTEAQFNHIVHERLKDEITRGVQTIQYQVVTLMTTNGQSPFVTVFMYLNEAKDAQTKADLALIIEEVLKQRYQGVKNEAGYWVTPAFPKLIYVLEEDNINEGAPYFYLTELAAKCTARRMVPDYISEKKMKSLKEGNCYPCMGCRSFLTVYRDENGKPKFYGRFNQGVVTINLVDVACSSGGDYDKFWQILDERLKLCYRALMARHRRLLGTPSDVAPILWQNGALARLKKGEVIDKLLYNGYSTISLGYAGLCECVRYMTGKSHTDSEATPFALRVMKTLNEACDKWREKTNIAFSIYGTPMESTTYKFAKCLKRRFGEIEGVTDKNYITNSYHIHVTEKVDAFTKLTFESQFQELSPGGAVSYVEVPNMEGNIPAVIALLKHIYEKIMYAELNTKSDCCQKCGYTGEIRIVTDSENKLVWQCPQCGNTDQSTMNVARRTCGYIGTQFWNQGRTQEIKERVLHL

SEQ ID NO: 1011 - protein, 1020 aa, unidentified
  REGION 1..1020: note = Description of Unknown: uncultivated organism sequence
  REGION 1..1020: note = Category: MG60 effectors
  REGION 1..1020: note = Description: MG60-226 effector
MVVIKRNGERVDFDPRKIEVAILKAFAEVRSESDDDIRECAKRIAHEIESTGKDLSVEEIQDMVEKKLMATKYKNVAKAYVEYRYKHKLIREFNTTDKTIKELLCGESDYWNNENSNKNARVVTTQRDYIAGITSTDIARRLLLPADVVEADDEGIIHFHDKDYFAQLSLHNCFDVTTRFITSNGVKAFSDFNDCDEATVLTHTGEWKRARVRKYGKQDLYRIVLKRGHGKEHIVYATANHRWFLQDGSVTTNLHVGDSLMKTPVIANVNLDDADVFEKQLWCKGFAFGDGQYCKAWDGTKIRLCGHKNKYARIFRAAGYTCTSPGNFENGDQEAHIPRYNKNEIPEMTPAETRYFVYGLLCADGDHPTSKGNTKANEFKGIQVTGEEKNFQVYNLLNIAGYYVSGYTDITGKTNYGERSDVTRRYAIQANQSHCNWKVQAIEYAKTDYVWCLNVEDCHSFVLEGGIVTGNCELVNLEDMLQHGTVLNGVMIRKPHRLLTATTIATQIITAVTSSSYGGCTINLSHLAPFVRDSYNAYVKKYRDRGVDEQTTKEWAELDTKKEIADSVQTFNYQCNSMTNTNGQAPFLSVFMYLNDAPEYQKETAMLIEEFLNQRLLGFQNETGHYVTPAFPKLLYVLDENNITEDSEYWYLTELAAKCTAKRMVPDYMSAKIMRRDKIDKNGNGNVYGCMGCRSFLTPYVDKDGKPKYWGRFNQGVVTINLPDIALSSGGDMEKFWKIFDERMALCHKALRCRHERLALATSDVAPILWQNGALARLPKGSPIHPLLHDGYSTLSLGYAGLYECVKYMTGESHSHGKGKEFGLRVMQTLNDFCKKWKEEESIDYSLYGTPIESTTYKFSKCLKKRFGIIEGITDKDYITNSYHISVREKIDPFEKLAIEAEYQKLSPGGAISYVECADLTQNPTAVLEVMRFIYDNIMYAELNTKSDYCQVCGYDGEIQIIDENGKLSWRCPNCGNEDQTKMNVARRTCGYIGTQFWNQGRTQEIKERYVHIDNHEVGE

SEQ ID NO: 1012 - protein, 1093 aa, unidentified
  REGION 1..1093: note = Description of Unknown: uncultivated organism sequence
  REGION 1..1093: note = Category: MG60 effectors
  REGION 1..1093: note = Description: MG60-227 effector
MMNQEKSIESNIIREDERVILKKGAYEDGEFTETLPADLTDIDDWAFLDARFGGRETIEIPPCVKRIGGAAFAGCDLKYLVIPPSVESIGKDGEEGVFSGSQLENVTLSAQIEELPVWAFCECGKLRRVELPKHLRKIGMSAFYYCYSMEEIRFPEMLERIEEGAFSSCHSLQKIDLPKYLREIGDEAFEHCSSLEEIHLSESLERIGNEAFYSCSSLKEIHLPESLKHIGERAFFRCEQLRRVVFPDHEVLLGKGIFEYCSSELEICNVHVGDRSHCVEGWAYHDMPIKDVTISADVKEIENGAFSLCSRLEAVSFEEPSQLEKIGFSAFCGCKNLNHIQLPDSIRILDDSSFSECESIEQIDLPRGLLRLGNKVFARCKRLKQIIIPQGVQEIGHEMFSLCGSLERVQLPDSVAVISDRMFAYCTSLPEIDLPGNVIEIGNEAFHGCAKLNICIPRSVTKIGFRAFAATALKEVVIPTGVKEIASQTFENCEMLRKVTLPEGLEKIGTRAFASCSALEEIEIPDSVTHIDALAFQNCTALRSIVLSEHTKVEQGPEINSYDVPIDEYRSGVMWTQTEDEDVAAYQELLRRVVSIRPKAWNEEREENKEEKIAFNQEQKRAVEAIQGPVMIISCAGAGKTTVLLERARQMVRMGIAPEKILITTFSRAAAYDMRERFERNADICGVKFSTIHGLCRIILTSAYFYEADVVLSDEEKIRFFMECHSKKNEQDGFVGFYMDISGRISRYIIGHYEQSLPEIENKPELSKLEQDDTFLHLYHAYQAFKKARKKLDYDDLLVETHKCLASNEAIRNHWQGMLDYIMIDEYQDTSRLQAEIFFLLAGKKRNICVVGDDDQSIYAFRGTQKQVFDLFMKKYPDAQKRFLGMNYRSREYIIRAADCLIRHNRNRLEKNLEADRKEPGNILLKKASGRENQAYIVVECIKRLLQSGSNPSDIAILYRIRNESSMVVRLLEEAGIAYDKKESVEEMIQRIVAGGEKHDLQPHEDGHGVVLSTFHAAKGLEWKYVFIISANQGITPLKRLTESVDIEEERRLFYVAVTRAKDTLAILYIENNMASEDNSMQKPSMFLSEMGL

SEQ ID NO: 1013 - protein, 1267 aa, unidentified
  REGION 1..1267: note = Description of Unknown: uncultivated organism sequence
  REGION 1..1267: note = Category: MG60 effectors
  REGION 1..1267: note = Description: MG60-228 effector
MNEQISHLTSYIEALKKISSEAEIRGNFLNLLRKTLIKEDNFEWRTVEQSVHQKGLFVGRIDLSVGRVVFEFKRSLKDKKKRREGIQQLKTYLSSDEFKDAPFGILTDGKTFEVYKLENGELYPVDNFSLPDFEHLPDLSEEEVKALKKFLYKLDAYLLGNLKVPLTSSTIVRFFGYNSQVFAKVYSALREAYERVKDLKEVSLKFNQWKRYMELVYGKNLQDELFFRHTYLSVLIKILSGKLLEVPYDSIWELLSGEVFERFGIKNYVDKDFFGWIFEEEIKNDLDELFEEIDRLLEFKFEMGNLSEELEEDLLKELYQNIVTRGEREILGEYYTPDWLVERILGEVLKDKDIRTLKVLDPACGSGSFLFFAIKRKREENVPLREILSSVIGLDINPLAVLIARSNYLLALGKEFLKNRHEEIFLPVYTADALRVYVSKHTDLYGSKISVELNGFKVEIPIPPKSSDREQDLKITDLYIERIVEWAKEQVPKKEERFVEDFWRWLERNYPEEEKIISPYFAGYSRSFERQILELVRKKGDDIWTFVLKNIYKPLFLKEKFDLIVGNPPWLVYNSMHRGLQKFFEEFLKAYRIKYGGHLKTHLELATAFLVLTAGFYLKPEGEIAFVMPHSLLNGDQNSWFRKSYHSLMAQERNFPTLSLDILKIFDLKEVSPLFNVPSVVIFAKKKNEGFKKEIPATVFKGKLPKRNARFGEAQKYLTEIDKTLYFVETGKVNYWVYDPQRLGVSPYKNHFREGATIVPRSFWFVEIEKSPYGFSEKSIPIRSKKLGDEKVEFELRGNVPKRFFFKTLLSKRLYPFGFTEFDLVVLPLKITSKEEEELKELKEEIDTVYRWLREYKATGKDYEDLFAKTVNLASSITEFVQNPEYTEKSKKELLDYLLRFKELLTDEATYFCSNPDLPSYYWWESENADFSKPYEVLKHVKSATKPEKFYKLLDYYDFRNKVSIGECPNCGEILDRKPEKVFKCPNCGFEVNLSSAGDILKKWVNLSREVPKPFKDWLLEAQELWEKHRGEKADKDNIIDWLNYRNKLTNQPVEGGYLVLYTTSGSNLAALWIKNSPKFVIDTKTFFGLFETLEEAIYVSTLLNSPLISHKVKEYQSKGLFGARDFHKVIFNLPIPPYDPADPLHQKLVIFGKKARKKAMHPVIRNWLKGVHPNRIRTLGRWVVENELKEIDKLVAQLLELDVNLSFPKKDFRFFKTEKEAKKWIKENKERIDNEKVYPAKVLAVKYEIPFSKIAEFEVGVEFESV

SEQ ID NO: 1014 - protein, 755 aa, unidentified
  REGION 1..755: note = Description of Unknown: uncultivated organism sequence
  REGION 1..755: note = Category: MG60 effectors
  REGION 1..755: note = Description: MG60-229 effector
MHELIEKREPKEEKPMKIIKRNGAEVVFDIDKIIMAVTKANDAVDEKVRMTPLQIERISQSVQIACEEMGRSPSVEEIQDLVEKAIMAHGAFEVAKEYITYRYTRSLLRQSNTTDDRILSLIECNNEEVKQENANKNPTINAVQRDYMAGEVSKDITSRILLPKEVVDAHEAGIIHFHDADYYAQHMHNCDLVNLEDMLQNGTVISGTLIEKPHSFSTACNIATQIIAQVASNQYGGQSISLTHLAPFVQVSREKIRKTVEREMAAFGVAPAEETISKVVEDRLREEVRRGVQTIQYQVVTLMTTNGQAPFITVFMYLNEAKSEQEKKDLAMIIEETLRQRYEGVKNEKGVWITPAFPKLIYVLEEDNVREGTPYWYLTRLAAQCTAKRMVPDYISEKKMREYKLSKGETPGHGDVYTCMGCRSFLTPDRSGNGWDNVARAGNYEPGKPKYYGRFNQGVVTINLVDVALSSGRDMTKFWEVFEDRLELCHRALRCRHERLKGTLSDAAPILWQYGALARLPKGEPIDKLLYGGYSTISLGYAGLYECVKYMTGKSHTDDEAKPFALSVMQKMNDKCLQWKTAENIDYSLYGTPLESTTYKFAKCLQKRFGLIPGITDKSYITNSYHVHVTEPIDAFTKLRFEAEFQQLSPGGAISYVEVPNMQQNLDAVLEVMKFIYDHIMYAELNTKSDYCQVCGYDGEIEIKEDDGKLIWVCPQCGNTDQNKMNVARRTCGYIGTQFWNQGRTQEIKDRVLHL

SEQ ID NO: 1015 - protein, 756 aa, unidentified
  REGION 1..756: note = Description of Unknown: uncultivated organism sequence
  REGION 1..756: note = Category: MG60 effectors
  REGION 1..756: note = Description: MG60-230 effector
MQQSIFDVCVIIGLWFKKKRRSEVFTMKVIKRDGHIVDYSPDKIEEAVSKANLEVSEEDRVSDIQIRNIIKYIEGLHKKRMLVEDIQDVIEKRLMTLGKYELAKEYITYRYTRELVRRSNTTDKSIKELIDGESEYWNTENSNKNAKVVTTQRDYLAGITSTDITRRFLLPEDIVTAHDQGVIHFHDADYFAQNALHNCDLINLDDMLQNGTNINGVMIEKPHRFLTAMTIATQLITAVSSSQYGGCTITLTHLAPFVRSSKEFYLKKYKDRKLTKAQVEKFAAEDLKKEITDGVQTFQYQINSMTTTNGQAPFLSVCMYLGETEEYKDELAMIIEEVLKQRMEGMKNEKGVYITPAFPKLLYVLEEENINPKGKYYYLTELAARCTAKRMVPDYISEKVMKENKINSLGNGECFPCMGCRSFLTPDRMFNVGNISKALNYVENKGKYYGRFNQGVVTINLPDVALTSGKDMELFWKVFDDRLELCHRALQIRHKRLSKVTSDVAPILWQHGALARLEKGESIHELLHHGYSTISLGYAGLYECVKYMTGHSHTDNGKGHEFALEVMQHMNDKCNEWKEAEDIDYSLYGTPIESTTYKFAKCLRDRFGKIKGITDRDYITNSYHVPVFEEIDAFTKLKLESEFQRLSPGGAISYIETPNLENNIDVVMEVINFIYENIMYAELNTKSDYCQKCGYNGEILLDDDLEWYCPECGNRDHDTLNVARRTCGYIGTNFWNKGRTQEIKERVVHIDNKDDE

SEQ ID NO: 1016 - protein, 768 aa, unidentified
  REGION 1..768: note = Description of Unknown: uncultivated organism sequence
  REGION 1..768: note = Category: MG60 effectors
  REGION 1..768: note = Description: MG60-231 effector
MFCSCKKNLRVVIYIYDATKTYDCAKKLIVYKSIIKGAEVMKIIKRNGAEETFDRQKIKDAIAKANNETDGTPELTDRQIDYISLVIEDHCNEMNRALSVEEIQELVETHIILQGAPETAKRYIRYRFTRNLARASNTTDNQILSLIECNNEEVKQENSNKNPTVNSVQRDYMAGEVSKDLTKRILLPEDIVKAHEEGLIHFHDADYFAQHMHNCDLVNLEDMLQNGTVISGTMIEKPHSFSTACNIATQIIAQVASNQYGGQSISLAHLAPFVQISREKITRQVRAEMEEFGIDADDEQVKSLVEKRVRDEIKRGVQTIQYQVVTLLTTNGQAPFVTVFMYLNEAKNEQEKKDLAIIIEEVLKQRIKGTKNEVGVWVTPAFPKLIYVLEEDNITEDSRFWYLTKLAAECTAKRMVPDYISEKIMLKLKIDKNGNGNCYTCMGCRSFLTPYIDENGKPKYYGRFNQGVVTINLVDVACTAARDGNKSEEKFWQVLDERLELCHRALQCRHERLEGTLSDAAPILWQYGALARLKKGEPIDKLLHGGYSTLSLGYAGLWECVYEITGKKLTEKEGEEFGLRVMQRLNDACAEWKAAENIDYSIYGTPLESTTYKFAKCLQNRFGIIKGVTDRNYITNSYHIHVTEKIDAFSKLELESKFQKLSPGGAISYVEVPNMQQNIPAVLEVMKFIYNNIMYAELNTKSDYCQVCGYDGEIQIVEEDGKLVWRCPNCGNEDQSKMNVARRTCGYIGSQFWNQGRTQEIKERVLHL

SEQ ID NO: 1017 - protein, 768 aa, unidentified
  REGION 1..768: note = Description of Unknown: uncultivated organism sequence
  REGION 1..768: note = Category: MG60 effectors
  REGION 1..768: note = Description: MG60-232 effector
MFCSCKKNLCVVIYIYNATKTYGCAKKLIVYKSIIKGAEVMKIIKRNGAEETFDRQKIKDAIAKANNETDGTPELTDRQIDYISLVIEDHCNEMNRALSVEEIQELVETHIILQGAPETAKRYIRYRFTRNLARASNTTDNQILSLIECNNEEVKQENSNKNPTVNSVQRDYMAGEVSKDLTKRILLPEDIVKAHEEGLIHFHDADYFAQHMHNCDLVNLEDMLQNGTVISGTMIEKPHSFSTACNIATQIIAQVASNQYGGQSISLAHLAPFVQISREKITRQVRAEMEEFGIDADDEQVKSLVEKRVRDEIKRGVQTIQYQVVTLLTTNGQAPFVTVFMYLNEAKNEQEKKDLAIIIEEVLKQRIKGTKNEVGVWVTPAFPKLIYVLEEDNITEDSRFWYLTKLAAECTAKRMVPDYISEKIMLKLKIDKNGNGNCYTCMGCRSFLTPYVDENGKPKYYGRFNQGVVTINLVDVACTAARDGSKSEEKFWQVLDERLELCHRALQCRHERLEGTLSDAAPILWQYGALARLKKGEPIDKLLHGGYSTLSLGYAGLWECVYEITGKKLTEKEGEEFGLRVMQRLNDACAEWKAAENIDYSIYGTPLESTTYKFAKCLQNRFGIIKGVTDRNYITNSYHIHVTEKIDAFSKLELESKFQKLSPGGAISYVEVPNMQQNIPAVLEVMKFIYNNIMYAELNTKSDYCQVCGYDGEIQIVEEDGKLVWRCPNCGNEDQSKMNVARRTCGYIGSQFWNQGRTQEIKERVLHL

SEQ ID NO: 1018 - protein, 757 aa, unidentified
  REGION 1..757: note = Description of Unknown: uncultivated organism sequence
  REGION 1..757: note = Category: MG60 effectors
  REGION 1..757: note = Description: MG60-233 effector
MKVVKRDGTIVDFDEERIRTAISKANNEVEKDEVATEKEIEEIVDYVKHLKKKRILVEDIQDLIENKLMEFKRFSLAREYITYRYNRALIRKANTTDQSIKELIDGTSEYWNSENSNKNAKIVTTQRDYLAGITSTDITRRLLLTPEIVKAHDEGIIHFHDADYFAQNALNNCCLINLNDMLQNGTVINGMMIEKPHRFITACTIATQIILGVSSSQYGGCTVTLTHLAPFVRDSYNRHLKRYEDRNLPHKKAKEYAMQDTKKEIADGVQTFNYQVNSMTNTNGQAPFLSVNMYLGETEEYKEELAMIIEEFLNQRILGFKNEKGVYITPAFPKLLYVLEEDNIHKDSKYWYLTELAAKCTAKRMVPDYISEKMMKQLKINQYGEGDCYPCMGCRSFLTPDRVKGNLSKAKDYVEGKGKYYGRFNQGVVTINLPDVALSSKQNMDEFWKIFDERLELCHKALQLRYKRLSMITSDAAPLLWQHGAFARLGKGEKILPLLHNGYSTLSLGYAGLYECVKYMTGKSHTDGNEGENFGLEVMQHMNDKCAEWKAAEDIDYSLYGSPIESTTYKFAKCLKNRFGTVKGITDRNYITNSYHVPVFEEIDAFSKLKLESKFQRLSPGGAISYVETPNLQNNIEAVEEIIEFIYNNIMYAEINTKSDYCQKCGFDGEILTDENLEWYCPNCGNRDHDTLNVARRTCGYIGTNFWNKGRTQEIKERVLHVDNKDYEAPHAHCEHENCECEEKVKEDVKVGVQIQF

SEQ ID NO: 1019 - protein, 804 aa, unidentified
  REGION 1..804: note = Description of Unknown: uncultivated organism sequence
  REGION 1..804: note = Category: MG60 effectors
  REGION 1..804: note = Description: MG60-234 effector
MNQGSPLVSIIVRTKDRPHLLKEALESIEVQTYRPLEVVLVNDGGCALPKEVYEALLKDIPLQWIDLEENQGRARAGNKGIEAARGDYIGFLDDDDRFLPHHVELLVACLEGWDYKVCYSDAEICQRVFDPSQKVYEIKDCRPFASRDFDLLDLLLENFIPLPCILFTRRCLLEAGGFDPTFELYEDWDLLLRIGNLHPFYHVPEVTVRYIQWSQKLQIAQGEYHQGLQQISYGRIIEKHRQLLTPEMAKAILRVFKDLERTQARLNQVTDECKMLEKALREEREKEKHLTGRIRQLSERIESLTHEQRKLQESHQEVLKEKRSLEHQLALIRGSRAWRFIQRYGRLRNALRSSLKPFKGKRIEHLQKGLRVVKTEGVKGLQRRVSQYVTLPSVKRGIYPYVPVDGKEVSLGRIAEDLPLSVTVIIPTRNAGPEFGRTLKKIRNQEGLKDLEILVIDSGSHDKTLDMAREAGARVLEISPEEFHHAGTRNLAAQHARGDVLVFTVQDATPAGDDWLYRLVQPIQQGKADAVSARQIPRTDADLFARWATWGYFEYLGYAEDTVRQGVDARRMDIHQRRRLFHLDSVCLAIPKGLFERYPFQRAYAEDLDLGKRLFERGHALLAQVSNAVIHSHNRPADYFFLREYVNVKSLQAILGQCPEPRPLKEILSTLAWAYDQFCAEVGPWMEAMGKEHKPPSEAMGQLMARLREAFKRGERRVSPGERDPLLYRWLNEDGECQAHVLKVLEGRFLGVLGSLREYLSSHSDWGFPLPEVAVALHKCFAVAAGGAVAEMGGELPSKLIKGI

SEQ ID NO: 1020 - protein, 763 aa, unidentified
  REGION 1..763: note = Description of Unknown: uncultivated organism sequence
  REGION 1..763: note = Category: MG60 effectors
  REGION 1..763: note = Description: MG60-235 effector
MMRVVKRDGKIVDFDESRIKMAIGKANNEVDESQRATEEEIEKIVEYVKKIKKDRILVEDIQDIIENKLMEYKRFELAKAYITYRYSRALVRKANTTDQTVKELVEGNSEYWNNENSNKNARVVTTQRDYLAGITSTDITRRLLLPPEIVKAHDEGIIHFHDADYFAQNALTNCCLINLNDMLQNGTVINGVMIEKPHRFVTACTIATQIILGVSSSQYGGCTVTLTHLAPFVRDSYNRSLKKYQDRNLPEEECKKFAMQDTKKEIADGVQTFNYQVNSMTNTNGQAPFLSVNMYLGETDEYKDELAMIIEEFLKQRMLGFKNEKGVYITPAFPKLLYVLEEDNIHKDSKYWYLTELAAKCTAKRMVPDYISEKMMKKLKINQYGEGDCYPCMGCRSFLTPDRVKGNVAKAKDYVEGKGKYYGRFNQGVVTINLPDVALSSKKDEKEFWKIFDERLELCHEALQLRHKRLSGITSDVAPLLWQYGAYARLNKGEKLDKLLHGGYSTLSLGYAGLYECVKYMTGDSHTDGGKGEKFALEVMQHMNDKCAEWKKAEDIDYSLYGTPIESTTYKFAKCLKKRFGTVEGITDRNYITNSYHVPVFEEIDAFSKLKLESEFQRLSPGGAISYVETPNLQNNIEVVEQIIEFIYNNIMYAELNTKSDYCQKCGYTGEILIDDNLEWYCPNCGNRDHRTLNVARRTCGYIGTNFWNKGRTQEIKERVLHIDNKDFDAEKCTKCDENVEKPEKKTRAKVSAKEKAMASVHA

SEQ ID NO: 1021 - protein, 781 aa, unidentified
  REGION 1..781: note = Description of Unknown: uncultivated organism sequence
  REGION 1..781: note = Category: MG60 effectors
  REGION 1..781: note = Description: MG60-236 effector
MIISGTRYCVFALHKQQYLVWFVKYRKINANYVEIIEVPYRGVFNMENRDQMSEIHVKTNVIKRNGQEVSFDISKIINAIGKANKEVESIHQMNEFQIRAVADMIAKRIASFPHAVNVEDIQDMVEKGIMEMRGYEVAQKYVRYRYKREISRKSNTTDDGILSLIDLSNEEVKQENSNKNPVINSTQRDYMAGEVSKDLTKRLLLPEDIVKAHEEGIIHFHDADYFAQREHNCDLINLEDMLQNGTVISQTLIEKPHSFFTACNVTTQIVAQVASNQYGGQSFTLAHLAPFVDVSRKKITKEVMEERKETGESMDPGIIEKIVERRLKEEIKSGIQTIQYQLITLMTCNGQAPFVTMFMYLDEVPDGQTRKDLAMIIEEVLRQRMQGVKNEKGVWITPAFPKLIYVLDEDNIHDDSPYYYLTKLAAECTAKRMVPDYISAKIMKQMKNGDVYPCMGCRSFLTPDTEGLGPKGQHKYYGRFNQGVVTINLVDVACSSGGDMDKFWKILEDRLELCHRALRCRHERLLGTVSDVAPILWQYGALARLKKGETIDKLLFNNYSTISLGYAGLYEMCVRMLGVSHTTEEGRKFALAVMQKLNDKCAEWRKKENISYSVYGTPMESTTYKFAKCLQKRFGIIPGVTDKNYITNSYHVHVTEKIDAFHKLKFESEFQKLSPGGAISYIEVPNMQTNIPAVLTVMKYIYENIMYAELNTKSDYCMVCGYDGEIKIVEDENGKLVWECPNCGNRDQHKMSVARRTCGYIGTQFWNQGRTQEIKDRVLHL

SEQ ID NO: 1022 - protein, 772 aa, unidentified
  REGION 1..772: note = Description of Unknown: uncultivated organism sequence
  REGION 1..772: note = Category: MG60 effectors
  REGION 1..772: note = Description: MG60-237 effector
MLQGSFLLYMESRILNELKDIPEQKLVVGPIVQQLIQGGWKFEQLIFGKNEWKIPKTPSEASKREKGHSFDYFPVDIAVFDTPENCGDYRHILFIIECKQPTVEVGLQQLETYLSLEPHAKLGIWANNPESASEALYVYKNAKGLSLPQKGTIKQLPSISSSLSPNSEALCFDNMVIPSKDILYHAFSDLLDKVVAQDGNVTRREEQLDQLCNLVLLKLDSDKQGKIDTTSEVYFRPFATDSATASFIKEKFASFIDVYPDIFVSKSDQELRFDDTTIHEVVERLCRFNLIDISADTVSIAFQVLRSAALKQEEGQYFTPKQVIQAAIKLMDVSLSDIIIDPACGTGGFLIQSLIEMKDRYPNQEKEISRWAQLHIYGIDKDAIGIKLTKAIMQILNDGSAHCVRGDSVLTHTWKNKYQHLLSNQFKNGRFTKIFTNPPFGTNLKIKYSEAKKSGLSLLEYVETGKDIELGLLMFNRCYDLLKEGGRLCIVLPETYFFSPSYKYVRDWAFTRMKPICVANVPMDAFQGFCRAKTNLYIFEKLPSDFSGYTGSEEVLFLNPSTCGIYKNGSDRFVVDAQGKRTDVIDNKLLDCSIQVANGDLSNAFSVPLQKVIASDVLVPQYYDLSLQSPFETLTDKLNVQSISIGDLIDSGIISLFNGHGSPSNDLRNGCIPYVKVSDIRNLRINVNPTNLIPLELATKFWKSDHSNLKEWDLISPSRASSNIGEFAILLPGEENIVLTKEVFIIRVNPNSLGIDAFYLLWALSLMQTRKQ

SEQ ID NO: 1023 - protein, 769 aa, unidentified
  REGION 1..769: note = Description of Unknown: uncultivated organism sequence
  REGION 1..769: note = Category: MG60 effectors
  REGION 1..769: note = Description: MG60-238 effector
MKVIKRDGTIVEYDREKIRIAIEKANKEVSRKEKATDSEIEEIMSYIEDLKKGRILVEDIQDIIEEKLMEIKRYELAKKYITYRYTRALVRKANTTDQSIKELIEGESEYWNNENANKNARVVTTQRDYLAGITSTDITRRFLLPEDVVKAHDEGIIHFHDADYFAQNALTNCELINLEDMLQNGTIMNGVMIEKPHRFITACTIATQIILAVTSSTYGGATVSLAHLAPFVRSSYEKYYKKYKDNGLSKEQCEKFAKEDTKKEVADGVQTFNYQVNSMTNTNGQAPFLSVCMYLGETDEYKEELAMIIEEFLNQRILGFKNEKGVYITPAFPKLLYVLEEDNIHENSKYWYLTELAAKCTAKRMVPDYISEKKMKELKVDKNGDGQCYPCMGCRSFLTPYIDPVTNKPKYYGRFNQGVVTINLVDVALSSGKDLKKFWKIYDERLELCHKALQARHERLAKATSDIAPILWQHGAFARLPKGASIHPLLHGGYSTISLGYAGLYECVKYMTGKSHTDNGDGKDFAIEVMKKLNEKCQEWKEAEDIDYSVYGTPIESTTYKFAKCLQKRFGKIKGITDKNYITNSYHVPVFEEIDAFSKLKLESEFQRLSPGGAISYVETPNLQNNLEVVLQIMKFIYDNIMYAELNTKSDYCQKCGYTGEILIDDNLEWYCPNCGNRDHNTLNVARRTCGYIGSNFWNKGRTQEIKERVLHIDNKDDDCDCDECNCDHANTDTSKEEKSEEKQMNFMDYDVEEEITKSKKRMKQPAMV

SEQ ID NO: 1024 - protein, 768 aa, unidentified
  REGION 1..768: note = Description of Unknown: uncultivated organism sequence
  REGION 1..768: note = Category: MG60 effectors
  REGION 1..768: note = Description: MG60-239 effector
MFCSCKKNLCVVIYIYNATKTYDCAKKLIVYKSIIKGAEVMKIIKRNGAEETFDRQKIKDAIAKANNETDGTPELTDRQIDYISLVIEDHCNEMNRALSVEEIQELVETHIILQGAPETAKRYIRYRFTRNLARASNTTDNQILSLIECNNEEVKQENSNKNPTVNSVQRDYMAGEVSKDLTKRILLPEDIVKAHEEGLIHFHDADYFAQHMHNCDLVNLEDMLQNGTVISGTMIEKPHSFSTACNIATQIIAQVASNQYGGQSISLAHLAPFVQISREKITRQVRAEMEEFGIDADDEQVKSLVEKRVRDEIKRGVQTIQYQVVTLLTTNGQAPFVTVFMYLNEAKNEQEKKDLAIIIEEVLKQRIKGTKNEVGVWVTPAFPKLIYVLEEDNITEDSRFWCLTKLAAECTAKRMVPDYISEKIMLKLKIDKNGNGNCYTCMGCRSFLTPYVDENGKPKYYGRFNQGVVTINLVDVACTAARDGSKSEEKFWQVLDERLELCHRALQCRHERLEGTLSDAAPILWQYGALARLKKGEPIDKLLHGGYSTLSLGYAGLWECVYEITGKKLTEKEGEEFGLRVMQRLNDACAEWKAAENIDYSIYGTPLESTTYKFAKCLQNRFGIIKGVTDRNYITNSYHIHVTEKIDAFSKLELESKFQKLSPGGAISYVEVPNMQQNIPAVLEVMKFIYNNIMYAELNTKSDYCQVCGYDGEIQIVEEDGKLVWRCPNCGNEDQSKMNVARRTCGYIGSQFWNQGRTQEIKERVLHL

SEQ ID NO: 1025 - protein, 768 aa, unidentified
  REGION 1..768: note = Description of Unknown: uncultivated organism sequence
  REGION 1..768: note = Category: MG60 effectors
  REGION 1..768: note = Description: MG60-240 effector
MFCSCKKKLCVVIYIYNATKTYDCAKKLIVYKSIIKGAEVMKIIKRNGAEETFDRQKIKDAIAKANNETDGTPELTDRQIDYISLVIEDHCNEMNRALSVEEIQELVETHIILQGAPETAKRYIRYRFTRNLARASNTTDNQILSLIECNNEEVKQENSNKNPTVNSVQRDYMAGEVSKDLTKRILLPEDIVKAHEEGLIHFHDADYFAQHMHNCDLVNLEDMLQNGTVISGTMIEKPHSFSTACNIATQIIAQVASNQYGGQSISLAHLAPFVQISREKITRQVRAEMEEFGIDADDEQVKSLVEKRVRDEIKRGVQTIQYQVVTLLTTNGQAPFVTVFMYLNEAKNEQEKKDLAIIIEEVLKQRIKGTKNEVGVWVTPAFPKLIYVLEEDNITEDSRFWYLTKLAAECTAKRMVPDYISEKIMLKLKVDKNGNGNCYTCMGCRSFLTPYVDENGKPKYYGRFNQGVVTINLVDVACTAARDGNKSEEKFWQVLDERLELCHRALQCRHERLEGTLSDAAPILWQYGALARLKKGEPIDKLLHGGYSTLSLGYAGLWECVYEITGKKLTEKEGEEFGLRVMQRLNDACAEWKAAENIDYSIYGTPLESTTYKFAKCLQNRFGIIKGVTDRNYITNSYHIHVTEKIDAFSKLELESKFQKLSPGGAISYVEVPNMQQNIPAVLEVMKFIYNNIMYAELNTKSDYCQVCGYDGEIQIVEEDGKLVWRCPNCGNEDQSKMNVARRTCGYIGSQFWNQGRTQEIKERVLHL

SEQ ID NO: 1026 - protein, 778 aa, unidentified
  REGION 1..778: note = Description of Unknown: uncultivated organism sequence
  REGION 1..778: note = Category: MG60 effectors
  REGION 1..778: note = Description: MG60-241 effector
MLHCLKKCAAGNGWDRSERIENSEQHRETGKAQGENTMKIIKRNGAEETFRIEKIIVAITKANNAAEEAERLTPLQIDRIAQAVEIRCEEMNRSLSVEEIQDLVEDQIMAHGAFEVAKRYITYRYTRSLVRQSNTTDDRILSLIECNNEEVKQENANKNPTINAVQRDYMAGEVSKDITRRILLPRDIVEAHEAGIIHFHDADYYAQHMHNCDLVNLEDMLQNGTVISGTLIEKPHSFSTACNIATQIIAQIASNQYGGQSISLTHLAPFVDVSRRKIRESVVREIRELGAEAAEERISKIVEERLREEIKRGVQTIQYQVVTLMTTNGQAPFITVFMYLGEARNPQEKHDLAIIIEETLRQRYQGVKNEKGVWITPAFPKLIYVLEEDNIHEDSKYFYLTRLAAECTARRMVPDYISEKKMRELKLSKGETPGNGDVYTCMGCRSFLTPDSSGNGWDNVANAGNYEPGKPKYYGRFNQGVVTLNLVDVALSSGKEMDKFWKIFDERLDLCYRALMCRHERLKGTLSDAAPILWQYGALARLPKGEPIDKLLYNGYSTISLGYAGLYECVKYMTGKSHTDPSATPFALDVMRYLNAACAKWRAETHIDFSLYGTPLESTTYKFAKCLQKRFGIVPGVTDKSYITNSYHIHVTEKINAFDKLAFESQFQALSPGGAISYVEVPDMQNNIDAVLEVMKFIYDNIMYAELNTKSDYCQVCGYDGEIEVLEDTDGKLVWTCPNCGNTDQSKMNVARRTCGYIGTQFWNQGRTQEIKERVLHL

SEQ ID NO: 1027 - protein, 763 aa, unidentified
  REGION 1..763: note = Description of Unknown: uncultivated organism sequence
  REGION 1..763: note = Category: MG60 effectors
  REGION 1..763: note = Description: MG60-242 effector
MYIQPIITVSDTTHKFNFVKLFFQKNKNSLRDVRRGNGMKIIKRNGEEVVFDLKKIITAISKANNEVPPSEQLAGSTINSIAENIEKQCAAENHEMNVEAIQDLVEKAIMKAGAFDIAKKYITYRYQHQLMRRANSTDSQILSLLECNNEEVKQENSNKNSTVVSVQRDYMAGEVSKDITKRFLLDEDIVKAHDEGLIHFHDADYFAQHMHNCDLVNLEDMLQNGTVISGTKIDTPHSFSTACNIATQIIAQVASSQYGGQSISLAHLAPFVEVSRKKFQRETMRVEEQTGVKFTDEQFKKIVEMRIRDEITRGVQTIQYQVVTLMTTNGQSPFITVFMYLNEAKNEQEKADLAMIIEEMLKQRYQGVKNEKGFWVTPAFPKLIYVLEPDNIEPGSKYYSLTELAAKCTARRLVPDYISEKKMLELKVDANGKGNCYPCMGCRSFLTPYLDEHGKPKYYGRFNQGVVTINLVDVACSSNGDYKSFWEIFDERLELCHKALMRRHQRLLGTPSDVAPILWQHGALARLEKGEKIDKLLFGGYSTISLGYAGLCECVRYMTGKPHTDPSATPFAIEIMKHLNEKCAEWKAASNIAFSLYGTPLESTTYKFAKCLKKRFGEIPGVTDKNYITNSYHVHVTEQMDAFTKLSFESQFQELSPGGAVSYVEVPNMENNIPAVMTLLKHIYENIMYAELNTKSDCCQKCGYTGEIQIVTDSDNKLVWQCPNCGNKDQATMNVARRTCGYIGTQYWNQGRTQEIKERVLHL

SEQ ID NO: 1028 - protein, 768 aa, unidentified
  REGION 1..768: note = Description of Unknown: uncultivated organism sequence
  REGION 1..768: note = Category: MG60 effectors
  REGION 1..768: note = Description: MG60-243 effector
MFCSCKKNLCVVIYIYNATKTYDCAKKLIVYKSIIKGAEVMKIIKRNGAEETFDRQKIKDAIAKANNETDGTPELTDRQIDYISLVIEDHCNEMNRALSVEEIQELVETHIILQGAPETAKRYIRYRFTRNLARASNTTDNQILSLIECNNEEVKQENSNKNPTVNSVQRDYMAGEVSKDLTKRILLPEDIVKAHEEGLIHFHDADYFAQHMHNCDLVNLEDMLQNGTVISGTMIEKPHSFSTACNIATQIIAQVASNQYGGQSISLAHLAPFVQISREKITRQVRAEMEEFGIDADDEQVKSLVEKRVRDEIKRGVQTIQYQVVTLLTTNGQAPFVTVFMYLNEAKNEQEKKDLAIIIEEVLKQRIKGTKNEVGVWVTPAFPKLIYVLEEDNITEDSRFWYLTKLAAECTAKRMVPDYISEKIMLKLKIDKNGNGNCYTCMGCRSFLTPYVDENGKPKYYGRFNQGVVTINLVDVACTAARDGSKSEEKFWQVLDERLELCHRALQCRHERLEGTLSDAAPILWQYGALARLKKGEPIDKLLHGGYSTLSLGYAGLWECVYEITGKKLTEKEGEEFGLRVMQRLNDACAEWKAAENIDYSIYGTPLESTTYKFAKCLQNRFGIIKGVTDRNYITNSYHIHVTEKIDAFRKLELESKFQKLSPGGAISYVEVPNMQQNIPAVLEVMKFIYNNIMYAELNTKSDYCQVCGYDGEIQIVEEDGKLVWRCPNCGNEDQSKMNVARRTCGYIGSQFWNQGRTQEIKERVLHL

SEQ ID NO: 1029 - protein, 768 aa, unidentified
  REGION 1..768: note = Description of Unknown: uncultivated organism sequence
  REGION 1..768: note = Category: MG60 effectors
  REGION 1..768: note = Description: MG60-244 effector
MFCSCKKKLCVVIYIYNATKTYDCAKKLIVYKSIIKGAEVMKIIKRNGAEETFDRQKIKDAIAKANNETDGTPELTDRQIDYISLVIEDHCNEMNRALSVEEIQELVETHIILQGAPETAKRYIRYRFTRNLARASNTTDNQILSLIECNNEEVKQENSNKNPTVNSVQRDYMAGEVSKDLTKRILLPEDIVKAHEEGLIHFHDADYFAQHMHNCDLVNLEDMLQNGTVISGTMIEKPHSFSTACNIATQIIAQVASNQYGGQSISLAHLAPFVQISREKITRQVRAEMEEFGIAADDEQVKSLVEKRVRDEIKRGVQTIQYQVVTLLTTNGQAPFVTVFMYLNEAKNEQEKKDLAIIIEEVLKQRIKGTKNEVGVWVTPAFPKLIYVLEEDNITEDSRFWYLTKLAAECTAKRMVPDYISEKIMLKLKVDKNGNGNCYTCMGCRSFLTPYVDENGKPKYYGRFNQGVVTINLVDVACTAARDGSKSEEKFWQVLDERLELCHRALQCRHERLEGTLSDAAPILWQYGALARLKKGEPIDKLLHGGYSTLSLGYAGLWECVYEITGKKLTEKEGEEFGLRVMQRLNDACTEWKAAENIDYSIYGTPLESTTYKFAKCLQNRFGIIKGVTDRNYITNSYHIHVTEKIDAFSKLELESKFQKLSPGGAISYVEVPNMQQNIPAVLEVMKFIYNNIMYAELNTKSDYCQVCGYDGEIQIVEEDGKLVWRCPNCGNEDQSKMNVARRTCGYIGSQFWNQGRTQEIKERVLHL

SEQ ID NO: 1030 - protein, 927 aa, unidentified
  REGION 1..927: note = Description of Unknown: uncultivated organism sequence
  REGION 1..927: note = Category: MG60 effectors
  REGION 1..927: note = Description: MG60-245 effector
MTKELSGVRVIELKTDLRKDQFWDRYERCFKTYHALYNEVPCWGLDWVEQKTQNQTSRELGCERVDLTAQRKALYERTDRTISYEQFSNCLKALWLGLLNCQQGNHMYTKLFEGAIQTDQMTAEDWAVLTEYVADPKSHNSQFLFRVSNTLKHIGFFSRPPFTATLFAPERKAITKDVMSDLKGWIEMKRMTEESYAAEEVQIQQMKAEVPVRIRQSLLRFFDTCIGLNLIGHFDERVHHYLRDCIIPALQQRTIPTEHFYLKSNRKDVGQKHIDFSLDIKFYELLAEMPELWNTLETSEDDLIPKPLILKHLHLLEAIMSHRAHRKTAAYAFVGEADYHRFYYLLGGNYTKHLISATGSELPDRVIWDNDKDVLMRNGRKVERLYVKVGDRKENFNFEVYTIAMNTKGLRGHRSTLKPTSYLQDLQIWSNPEGESTYLNFVRKGTERSAICKEPVLVYRNGAFFLRLSMSVEGMRASEEHIALQYYLSAAATGSDLSKDTEKTVERFNLIQGKTYKVMSVDLGIRSPFAWAVTESTITGVANPSQILNSGEMEIADDPDYTELFYAYKNLGHLIGQVKSSSKGKGLKADSHLVDMIHTVQRFFADYKVAGQRRSQIFEQFSKDPDPLYQMDQMMKRYENNLESVKKDFSFLINILFKYVTLQFGALRNRRRSYLSQNQMADQKFDQDFKWLNILEQRKRVTRSLSYLGTDNSRIPICLEQQKLDYNGCKDNFLKQLASKIVRIAHQNDCCLIVLEDLEGYGKTLNQRDENFLTAFWSPKRVKDAIINAAQWYGIGVVTVSEAQTSQVHHESGRIGYRKGRDLFFLTPDGQIESVPSDINAAKNIGHRFFSRHTDLHQVYLKGSDEGAKRMKGCLLYQFGSLEAARTHLTGTGPTWYLDGVEWIDKTERNLRRDLLKQRVEIEKMPF

SEQ ID NO: 1031 - protein, 768 aa, unidentified
  REGION 1..768: note = Description of Unknown: uncultivated organism sequence
  REGION 1..768: note = Category: MG60 effectors
  REGION 1..768: note = Description: MG60-246 effector
MFCSCKKNLRVVIYIYNATKTYDCAKKLIVYKSIIKGAEVMKIIKRNGAEETFDRQKIKDAIAKANNETDGTPELTDRQIDYISLVIEDHCNEMNRALSVEEIQELVETHIILQGAPETAKRYIRYRFTRNLARASNTTDNQILSLIECNNEEVKQENSNKNPTVNSVQRDYMAGEVSKDLTKRILLPEDIVKAHEEGLIHFHDADYFAQHMHNCDLVNLEDMLQNGTVISGTMIEKPHSFSTACNIATQIIAQVASNQYGGQSISLAHLAPFVQISREKITRQVRAEMEEFGIDADDEQVKSLVEKRVRDEIKRGVQTIQYQVVTLLTTNGQAPFVTVFMYLNEAKNEQEKKDLAIIIEEVLKQRIKGTKNEVGVWVTPAFPKLIYVLEEDNITEDSRFWYLTKLAAECTAKRMVPDYISEKIMLKLKIDKNGNGNCYTCMGCRSFLTPYVDENGKPKYYGRFNQGVVTINLVDVACTAARDGSKNEEKFWQALDERLELCHRALQCRHERLEGTLSDAAPILWQYGALARLKKGEPIDKLLHGGYSTLSLGYAGLWECVYEITGKKLTEKEGEEFGLRVMQRLNDACAEWKAAENIDYSIYGTPLESTTYKFAKCLQNRFGIIKGVTDRNYITNSYHIHVTEKIDAFSKLELESKFQKLSPGGAISYVEVPNMQQNIPAVLEVMKFIYNNIMYAELNTKSDYCQVCGYDGEIQIVEEDGKLVWRCPNCGNEDQSKMNVARRTCGYIGSQFWNQGRTQEIKERVLHL

SEQ ID NO: 1032 - protein, 768 aa, unidentified
  REGION 1..768: note = Description of Unknown: uncultivated organism sequence
  REGION 1..768: note = Category: MG60 effectors
  REGION 1..768: note = Description: MG60-247 effector
MFCSCKKNLRVVIYIYNATKTYDCAKKLIVYKSIIKGAEVMKIIKRNGAEETFDRQKIKDAISKANNETDGTPELTDRQIDYISLVIEDHCNEMNRALSVEEIQELVETHIILQGAPETAKRYIRYRFTRNLARASNTTDNQILSLIECNNEEVKQENSNKNPTVNSVQRDYMAGEVSKDLTKRILLPEDIVKAHEEGLIHFHDADYFAQHMHNCDLVNLEDMLQNGTVISGTMIEKPHSFSTACNIATQIIAQVASNQYGGQSISLAHLAPFVQISREKITRQVRAEMEEFGIAADDEQVKSLVEKRVRDEIKRGVQTIQYQVVTLLTTNGQAPFVTVFMYLNEAKNEQEKKDLAIIIEEVLKQRIKGTKNEVGVWVTPAFPKLIYVLEEDNITEDSRFWYLTKLAAECTAKRMVPDYISEKIMLKLKVDKNGNGNCYTCMGCRSFLTPYVDENGKPKYYGRFNQGVVTINLVDVACTAARDGNKSEEKFWQVLDERLELCHRALQCRHERLEGTLSDAAPILWQYGALARLKKGEPIDKLLHGGYSTLSLGYAGLWECVYEITGKKLTEKEGEEFGLRVMQRLNDACAEWKAAENIDYSIYGTPLESTTYKFAKCLQNRFGIIKGVTDRNYITNSYHIHVTEKIDAFSKLELESKFQKLSPGGAISYVEVPNMQQNIPAVLEVMKFIYNNIMYAELNTKSDYCQVCGYDGEIQIVEEDGKLVWRCPNCGNEDQSKMNVARRTCGYIGSQFWNQGRTQEIKERVLHL

SEQ ID NO: 1033 - protein, 768 aa, unidentified
  REGION 1..768: note = Description of Unknown: uncultivated organism sequence
  REGION 1..768: note = Category: MG60 effectors
  REGION 1..768: note = Description: MG60-248 effector
MFCSCKKNLRVVIYIYNATKTYDCAKKLIVYKSIIKGAEVMKIIKRNGAEETFDRQKIKDAIAKANNETDGTPELTDRQIDYISLVIEDHCNEMNRALSVEEIQELVETHIILQGAPETAKRYIRYRFTRNLARASNTTDNQILSLIECNNEEVKQENSNKNPTVNSVQRDYMAGEVSKDLTKRILLPEDIVKAHEEGLIHFHDADYFAQHMHNCDLVNLEDMLQNGTVISGTMIEKPHSFSTACNIATQIIAQVASNQYGGQSISLAHLAPFVQISREKITRQVRAEMEEFGIDADDEQVKSLVEKRVRDEIKRGVQTIQYQVVTLLTTNGQAPFVTVFMHLNEAKNEQEKKDLAIIIEEVLKQRIKGTKNEVGVWVTPAFPKLIYVLEEDNITEDSRFWYLTKLAAECTAKRMVPDYISEKIMLKLKIDKNGNGNCYTCMGCRSFLTPYVDENGKPKYYGRFNQGVVTINLVDVACTAARDGNKSEEKFWQVLDERLELCHRALQCRHERLEGTLSDAAPILWQYGALARLKKGEPIDKLLHGGYSTLSLGYAGLWECVYEITGKKLTEKEGEEFGLRVMQRLNDACAEWKAAENIDYSIYGTPLESTTYKFAKCLQNRFGIIKGVTDRNYITNSYHIHVTEKIDAFSKLELESKFQKLSPGGAISYVEVPNMQQNIPAVLEVMKFIYNNIMYAELNTKSDYCQVCGYDGEIQIVEEDGKLVWRCPNCGNEDQSKMNVARRTCGYIGSQFWNQGRTQEIKERVLHL

SEQ ID NO: 1034 - protein, 755 aa, unidentified
  REGION 1..755: note = Description of Unknown: uncultivated organism sequence
  REGION 1..755: note = Category: MG60 effectors
  REGION 1..755: note = Description: MG60-249 effector
MYELIEKREPKEEKPMKIIKRNGAEVVFDIDKIIMAVTKANDAVDEKVRMTPLQIERISQSVQIACEEMGRSPSVEEIQDLVEKAIMAHGAFEVAKEYITYRYTRSLLRQSNTTDDRILSLIECNNEEVKQENANKNPTINAVQRDYMAGEVSKDITSRILLPKEVVDAHEAGIIHFHDADYYAQHMHNCDLVNLEDMLQNGTVISGTLIEKPHSFSTACNIATQIIAQVAPNQYGGQSISLTHLAPFVQVSREKIRKTVEREMAAFGVAPAEETISKVVEDRLREEVRRGVQTIQYQVVTLMTTNGQAPFITVFMYLNEAKSEQEKKDLAMIIEETLRQRYEGVKNEKGVWITPAFPKLIYVLEEDNVREGTPYWYLTRLAAQCTAKRMVPDYISEKKMREYKLSKGETPGHGDVYTCMGCRSFLTPDRSGNGWDNVARAGNYEPGKPKYYGRFNQGVVTINLVDVALSSGRDMTKFWEVFEDRLELCHRALRCRHERLKGTLSDAAPILWQYGALARLPKGEPIDKLLYGGYSTISLGYAGLYECVKYMTGKSHTDDEAKPFALSVMQKMNDKCLQWKTAENIDYSLYGTPLESTTYKFAKCLQKRFGLVPGITDKSYITNSYHVHVTEPIDAFTKLRFEAEFQQLSPGGAISYVEVPNMQNNIDAVLEVMQFIYDNIMYAELNTKSDYCQVCGYDGEIEIKEDDGKLIWVCPQCGNTDQNKMNVARRTCGYIGTQFWNQGRTQEIKDRVLHL

SEQ ID NO: 1035 - protein, 909 aa, unidentified
  REGION 1..909: note = Description of Unknown: uncultivated organism sequence
  REGION 1..909: note = Category: MG60 effectors
  REGION 1..909: note = Description: MG60-250 effector
MNKVILTDAVPDIEKYWDYEANEGKKPSDFGASSSEKVWTKCPICGTSVRRNVRFTWEKDANGVGHVIHCRTCGKRNNNNSLVVLFPDIKKYWTYEKNEHDPEYYSISSGKKVYTRCPSCGEERYIAICDLIVNRNDRYELTQCIDCSLTLNPRRNVIGSIAKNYPDIDKYWDDKNVSKPDEIALNSQEIIFIHCPTCDKLIKRRALNSFRRDDQTGIYTLLDCHKCAAQKAGKIRGLNQSGALIDECPEIKEWWDAENNTIELKNITRGTHYKAQLKCPACHSSFTRQIHSFVSTKRDGRLLPVACPECGYSSKGDPNDNILRLCPEVDKWWDYEANSPYRPEQFTKGSQFQAHFICPDCGMHLYAGIHSLLKSDENGELHIRHKGNCLKYRSIESDNNLVKQYPQIKEWWDYEENGKALPEKFTIYSGKRMHFICPTCGAKSYRRITDAFAIEANSGEPILFNCPYCRNKKALSGKNSLLDTDPELAKEWSNSNNLKASEVLPTSSSRAKWVCPTCHGEYSAIIRDRKVDDNACPYCRNDKLLPGYNSLQDKKPELAKEWSTRNTLKADTVLFTSSSRVKWVCPTCHKEYSAIIRDRKLGDDSCPYCRQRRLLREHTSLWAVNPALAKEWSTKNPKKADEVLSSSCNSVLWICPTCHGEYSAIIRDRKVGDDACPYCKNDKVLPGFNSLQYKNPELAEEWSANNELKANEVLPTSSSRVKWVCPTCRGEYYAAIRDRKVGDDACPYCKNDKVLPGFNSLQYKNPELAEEWSANNELKANEVLPTSSSRVKWVCPTCRGEYYAAIRDRKVGDDACPYCKNDKVLPGYNSLKVRQPELVEREWCYPENILIGVYPDQILESYPGQAWWKCPTCKRKYLMSVKDRLMKQKRGHVACPQCRGRRRVRSFWV

SEQ ID NO: 1036 - protein, 768 aa, unidentified
  REGION 1..768: note = Description of Unknown: uncultivated organism sequence
  REGION 1..768: note = Category: MG60 effectors
  REGION 1..768: note = Description: MG60-251 effector
MFCSCKKNLRVVIYIYNATKTYDCAKKLIVYKSIIKGAEVMKIIKRNGAEETFDRQKIKDAIAKANNETDGTPELTDRQIDYISLVIEDHCNEMNRALSVEEIQELVETHIILQGAPETAKRYIRYRFTRNLARASNTTDNQILSLIECNNEEVKQENSNKNPTVNSVQRDYMAGEVSKDLTKRILLPEDIVKAHEEGLIHFHDADYFAQHMHNCDLVNLEDMLQNGTVISGTMIEKPHSFSTACNIATQIIAQVASNQYGGQSISLAHLAPFVQISREKITRQVRAEMEEFGIAADDEQVKSLVEKRVRDEIKRGVQTIQYQVVTLLTTNGQAPFVTVFMYLNEAKNEQEKKDLAIIIEEVLKQRIKGTKNEVGVWVTPAFPKLIYVLEEDNITEDSRFWYLTKLAAECTAKRMVPDYISEKIMLKLKIDKNGNGNCYTCMGCRSFLTPYVDENGKPKYYGRFNQGVVTINLVDVACTAARDGSKSEEKFWQVLDERLELCHRALQCRHERLEGTLSDAAPILWQYGALARLKKGEPIDKLLHGGYSTLSLGYAGLWECVYEITGKKLTEKEGEEFGLRVMQRLNDACAEWKAAENIDYSIYGTPLESTTYKFAKCLQNRFGIIKGVTDRNYITNSYHIHVTEKIDAFSKLELESKFQKLSPGGAISYVEVPNMQQNIPAVLEVMKFIYNNIMYAELNTKSDYCQVCGYDGEIQIVEEDGKLVWRCPNCGNEDQSKMNVARRTCGYIGSQFWNQGRTQEIKERVLHL

SEQ ID NO: 1037 - protein, 1240 aa, unidentified
  REGION 1..1240: note = Description of Unknown: uncultivated organism sequence
  REGION 1..1240: note = Category: MG60 effectors
  REGION 1..1240: note = Description: MG60-252 effector
MLKNQILKLTELTNKKELDKESDINSFLNKLPTIQKMFIVQNLLTELISIKNPFLETKNKMIEKIENNCYKYYKYTIQIKQIYDYCALKKPENSINYVLLKGKEAEIVLHEFEESRKNFITNFFFELRNNNILMMKIIKEIDINYYEQLGYFLTQFLYHNTTNTNFSQDELNLMLYLVMEDTVNNKFPDELTFEFLFNLNTEKEKMFLYYFVKNLTKKVEIRNYLTNIFHDLILNLESKNQKLSMNTTTLIREVLNLNNQNNQNNNDIVSDEKDDEYSRKTTMNAHDLLKNFKSLFNNADILNPEKKNTLRQTMISTKKKIEKVETKDDDLNLKKFKSEFDNCTINVETLRIKTFFEETNYTKNELYQSLNDLCNKNENRTSLENNFMEYLLCLKMESLKNETKKYTELYSNQMIYESFMESKKDNIKTEDEGNNIDEKYINNFMTITEFIQNLFEKILQSIDSLPYTIKCLLFFLDKLISKKYEQFKISTYQSSIIKLKFFFDGFILPILQNPFYNGCISDGVISDTTVENLKIISVIVEKFTSSNLFKIVNENIDPYYIIFNKFIVEHMQDFLKIHIAIDESIKNRFEPPKVLMELFESKDLNERNINYDFFKYNENESIQYQSVCFSYFDLMMFINTTEKENIKSYLESNGDIKSDYQLLLKYKIKNFEEGCKNNLSGKKKEFFYITNLKYKESFLKKIKSLTEEKEEFLDNYYKNQKSNSNMSENILLLKQCLIEVMIYLNKINKEDISSFIKRKNKLVLHHNSQINKYLLNKKYIGYKNIFEEKNNLSNINHIIKQKNFFSKLCLSQDAMEDGDFLEDIFPRIITKLKIELGHLIDYAKYERIIFCITFLQINIRNLPQIYRSNNFSKLFVEIINDVQNMIKGLQDNILNQYLFKIRGGDKLNLILSKYSQEIKSMEKYYTINYLFNKLTPHIPSKNKDEINKEKTIKQAKNTPSKKISSLSKSQIFFQPQNLIDLIPKKSILNFINEFHNYPASLKGIDDDVFSIEKKDEIPKLLHNYFNEIINLLQEEKMVKKYNQDDLVSICYDFENYILLKMHDKLLPDFPSKCDEFIYKKCLRLDFITPENMNADKKMINEDLLLTVTEYINKIDIKYTPIDKINMFGKAFQILQDSMSFSSGKSDVGTDDVLPLLHYVMIKAKPKMIYTNYVFCKYYINQNLLKKQTGFLLAQIGMFVKIICNMKFSNLKGVTEEQFGVDEEMPEDLKDIENKFEKLNP

SEQ ID NO: 1038 - protein, 1310 aa, unidentified
  REGION 1..1310: note = Description of Unknown: uncultivated organism sequence
  REGION 1..1310: note = Category: MG60 effectors
  REGION 1..1310: note = Description: MG60-253 effector
  VARIANT 998..1001: note = MOD_RES - Any amino acid
MSNFESYLNQFRVQKGEACNYTGMTINRGSFYIPEENRTTFLSKYYDHVFKQGGSSDLIERHSDLCCVLYDLDMKIDKESEERGYTREIINSFIEISTRIMKKYFDLPVSAYQCFVLEKDKPTVKKECKKDGVHLMFPYIVTEPSIQHLIRDEIVIEAKHLFEECLNTIEDIVDISVLDKNGWMLLGSSKIDGLPYNLTGIWSYENIEDVGNTFPNRVETSEYYTPSLDLVTLLSIRRFTLADITNFKSDMQDFLESWIDDFNTIQEEKNNIHTRRFHGNINKDMKVNMKTVQSLVSILSTDRAKNYEEWIELGFCLHTISDELLQTWIEFSERVDDYRETASADCSARWGKMRETGLGLGTLHMWAKADNYKAYLEIIQNDLEYFIVKTVNSALSNKDDAKDKAKKEVNISDVIFNVVLALKQKYYHYFICSSYEKKHWYEFEDIRWVEGDADVGLKRKIREDLYDDYVAVSTKYRKLSERFQNDHPNKEKYELISAEVFKVAQKLRDATFRKRLLEEASEQLYWSRDRSKQLSSSKFEEILDVNEKLIGMKNGVYDLEKQCFREARCEDYVSLSADIEYQEYFWNDEIIQDINTFISQVLTNKDVRDYVLQTFAMCLDGQIYNEHFHIYTGCHAKGSEILMHDGTIANVENVKVGDMLMGPDSKPREVHELVNGHSQMYEIIPSKGEPFVVNEDHIMVLKATTINNVVKCKNEKRFKLSWHERDIFGFPVSKCKNFPYNGRLKYKKNVIYYKTEDDARNAIEIYRNDLIMNNLNYIKNGDVIEIPLKEYIKRMKKINGAKNYFLFKEGVDFPAKDVKIDPYMLGYWLGDGTSKAFAITTMDDIVIDYFDQKTVVDENMDKKVYHKKNNKAKTIYYSSKERKPGKNRLLNAMKEYNIYNNKHIPSVYKFNNRQTRLELLAGLIDSDGHYNVKSKHYEITLKIEKLIDDTVYLARSLGFAVTKRTVKKTCTNNGKTGMYFNVLICGNNLNEIPVLIEXXXXFKVNKLKNDQYYGFKLNQDHLYLAGDFFVHHNCGSNGKSKILELFELSFGQYCSKLSIAALTQKRVSSSAATPEIARLRGRRFVVLQEPGENEILNVGLMKEMTGGDKIVARSLNKDPIEFKPQFNMILTCNQRPKIPSDDQGSWRRIRVVEFTSKFTANPDPNDPNQFMIDTDLTSKLKKWGKPFFWILTQYYKEFKKNGYKEPAEVTAATNEYQKEQDAYSEFVTDCLKLDKTSYADVKEVYTVFQEYVRYNNDQKPSKKAFEKYMNTRFGKFGRHRDSKCWKGFKIDEAALNENYGISENPEDELL

SEQ ID NO: 1039 - protein, 806 aa, unidentified
  REGION 1..806: note = Description of Unknown: uncultivated organism sequence
  REGION 1..806: note = Category: MG60 effectors
  REGION 1..806: note = Description: MG60-254 effector
MTSSSDLKKHAKFFRSLQEPFDPGPFKENLNVLEPRVDIEDTKSKACSVLTSPRKKVKPQVNLQEETSVMPESPATPKRKIWIPSVSSSELDTLIMNASEILDRALISKERGFCQFWTQRVGEISEKLSSLTETDYAGSDLKLLNESYRRAGGKSWFSITTSCPPNRNSSKIFSQLLQSSVPDCTVCEVTHSKTKLGVWQRREQVNLTGKKYKTLKVRLFPNKDQEDMLIGDSSRLRWYENAYNDIFPLDDYMKLIDKAKEDGEERPPLINWKTFQSKLKDYEYLEEQIGNMVDETHKTSMPVVYKQLKLKKGCKNILEDIALKEEINRKENERKKLEKEDKKKRENDGQEKIELTMSKEDKKVYRKKLKEDRKIATKNKRLRAKEEVENKKKAKLEEIQAKKQEREDQKKIAQTMPKDERKLYEAKLAEDRKIAAEEEAKNKKPRNTNEYPYPSWMENTFGKIISSKTNERIIRGAVANFTQNLNSAVSNYFNGNIKSFELRYRTAKDKHEFINFTDEHLPVWYKDVHGSYSYRFPIGHANKRRTSITWNDLMKTHKGSVIIIQDKQTKCWYGCLPVERDWYPPFDHRSENQGPMKKGEAIGLDPGMRKFLAGFTTTGETIYFGDRAFKIIGDLYSKISWIDSELAQYRAKMLDLSLEQKENLCKEKQAYWNRVKNLVTEMHWKCIRFLVLNYEYIFLEDFSTKGCIKKKPKGQDLSPLVKRILGQYSFYKFKQRLAYSCDKYGRKLILVHPARTTKDCPYCGNEQNVERSETYDCPKCNRILDRDQHSALNVLVKGMSILESRN

SEQ ID NO: 1040 - protein, 773 aa, unidentified
  REGION 1..773: note = Description of Unknown: uncultivated organism sequence
  REGION 1..773: note = Category: MG60 effectors
  REGION 1..773: note = Description: MG60-255 effector
MKIIKRNGSEAVFDIMKIISAVTRANNVVEEADRLTPMQIRRIAESVENSCLSMNRALSVEEIQDLVENQIMAHGAFEVAKNYITYRYTRTLVRKSNTTDEKILSLIESNNEEVKQENSNKNPTVNAVQRDYMAGEVSKDLTARVLLPQDIVDAHNEGIIHFHDADYFAQHMHNCDLVNLEDMLQNGTVISGTLIEKPHSFSTACNIATQIIAQIASNQYGGQSISLTHLAPFVDISRQKIRRSVLEEIKSFGVQPSEEAITNVVETRLRRKIRESVVREIRELGAEAAEERISKIVEERLREEIKRGVQTIQYQVVTLMTTNGQAPFITVFMYLGEARNEQERKDLAIIIEETLRQRIEGVKNEKGVWITPAFPKLIYVLEEDNITEDSPYWELTKLAARCTAKRMVPDYISEKKMRELKLSKGETPGHGDVYTCMGCRSFLTPDRSGTGWNNVANAGNYEPGKPKYYGRFNQGVVTINLVDIALSSGGGLDKFWKIFDDRLDLCYRALMCRHNRLKGTLSDAAPILWQYGALARLKKGEPIDKLLYGGYSTISLGYAGLYECVKYMTGKSHTDPAATPFALDIMHHLNDACAKWKAETDIDFSLYGTPLESTTYKFAKCLQKRFGIVPGITDKNYITNSYHIHVTEHINAFDKLAFESQFQALSPGGAISYVEVPNMQQNLDAVLEVMKFIYDHIMYAELNTKSDYCQVCGYDGEIEIKEDEDGKLIWTCPQCGNTDQSKMNVARRTCGYIGTQYWNQGRTQEIRDRVLHL

SEQ ID NO: 1041 - protein, 768 aa, unidentified
  REGION 1..768: note = Description of Unknown: uncultivated organism sequence
  REGION 1..768: note = Category: MG60 effectors
  REGION 1..768: note = Description: MG60-256 effector
MFCSCKKNLCVVIYIYDATKTYDCAKKLIVYKSIIKGAEVMKIIKRNGAEETFDRQKIKDAIAKANNETDGTPELTDRQIDYISLVIEDHCNEMNRALSVEEIQELVETHIILQGAPETAKRYIRYRFTRNLARASNTTDNQILSLIECNNEEVKQENSNKNPTVNSVQRDYMAGEVSKDLTKRILLPEDIVKAHEEGLIHFHDADYFAQHMHNCDLVNLEDMLQNGTVISGTMIEKPHSFSTACNIATQIIAQVASNQYGGQSISLAHLAPFVQISREKITRQVRAEMEEFGIAADDEQVKSLVEKRVRDEIKRGVQTIQYQVVTLLTTNGQAPFVTVFMYLNEAKNEQEKKDLAIIIEEVLKQRIKGTKNEVGVWVTPAFPKLIYVLEEDNITEDSRFWYLTKLAAECTAKRMVPDYISEKIMLKLKIDKNGNGNCYTCMGCRSFLTPYVDENGKPKYYGRFNQGVVTINLVDVACTAARDGNKSEEKFWQVLDERLELCHRALQCRHERLEGTLSDAAPILWQYGALARLKKGEPIDKLLHGGYSTLSLGYAGLWECVYEIKGKKLTEKEGEEFGLRVMQRLNDACAEWKAAENIDYSIYGTPLESTTYKFAKCLQNRFGIIKGVTDRNYITNSYHIHVTEKIDAFSKLELESKFQKLSPGGAISYVEVPNMQQNIPAVLEVMKFIYNNIMYAELNTKSDYCQVCGYDGEIQIVEEDGKLVWRCPNCGNEDQSKMNVARRTCGYIGSQFWNQGRTQEIKERVLHL

SEQ ID NO: 1042 - protein, 755 aa, unidentified
  REGION 1..755: note = Description of Unknown: uncultivated organism sequence
  REGION 1..755: note = Category: MG60 effectors
  REGION 1..755: note = Description: MG60-257 effector
MHELIEKREPKEEKPMKIIKRNGAEVVFDIDKIIMAVTKANDAVDEKVRMTPLQIERISQSVQIACEEMGRSPSVEEIQDLVEKAIMAHGAFEVAKEYITYRYTRSLLRQSNTTDDRILSLIECNNEEVKQENANKNPTINAVQRDYMAGEVSKDITSRILLPKEVVDAHEAGIIHFHDADYYAQHMHNCDLVNLEDMLQNGTVISGTLIEKPHSFSTACNIATQIIAQVASNQYGGQSISLTHLAPFVQVSREKIRKTVEREMAAFGVAPAEETISKVVEDRLREEVRRGVQTIQYQVVTLMTTNGQAPFITVFMYLNEAKNEQEKKDLAMIIEETLRQRYEGVKNEKGVWITPAFPKLIYVLEEDNVREGTPYWYLTRLAAQCTAKRMVPDYISEKKMREYKLSKGETPGHGDVYTCMGCRSFLTPDRSGNGWDNVARAGNYEPGKPKYYGRFNQGVVTINLVDVALSSGRDMTKFWEVFEDRLELCHRALRCRHERLKGTLSDAAPILWQYGALARLPKGEPIDKLLYGGYSTISLGYAGLYECVKYMTGKSHTDDEAKPFALSVMQKMNDKCLQWKTAENIDYSLYGTPLESTTYKFAKCLQKRFGLVPGITDKSYITNSYHVHVTEPIDAFTKLRFEAEFQQLSPGGAISYVEVPNMQNNIDAVLEVMQFIYDNIMYAELNTKSDYCQVCGYDGEIEIKEDDGKLIWVCPQCGNTDQNKMNVARRTCGYIGTQFWNQGRTQEIKDRVLHL

SEQ ID NO: 1043 - protein, 800 aa, unidentified
  REGION 1..800: note = Description of Unknown: uncultivated organism sequence
  REGION 1..800: note = Category: MG60 effectors
  REGION 1..800: note = Description: MG60-258 effector
MSLHFVLLRCIITQDVVLGIDNERYIKGLEHSGGSLMTRVFFAPYRLLLNCGEGTRKRLIRRSRKDMKIIKRSGTEVEFDISKIVAAVAKANKEVVEKDRLTREQINEIAKKVTLTCSGMNRTASVEEIQDMVENEIMEAQAFAVARKYITYRYTRALVRKANSTDEQILSLIECNNEEVKQENSNKNPVVNSVQRDYMAGEVSKDIAKRILLPEDVVKAHEEGIIHFHDSDYFAQHMHNCCLVNLEDMLQNGTVISETMIDKPKSFSTACNIATQSIAQIASSQYGGQSITLSHLAPFVDVSRKKYLKMVQEEFEEAGLALDHNQIAKIAELRVREEIKRGVQMIQYQVITLMTTNGQAPFVTVFMYLNEVPEGQTRDDLALVIEEMLRQRILGVKNEKGVYITPAFPKLIYVLEEDNITEDSKYWYLTKMAATCTAKRMVPDYISEKIMKKLKGGDVYACMGCRSFLTPDRFTEAGVGNIANAGNYDPNKHKYWGRFNQGVVTINLVDVACSSEGDMDKFWNIMDERLELCHKALMCRHERLLGTPSDVAPILWQYGALARLKRGEKIDRLLFDGYSTISLGYAGLCECTRYMTGLSHTNPEATPFAMEVMQHLNDACAKWKAESNIDFSIYGTPLESTTYKFAKCLQKRFGVIEGVTDKNYITNSYHVHVTEKIDAFSKLSFEAKFQELSPGGAVSYVEVPNMQNNIDAVLAVMKHIYDNIMYAELNTKSDYCQKCGYDGEIQIAENTDGKLVWKCPNCGNTDEETMNVARRTCGYIGTQFWNQGRTQEIQERVLHL

SEQ ID NO: 1044 - protein, 760 aa, unidentified
  REGION 1..760: note = Description of Unknown: uncultivated organism sequence
  REGION 1..760: note = Category: MG60 effectors
  REGION 1..760: note = Description: MG60-259 effector
MKIIKRSGTEVVFDIDKIVNAIRAANLEVEESSRLTDRQVVYAAQNVAEACENAGHTVSVEEIQDLVEDEIMRLDCYEVARHYIIYRYVQSLKRQKNTTDDKILSLIECNNEEVKQENSNKNPTVNSVQRDYMAGEISKDLTQRVLLPQEIVDAHNEGLIHFHDSDYFAQHMHNCDLVNLEDMLQNGTVISGTLIEKPHSFSTACNIATQIIAQVASSQYGGQSISLTHLAPFVEVSRQKIRGEVARELEELGVSASPEKVREVVEDRLRDEIRRGVQTIQYQVVTLMTTNGQAPFVTVFMYLNEARTPQEKHDLAMIVEETLRQRYEGVKNEAGVWITPAFPKLIYVLEDDNVHENSPYFYLTQLAAKCTAKRMVPDYISEKKMRELKLSKGETAGNGDCYTCMGCRSFLTPDRSGNGDCYTCMGCRSFLTPDRSGNGFNNVANALNYDPNKPKYYGRFNQGVVTINLPDVALSSHQDMDKFWKIFDERLELCHRALLCRHERLMGTLSDAAPILWQYGALARLKKGETIDKLLVGGYSTISLGYAGLYECVKYMTGHSHTEKEGTPFAMAVMQRMNDKCAEWKAESDIDFSLYGTPLESTTYKFAKCLQRRFGIIPGVTDKGYITNSYHVHVSEEIDAFDKLKFEGMFQQLSPGGAISYVEVPNMQDNLKAVIRVMQYIYDNIMYAELNTKSDYCQVCGYDGEIKIVEDDGKLVWECPNCGNRDQEKMNVARRTCGYIGTQFWNQGRTEEIRDRVLHL

SEQ ID NO: 1045 - protein, 768 aa, unidentified
  REGION 1..768: note = Description of Unknown: uncultivated organism sequence
  REGION 1..768: note = Category: MG60 effectors
  REGION 1..768: note = Description: MG60-260 effector
MFCSCKKNLCVVIYIYNATKTYDCVKKLIVYKSIIKGAEVMKIIKRNGAEETFDRQKIKDAISKANNETDGTPELTDRQIDYISLVIEDHCNEMNRALSVEEIQELVETHIILQGAPETAKRYIRYRFTRNLARASNTTDNQILSLIECNNEEVKQENSNKNPTVNSVQRDYMAGEVSKDLTKRILLPEDIVKAHEEGLIHFHDADYFAQHMHNCDLVNLEDMLQNGTVISGTMIEKPHSFSTACNIATQIIAQVASNQYGGQSISLAHLAPFVQISREKITRQVRAEMEEFGIAADDEQVKSLVEKRVRDEIKRGVQTIQYQVVTLLTTNGQAPFVTVFMYLNEAKNEQEKKDLAIIIEEVLKQRIKGTKNEVGVWVTPAFPKLIYVLEEDNITEDSRFWYLTKLAAECTAKRMVPDYISEKIMLKLKIDKNGNGNCYTCMGCRSFLTPYVDENGKPKYYGRFNQGVVTINLVDVACTAARDGSKSEEKFWQVLDERLELCHRALQCRHERLEGTLSDAAPILWQYGALARLKKGEPIDKLLHGGYSTLSLGYAGLWECVYEITGKKLTEKEGEEFGLRVMQRLNDACAEWKAAENIDYSIYGTPLESTTYKFAKCLQNRFGIIKGVTDRNYITNSYHIHVTEKIDAFSKLELESKFQKLSPGGAISYVEVPNMQQNIPAVLEVMKFIYNNIMYAELNTKSDYCQVCGYDGEIQIVEEDGKLVWRCPNCGNEDQSKMNVARRTCGYIGSQFWNQGRTQEIKERVLHL

SEQ ID NO: 1046 - protein, 768 aa, unidentified
  REGION 1..768: note = Description of Unknown: uncultivated organism sequence
  REGION 1..768: note = Category: MG60 effectors
  REGION 1..768: note = Description: MG60-261 effector
MFCSCKKNLCVVIYIYDATKTYDCAKKLIVYKSIIKGAEVMKIIKRNGAEETFDRQKIKDAIAKANNETDGTPELTDRQIDYISLVIEDHCNEMNRALSVEEIQELVETHIILQGAPETAKRYIRYRFTRNLARASNTTDNQILSLIECNNEEVKQENSNKNPTVNSVQRDYMAGEVSKDLTKRILLPEDIVKAHEEGLIHFHDADYFAQHMHNCDLVNLEDMLQNGTVISGTMIEKPHSFSTACNIATQIIAQVASNQYGGQSISLAHLAPFVQISREKITRQVRAEMEEFGIAADDEQVKSLVEKRVRDEIKRGVQTIQYQVVTLLTTNGQAPFVTVFMYLNEAKNEQEKKDLAIIIEEVLKQRIKGTKNEVGVWVTPAFPKLIYVLEEDNITEDSRFWYLTKLAAECTAKRMVPDYISEKIMLELKIDKNGNGNCYTCMGCRSFLTPYVDENGKPKYYGRFNQGVVTINLVDVACTAARDGNKSEEKFWQVLDERLELCHRALQCRHERLEGTLSDAAPILWQYGALARLKKGEPIYKLLHGGYSTLSLGYAGLWECVYEITGKKLTEKEGEEFGLRVMQRLNDACAEWKAAENIDYSIYGTPLESTTYKFAKCLQNRFGIIKGVTDRNYITNSYHIHVTEKIDAFSKLELESKFQKLSPGGAISYVEVPNMQQNIPAVLEVMKFIYNNIMYAELNTKSDYCQVCGYDGEIQIVEEDGKLVWRCPNCGNEDQSKMNVARRTCGYIGSQFWNQGRTQEIKERVLHL

SEQ ID NO: 1047 - protein, 756 aa, unidentified
  REGION 1..756: note = Description of Unknown: uncultivated organism sequence
  REGION 1..756: note = Category: MG60 effectors
  REGION 1..756: note = Description: MG60-262 effector
MHELIEKREPKEEKPMKIIKRNGAEVVFDIDKIIMAVTKANDAVDEKVRMTPLQIERISQSVQIACEEMGRSPSVEEIQDLVEKAIMAHGAFEVAKEYITYRYTRSLLRQSNTTDDRILSLIECNNEEVKQENANKNPTINAVQRDYMAGEVSKDITSRILLPKEVVDAHEAGIIHFHDADYYAQHMHNCDLVNLEDMLQNGTVISGTLIEKPHSFSTACNIATQIIAQVASNQYGGQSISLTHLAPFVQVSREKIRKTVEREMAAFGVAPAEETISKVVEDRLREEVRRGVQTIQYQVVTLMTTNGQAPFITVFMYLNEAKSEQEKKDLAMIIEETLRQRYEGVKNEKGVWITPAFPKLIYVLEEDNVREGTPYWYLTRLAAQCTAKRMVPDYISEKKMREYKLSKGETPGHGDVYTCMGCRSFLTPDRSGNGWDNVARAGNYEPGKPKYYGRFNQGVVTINLVDVALSSGRDMTKFWEVFEDRLELCHRALRCRHERLKGTLSDAAPILWQYGALARLPKGEPIDKLLYGGYSTISLGYAGLYECVKYMTGKSHTDDEAKPFALSVMQKMNDKCLQWKTAENIDYSLYGTPLESTTYKFAKCLQKRFGLIPGITDKSYITNSYHVHVTEPIDAFTKLRFEAEFQQLSPGGAISYVEVPNMQNNIDAVLEVMQFIYDNIMYAELNTKSDYCQVCGYDGEISIREDEDGKLVWVCPQCGNTDQSKMNVARRTCGYIGTQFWNQGRTQEIKDRVLHL

SEQ ID NO: 1048 - protein, 1076 aa, unidentified
  REGION 1..1076: note = Description of Unknown: uncultivated organism sequence
  REGION 1..1076: note = Category: MG60 effectors
  REGION 1..1076: note = Description: MG60-263 effector
MEKMQKLYEVRKSLRFELKPSKITFEKIKKEWIFNNNIFESQIFSQKFNEINFQAEEKENNYLFSINENKLNELVKRCDVKIENIKNIKEFIEDNPNELWRVWIDNEKIKIIDKDLKYILEEKSSWKKVFWNPEKKDKKTWNKWAQSNFTVKWKKWLFLTFDDIDAYFEEIRSTKNKKPKAWDFTNMFIDKISFLLKQYEVRKYQLWLNTKWNIEENEKKLFQTKRERISRIRSFLWMFLKLESVISVLNFNYKDNFSEFPVELKEIIISFNEDEDVNDIISEIELIFSESNLYLHKNIERKFSLNIRAINPNPENTKDNKIKTENEIFKDIEVLEEKISKLKNLKAQIKWERKDKKNSWDTNWKEHKKNKWDDVLKKLNPKWEESLFSKLTELRRDLEEVHLTHFAVLLEKEGLFYLALENKRVNNSKNWEIKKINNLELWKFFTKSNSWESKFLNYNVITFQWLRRLCLEESSSMKTENFLNKNNGKWTKWSNQQKKSININWRDEEYFDDLKDYLKFILKNNTDKIGVNFTENDFKEWKDIKWDENLENLEKIINKQWYKANWENFNFENLKKLEEEWNIELFQIYNKDFLIDKDFVTSNSDKEKFERIEYTKEQLKKEWKKFIPKYKDEYKKHKRNLFTIYWQDLFNDEENNQIRIKQEWKFYIRLAWEEEGERKISDNFSIKNKKRYSENKIFADFNLLLNPNTSNISKRCKQNKEFQKKYIKDFNLDIKGLNPKYYIGLDQWVNSLVSYCVMDENENIVTDKNWKPEIWDLSLVISNWENQGQFVEVEDTIIVWWDKWVWSEDKWILEQEEPNKRILKIDGNIKVFDYAEAIYSESYKRRKEIEKYCNNEIDFDEVSNLKKGYSSFVLHKIEQLAKKYSPAIISLEYLQDQKNKSRFVNKNWEWKKIDKQSENPKIYRFWTSTIECIEDALLKKFQFWYGKTENWKKQLVPFFSNKEELYKKGLQLWNIIFIDEKDTSVLCPSCKELLTRCKNPYHEEEWKRWGLYTDEDTKNIYWQFRKVFDILKHNPYNVCNWNSSEKNEKFSFIKSWDDLATYNIAKKWLEYIKNLK

SEQ ID NO: 1049 - protein, 1043 aa, unidentified
  REGION 1..1043: note = Description of Unknown: uncultivated organism sequence
  REGION 1..1043: note = Category: MG60 effectors
  REGION 1..1043: note = Description: MG60-264 effector
MIINNKRKEYKNKQMQINTSYDKDENISDNKKKTENIKVINGMGLNLDIKNKYQNGILSDEKSINLLGKNNNNSNSNCPIKIIKLNNINNFEVDGVSNNFDNQNGNKSNITHDSKYDSRRNFYIRNNSMKNINSKMVNSNFHNNVENVIFSNNNNIMLIDKNLSFNSERLDSRNAIKINKLKDDYIDYLQKEFEDKSKNNVQLDTSNKELLKKCNELILNNRLLNESLTDKNNKLTKISEENQYMKNEYNKSMANFRKMQEKTKVYEDQINLLKSNNTNNEKIIKELRQQIEQANSNLKKVKSEYEEKLKKTEEKYKNEIEENKKNMETLYNNKILGDDKNINNEKKIKSLMDEISYLKEKNQELIKDLETKEKTIELMYNDNAKLMNEANLKQGKLDQSYRQINDLKIILKHKESIINTFKMNIGENDRISLNKSNSCSFMKLDTSDVISENLTKLLNDNEENRMKLEVLNNRLKSIDEIRKKYHNLVKDNKAIPLTNNYSFNSRNSVNFTKEKLNTSFYSNCKNTNNKNNSQGEIDLKDNIENYNINKELNQSVRRSFLSSLSLNILNNSGIKNEENNNKNEKVIKKYIIDTSKDKDKDKDKDIKANILEGDKDKKPVISERFKSVEKKSIPFRGRNFYKRDENKNKRLLRQTTFENEENQKILHKRELEEESKDSRGSDEDSDKIKITTYVPKNFTFSGDEVIYEQNTEQIVNTTEGENNGSCYLYGIDRNDLFHIFDINNKIWLESKKIFDLNLDEKSSSFKTDYQYEGTLLYNTLRGVYILTGENTDTLYFFNSKSSSISKICKFNSSHNNGSMMFDNNENCLYVFGGKNITSCEYYSFYDRKVCKLPNLNIDRANSSFIISNNKIFAFFGFSYENDDYVRTIEYIDYNKKDKWIELNNITLLKNDISFDVESVSTMYYKQNASKILIYSGIQGEDEDFITEYYLIYDVRSNTMDKINKWNIKQYKNIGKKWKDYEITGNDPKGFHFAKNSRFILLPDNCIPEGYNENDIIEVLIDYKNNVHFIVQEKNKIDVYRGEM

SEQ ID NO: 1050 - protein, 768 aa, unidentified
  REGION 1..768: note = Description of Unknown: uncultivated organism sequence
  REGION 1..768: note = Category: MG60 effectors
  REGION 1..768: note = Description: MG60-265 effector
MFCSCKKNLRVVIYIYNATKTYDCAKKLIVYKSIIKGAEVMKIIKRNGAEETFDRQKIKDAISKANNETDGTPELTDRQIDYISLVIEDHCNEMNRALSVEEIQELVETHIILQGAPETAKRYIRYRFTRNLARASNTTDNQILSLIECNNEEVKQENSNKNPTVNSVQRDYMAGEVSKDLTKRILLPEDIVKAHEEGLIHFHDADYFAQHMHNCDLVNLEDMLQNGTVISGTMIEKPHSFSTACNIATQIIAQVASNQYGGQSISLAHLAPFVQISREKITRQVRAEMEEFGIAADDEQVKSLVEKRVRDEIKRGVQTIQYQVVTLLTTNGQAPFVTVFMYLNEAKNEQEKKDLAIIIEEVLKQRIKGTKNEVGVWVTPAFPKLIYVLEEDNITEDSRFWYLTKLAAECTAKRMVPDYISEKIMLKLKIDKNGNGNCYTCMGCRSFLTPYVDENGKPKYYGRFNQGVVTINLVDVACTAARDGSKSEEKFWQVLDERLELCHRALQCRHERLEGTLSDAAPILWQYGALARLKKGEPIDKLLHGGYSTLSLGYAGLWECVYEITGKKLTEKEGEEFGLRVMQRLNDACAEWKAAENIDYSIYGTPLESTTYKFAKCLQNRFGIIKGVTDRNYITNSYHIHVTEKIDAFSKLELESKFQKLSPGGAISYVEVPNMQQNIPAVLEVMKFIYNNIMYAELNTKSDYCQVCGYDGEIQIVEEDGKLVWRCPNCGNEDQSKMNVARRTCGYIGSQFWNQGRTQEIKERVLHL

SEQ ID NO: 1051 - protein, 755 aa, unidentified
  REGION 1..755: note = Description of Unknown: uncultivated organism sequence
  REGION 1..755: note = Category: MG60 effectors
  REGION 1..755: note = Description: MG60-266 effector
MHELIEKREPKEEKPMKIIKRNGAEVVFDIDKIIMAVTKANDAVDEKVRMTPLQIERISQSVQIACEEMGRSPSVEEIQDLVEKAIMAHGAFEVAKEYITYRYTRSLLRQSNTTDDRILSLIECNNEEVKQENANKNPTINAVQRDYMAGEVSKDITSRILLPKEVVDAHEAGIIHFHDADYYAQHMHNCDLVNLEDMLQNGTVISGTLIEKPHSFSTACNIATQIIAQVASNQYGGQSISLTHLAPFVQVSREKIRKTVEREMAAFGVAPAEETISKVVEDRLREEVRRGVQTIQYQVVTLMTTNGQAPFITVFMYLNEAKSEQEKKDLAMIIEETLRQRYEGVKNEKGVWITPAFPKLIYVLEEDNVREGTPYWYLTRLAAQCTAKRMVPDYISEKKMREYKLSKGETPGHGDVYTCMGCRSFLTPDRSGNGWDNVARAGNYEPGKPKYYGRFNQGVVTINLVDVALSSGRDMTKFWEVFEDRLELCHRALRCRHERLKGTLSDAAPILWQYGALARLPKGEPINKLLYGGYSTISLGYAGLYECVKYMTGKSHTDDEAKPFALSVMQKMNDKCLQWKTAENIDYSLYGTPLESTTYKFAKCLQKRFGLIPGITDKSYITNSYHVHVTEPIDAFTKLRFEAEFQQLSPGGAISYVEVPNMQNNIDAVLEVMQFIYDNIMYAELNTKSDYCQVCGYDGEIEIKEDDGKLVWVCPQCGNTDQNKMNVARRTCGYIGTQFWNQGRTQEIKDRVLHL

SEQ ID NO: 1052 - protein, 760 aa, unidentified
  REGION 1..760: note = Description of Unknown: uncultivated organism sequence
  REGION 1..760: note = Category: MG60 effectors
  REGION 1..760: note = Description: MG60-267 effector
MEEMEMNVKMNVIKRNGKEVPFDITKIVNAIGKANNEVDHVHQMNDYQIRAVADNIAHKIAGYSHAANVEDIQDMVETGIMEMRGYEVAQKYVRYRYKREISRKSNTTDDGILSLIDLSNEEVKQENSNKNPVINSTQRDYMAGEVSKDLTKRLLLPEEIVKAHEAGIIHFHDADYYAQREHNCDLINLEDMLQNGTVISQTMIEKPHSFFTACNVTTQIVAQVASNQYGGQSFTLAHLAPFVDISRQKIKKEVIAERKETGESMDESIIEKIVERRLKEEIKSGIQTIQYQLITLMTCNGQAPFVTMFMYLDEVPDGRTRKDLAMIIEEVLRQRMQGVKNEKGIWITPAFPKLIYVLDEDNIHDDSPYYYLTRLAAECTAKRMVPDYISAKIMKNLKHGDVYPCMGCRSFLTPDTEGLGENGKHKYYGRFNQGVVTINLVDVACSSGGDMDKFWEILEDRLELCHRALRCRHERLLGTVSDVAPILWQYGAIARLKKGETIDKLLFNNYSTISLGYAGLYEMCVRMLGVSHTTDEGRKFALAVMQKLNDKCSEWRAAENISYSVYGTPMESTTYKFAKCLQKRFGIIPGVTDKNYITNSYHVHVSEHIDAFHKLKFESDFQRLSPGGAISYIEVPNMQTNIPAVLTVMKYIYENIMYAELNTKSDYCMACGYDGEIRIIEDETGKLIWECPNCGNRDQHKMSVARRTCGYIGTQFWNQGRTQEIKGSPPFVSMQKLRIPRKLRNPYAQVEVVISSPRYG

SEQ ID NO: 1053 - protein, 768 aa, unidentified
  REGION 1..768: note = Description of Unknown: uncultivated organism sequence
  REGION 1..768: note = Category: MG60 effectors
  REGION 1..768: note = Description: MG60-268 effector
MFCSCKKNLSVVIYIYDATKTYDCAKKLIVYKSIIKGAEVMKIIKRNGAEETFDRQKIKDAIAKANNETDGTPELTDRQIDYISLVIEDHCNEMNRALSVEEIQELVETHIILQGAPETAKRYIRYRFTRNLARASNTTDNQILSLIECNNEEVKQENSNKNPTVNSVQRDYMAGEVSKDLTKRILLPEDIVKAHEEGLIHFHDADYFAQHMHNCDLVNLEDMLQNGTVISGTMIEKPHSFSTACNIATQIIAQVASNQYGGQSISLAHLAPFVQISREKITRQVRAEMEEFGIDADDEQVKSLVEKRVRDEIKRGVQTIQYQVVTLLTTNGQAPFVTVFMYLNEAKNEQEKKDLAIIIEEVLKQRIKGTKNEVGVWVTPAFPKLIYVLEEDNITEDSRFWYLTKLAAECTAKRMVPDYISEKIMLKLKIDKNGNGNCYTCMGCRSFLTPYVDENGKPKYYGRFNQGVVTINLVDVACTAARDGNKSEEKFWQVLDERLELCHRALQCRHERLEGTLSDAAPILWQYGALARLKKGEPIDKLLHGGYSTLSLGYAGLWECVYEITGKKLTEKEGEEFGLRVMQRLNDACAEWKAAENIDYSIYGTPLESTTYKFAKCLQNRFGIIKGVTDRNYITNSYHIHVTEKIDAFSKLELESKFQKLSPGGDISYVEVPNMQQNIPAVLEVMKFIYNNIMYAELNTKSDYCQVCGYDGEIQIVEEDGKLVWRCPNCGNEDQSKMNVARRTCGYIGSQFWNQGRTQEIKERVLHL

SEQ ID NO: 1054 - protein, 941 aa, unidentified
  REGION 1..941: note = Description of Unknown: uncultivated organism sequence
  REGION 1..941: note = Category: MG60 effectors
  REGION 1..941: note = Description: MG60-269 effector
MDFLSLSSEYQSYVDYIDNSLIIMKYFITFYQSLQNSFKIFSKNTRESLNTLFSNLIQFDNRSTFSKKFFEFYRLFEKYLTKLDLLSEKILTQIVEPTLDIQKHFKLKTDIEIKNLFEIIKSTINQKKKLEIIKQNYFDYSKAAEAQEKSLVEVMDDENQQNINYQNNILTKLRMESAEECEKYRNMVNETNKLYNDNNKKYFPIISSLKDCEEQRLYFIYSNFQKFISILTEQKNSLNFVVSNYENEDVFKVKIDDDMIMYQEKFSYTFKQNERFKKEDFILYDIYRRNIESIINSSNKLIKQNNIPVPNIDINFVSNENNIPIKLEQNDDISFQSLFNSNSYNINRKIFVAFENKLKTDGNFARNVIDKMLDDIFTKVLYKKYENKNQFDKLTDVLIDISMNSSIQNELFDVNYGILFIAEKTFYYDRITNSKYYLCKALSEKYQNFRNKVYWKRMLNYKKNSLIESLVEKEAMKKIKKDKIPTQQSSTFSFLWRSNSVDNNCINLISNNEKKRLTEKVKKLELFDILRDFLIHFGNFNLDLTISNDIIIEIASEDNIYSEQISFFVTFMNSNMYCVKNKKLKKYKKKENKKDIIVNKKILTSNNTKLRHILISLNSSIKYLQLKDYINLNLLNKTFYPISQKIIYKKFFLKQEQILEQEKHFKMWFNILHYDPNEIPYEKLLQDALDYNSPIIDLIQADVIRTFFDEDQENYRKKLQNILIAISYTYPKISYVQGMNYIVSFFLKITNNEKKSYDLMSCLLGKTDYGKSLLNEFEMIKKCFYVFERLIFIYLPELSYVLKKNNVSSSYYISPWFITLFTNSLSGNNTKIILRIIDMLILEGYNCIIRIGLVLLKHYQENLIKMKFEELLHFLINELKEKYEFFHNNNYEKFIELYNDMKIPKGLINNIENEYEIEKKVLKIREKDERIEKEKENEITI

SEQ ID NO: 1055 - protein, 1180 aa, unidentified
  REGION 1..1180: note = Description of Unknown: uncultivated organism sequence
  REGION 1..1180: note = Category: MG60 effectors
  REGION 1..1180: note = Description: MG60-270 effector
MAKIIQTLFIYISTREKEVEIMVIIKRNGKESLFEKSKIRNAIRKANAEAEAENQLSEGQIYLIADEIEEIAEKRSRALNVEEIQDLVEDKIMNCGKYEVARKYIKYRYNRELNRRSNTTDEKILSLIECENEEAKQENANKNPTIASVQRDYMAGEVSKDLTKRILLPQEIVDAHEKGIIHFHDADYYSQHIHNCDLINLEDMLQNGTVISGTLIEKPHSFSTACNIATQIIAQVASSQYGGQSITLSHLAPFVDVSRQKIMQKTKKAFDEAEMTYTEDQLKAVVENKVKEEIEKGVQIIQYQVVTLMTTNGQAPFITVFMYLNEVKDEQTKHDLAMIIEEVLKQRIQGVKNEKGVWITPAFPKLIYALEEDNIKEGSKYWYLTELAAKCTAKRMVPDYISEKKMLELKGDAYPCMGCVDGKETVKVKGVFSENPNEETLEIKLPIEKLWKEMSKKYQVKLQPNGKDYFIETPDLLIYDQKKGFVKNYGIIKNHNSDWLIITFSNGAKIKCTEDHPFETEDGRIIKAKDLTDADVIAHETDKLCYPKNIERIPAGVSDGFSYDVTTESEHFTVSGIYSHNCRSFLTPDRFTDNGAGNIANAKNYKPNEHKYYGRFNQGVVTINLPDAALSAKGDMNEFWKILDERLELCHKALKCRHERLLGTPTSIAPILWQYGALARLGKDEKIDKLLFGGYSTISLGYAGLWECVYGLIKKKITEPEGKELGLKIMQTLNDYCSKWKVDENIDYSLYGTPLESTTYKFAKCLQDRFGVVEGVSDKNYITNSYHIKVTEKVNAFEKLKFESEFQALSPGGAISYIEVPDMKDNIAAVLEVIKFIYDNIMYAELNTKSDYCQECGYDGEIQIVQEGNKLVWRCPNCGNEDQSKLNIARRTCGKQSSEIATIKNDRTSGKPRLYNNFEDYKAGNPEPSSQSNKNSKNSNYKVCDICGRHEKHIIGYYGKKLCNKHYNQIKKYGHVLENSPRTIYDKNEIKVEGEIAYIELYDKLYNVVALAMIDAEDINKVKYSKWRLNCNGYVISTNKFDGKTTFLHRRILNNTNQFVDHINGNVLDNRKQNLRLVTKSQNQMNVNYKGVSKTKNDKHYAHIKIKGKAINLGVYVDEEDALYARYFAEKLLFKEYRFPKEEPFVLTNRKNEIENYVRNRLEKYKDVITNDAENTKNAA

SEQ ID NO: 1056 - protein, 1239 aa, unidentified
  REGION 1..1239: note = Description of Unknown: uncultivated organism sequence
  REGION 1..1239: note = Category: MG60 effectors
  REGION 1..1239: note = Description: MG60-271 effector
MLKNQILKLTELTNKKELDKESDINSFLNKLPTIQKMFIVQNLLTELISIKNPFLETKNKMIEKIENNCYKYYKYTIQIKQIYDYCALKKPENSINYVLLKGKEAEIVLHEFEESRKNFITNFFFELRNNNILMMKIIKEIDINYYEQLGYFLTQFLYHNTTNTNFSQDELNLMLYLVMEDTVNNKFPDELTFEFLFNLNTEKEKMFLYYFVKNLTKKVEIRNYLTNIFHDLILNLESKNQKLSMNTTTLIREVLNLNNQNNQNNNDIVSDEKDDEYSRKTTMNAHDLLKNFKSLFNNADILNPEKKNTLRQTMISTKKKIEKVETKDDDLNLKKFKSEFDNCTINVETLRIKTFFEETNYTKNELYQRLNDLCNKNENRTSLENNFMEYLLCLKMESLKNETKKYTELYSNQMIYESFMESKKDNIKTEDEGNNIDEKYINNFMTITEFIQNLFEKILQSIDSLPYTIKCLLFFLDKLISKKYDIKLSSYQSSIIKLKFFFDGFILPILQNPFYNGCISDGVISDTTVENLKIISVIVEKFTSNNLFKIVNENIDPYYIIFNKFIVEHMQDFLKIHIAIDESIKNRFEPPKVLMELFESKDLNERNINYDFFKYNENESIQYQSVCFSYFDLMMFINTTEKENIKSYLESNGDIKSDYQLLLKYKIKNFEEGCKNNLSGGKKEFFYITNLKYKESFLKKIKSLTEEKEEFLDNYYKNQKSNSDMNENILLLKQCLIEVMIYLNKINKEDISSFIKRKNKLVLHHNSQINKYLLNKKYIGYKNIFEEKNNLSNINHIIKQKNFFSKLCLSQDAMEDGDFLEDIFPRIITKLKIELGHLIDYAKYERIIFCITFLQINIRNLPQIYRSNNFSKLFVEIINDVQNMIKGLQDNILNQYLFKIRGGDKLNLILSKYSQEIKSMEKYYTINYLFNKLTPHIPSKNKDEINKEKTIKQVKNTPSKKISSLSKSQIYFQPQNLIDLIPKKSILNFINEFHNYPASLKGIDDDVFSIEKKDEIPKLLHNYFNEIINLLQEEKMVKKYNQDDLVSICYDFENYILLKMHDKLLPDFPSKCDEFLYKKCLRLDFITPENMNADKKMINEDLLLTVTEYINKIDIKYTPIDKINMFGKAFQILQDSMSFSSGKSDVGTDDVLPLLHYVMIKAKPKMIYTNYVFCKYYINQNLLKKQTGFLLAQIGMFVKIICNMKFSNLKGVTEEQFGVDEEMPEDLKDIENKFEKLNP

SEQ ID NO: 1057 - protein, 755 aa, unidentified
  REGION 1..755: note = Description of Unknown: uncultivated organism sequence
  REGION 1..755: note = Category: MG60 effectors
  REGION 1..755: note = Description: MG60-272 effector
MHELIEKREPKEEKPMKIIKRNGAEVVFDIDKIIMAVTKANDAVDEKVRMTPLQIERISQSVQIACEEMGRSPSVEEIQDLVEKAIMAHGAFEVAKEYITYRYTRSLLRQSNTTDDRILSLIECNNEEVKQENANKNPTINAVQRDYMAGEVSKDITSRILLPKEVVDAHEAGIIHFHDADYYAQHMHNCDLVNLEDMLQNGTVISGTLIEKPHSFSTACNIATQIIAQVASNQYGGQSISLTHLAPFVQVSREKIRKTVEREMAAFGVAPADETISKVVEDRLREEVRRGVQTIQYQVVTLMTTNGQAPFITVFMYLNEAKSEQEKKDLAMIIEETLRQRYEGVKNEKGVWITPAFPKLIYVLEEDNVREGTPYWYLTRLAAQCTAKRMVPDYISEKKMREYKLSKGETPGHGDVYTCMGCRSFLTPDRSGNGWDNVARAGNYEPGKPKYYGRFNQGVVTINLVDVALSSGRDMTKFWEVFEDRLELCHRALRCRHERLKGTLSDAAPILWQYGALARLPKGEPIDKLLYGGYSTISLGYAGLYECVKYMTGKSHTDDEAKPFALSVMQKMNDKCLQWKTAENIDYSLYGTPLESTTYKFAKCLQKRFGLIPGITDKSYITNSYHVHVTEPIDAFTKLRFEAEFQQLSPGGAISYVEVPNMQNNIDAVLEVMQFIYDNIMYAELNTKSDYCQVCGYDGEIEIKEDDGKLIWVCPQCGNTDQNKMNVARRTCGYIGTQFWNQGRTQEIKDRVLHL

SEQ ID NO: 1058 - protein, 924 aa, unidentified
  REGION 1..924: note = Description of Unknown: uncultivated organism sequence
  REGION 1..924: note = Category: MG60 effectors
  REGION 1..924: note = Description: MG60-273 effector
MNLILYVNIVFIFYLTYSEELNKINFNKISFEYKYKANKRYLLNNKNQKLNNIVNIYNPYEKIAYISNTKNENGDLFITTNSENKNDNTRLVYGLKKDFTNYFRDNEGSYRIVMTNLESDNIYPSITSLTINKEEYLISFSHDGVFESLDYNKGHAYGRYSYTAIGYTSNVNKNTFIKLKYYNNSNYVLNSHIAKDGKSNFFFLIKINFRNGNLTKNRPDPVNETRVEKGFIGALATCFEIKEYIECLYTNSERYYKASIFDVLNFGNLYSKIIDENIVSEPQLFSKCIYFKDSIGAFIYYLSQNIQPILTFLKLTTPSPLSDDFNLDNYLGPITLNSNSKFDLGYGYASNDLIKLNDNNIIFTSVSNNYENIIIILIKLLKEDKNILINYYNIELNNEYNIKIYKDITTFTINNLFGIGMTNYNYSLSSSKTYSNYFIIGINSSNNISISEEIDIFDEDNIYGFKIKEININIDNNIFGYYFSGIQIINILNENLTDDNLGFYLYSNNSDKKIELNESVLYDDIINFKVIEDLGVKKDLYSIAFLPIISEANSTDYISIPDSIELFPENYANLEYFYQPDIFYGKKAFISFGVKNCYKTCQTCSYYGNHINHHCESCSTKYPYNTFNNCYNLTFKETNILTNEIISTQVNIIDTQNISSEIQEISRETSKNHDKDCDIKALFKKQCLYDEKYSKTNKDLIKDIKQSFKEHSLDDILEDLIKINEDFIIEKENVLYQITTSYNQNNKIYYNLSSIKLGKCEQILKANNNLTENESLIIFKVEYYIEGYIIPLIDYEVYNPRTKNKINLNLCQSEKIDIIHHITIDENELFKYDPESDYYNDICYAYTTTDETDIILKDRREEFLKNNLTLCENNCQFKGYDPKFHIVNCKCDIKTDLQCIFDSNFDIKRLTYNFLDIKNIINIL

SEQ ID NO: 1059 - protein, 920 aa, unidentified
  REGION 1..920: note = Description of Unknown: uncultivated organism sequence
  REGION 1..920: note = Category: MG60 effectors
  REGION 1..920: note = Description: MG60-274 effector
MASKFHWNASYSIYDKYFQCGKFIDLDKFDCPCETFGYNAFEKPPLTTEEKQLMHRFTFDAEQKHFTDMQIFAWQTKQRFWELYEELKFPFPENATITDNLIYPEKFDYQMERELQKRFCALKCYYNPRECYHNENHIGKLDKLMKKDFHQQFNPRFEKQFERNSVPKLKWKSKTSYPKEGLNELVDNDLGIWSKLFYDENGIAINFSLFTKENCEYGENVKYLGRPYCHFETKKFLDVIIALIEVTKDSFDNAQLEANKVYSESIECKGPIRRPILNQMPWGPVSFNEENPPCKGYMCNFVKRGNNFWNLEQYKIHKLHCCRYFSKHHYWMFTHSDKFVCNSGKIGQLYGPAMTRDACIVYPCNQTYCNQTCTCKFCTRRGECSSDLHKKHLARPTFKGNNLVMEDLSLECLVQKSSQCQEHWVTHPDKFKRKEDIEVEKNLYFHNGKLVKTPRDIAVQIIKFSGIKKSCDNCKEDVEDHFKEHMFPHLQCKLCLFMLRDATFWKMICYICNKNMVNFSAEQIKRHKRYHEKGFFGCQFCKYKTQKKFNMTRHLEEVHNHYKSSDEDISDCDESEGVSAGDNELSIHDSESGTEWDSNSDNEYGDDSDTDEYDDSLFKQDLFDPFVVKVKRKTRLFPEKEYVCTEAQCDKKFFYERNLHRHINSEHGENNEYSCGQCKKIFNRKDTLARHQFEVHGNLGDGTYRFPGTTSINNNFSCEQCGVKFKRKPYLKRHINEVHQLQDRQYDCEKCGKKFTRQEKMKRHIHDVHELQDGQYVCEECGKKFKRQQDMKRHIHEVHELQDGQYVCEECGKKFKRQQDMKRHMHEVHELHDRQYVCEECGQKFERQENMKTHIHEVHEKEDPQYPCEKCDKKFKRKYHLNRHIHDKHDSSGWEYICDLCGKSFKSKSNLKEHLHTHKM

SEQ ID NO: 1060 - protein, 768 aa, unidentified
  REGION 1..768: note = Description of Unknown: uncultivated organism sequence
  REGION 1..768: note = Category: MG60 effectors
  REGION 1..768: note = Description: MG60-275 effector
MFCSCKKNLCVVIYIYDATKTYDCAKKLIVYKSIIKGAEVMKIIKRNGAEETFDRQKIKDAIAKANNETDGTPELTDRQIDYISLVIEDHCNEMNRALSVEEIQELVETHIILQGAPETAKRYIRYRFTRNLARASNTTDNQILSLIECNNEEVKQENSNKNPTVNSVQRDYMAGEVSKDLTKRILLPEDIVKAHEEGLIHFHDADYFAQHMHNCDLVNLEDMLQNGTVISGTMIEKPHSFSTACNIATQIIAQVASNQYGGQSISLAHLAPFVQISREKITRQVRAEMEEFGIDADDEQVKSLVEKRVRDEIKRGVQTIQYQVVTLLTTNGQAPFVTVFMYLNEAKNEQEKKDLAIIIEEVLKQRIKGTKNEVGVWVTPAFPKLIYVLEEDNITEDSRFWYLTKLAAECTAKRMVPDYISEKIMLKLKIDKNGNGNCYTCMGCRSFLTPYVDENGKPKYYGRFNQGVVTINLVDVACTAARDGNKSEEKFWQVLDERLELCHRALQCRHERLEGTLSDAAPILWQYGALARLKKGEPIDKLLHGGYSTLSLGYAGLWECVYEIKGKKLTEKEGEEFGLRVMQRLNDACAEWKAAENIDYSIYGTPLESTTYKFAKCLQNRFGIIKGVTDRNYITNSYHIHVTEKIDAFSKLELESKFQKLSPGGAISYVEVPNMQQNIPAVLEVMKFIYNNIIYAELNTKSDYCQVCGYDGEIQIVEEDGKLVWRCPNCGNEDQSKMNVARRTCGYIGSQFWNQGRTQEIKERVLHL

SEQ ID NO: 1061 - protein, 755 aa, unidentified
  REGION 1..755: note = Description of Unknown: uncultivated organism sequence
  REGION 1..755: note = Category: MG60 effectors
  REGION 1..755: note = Description: MG60-276 effector
MHELIEKREPKEEKPMKIIKRNGAEVVFDIDKIIMAVTKANDAVDEKVRMTPLQIERISQSVQIACEEMGRSPSVEEIQDLVEKAIMAHGAFEVAKEYITYRYTRSLLRQSNTTDDRILSLIECNNEEVKQENANKNPTINAVQRDYMAGEVSKDITSRILLPKEVVDAHEAGIIHFHDADYYAQHMHNCDLVNLEDMLQNGTVISGTLIEKPHSFSTACNIATQIIAQVASNQYGGQSISLTHLAPFVQVSREKIRKTVEREMAAFGVAPAEETISKVVEDRLREEVRRGVQTIQYQVVTLMTTNGQAPFITVFMYLNEAKSEQEKKDLAMIIEETLRQRYEGVKNEKGVWITPAFPKLIYVLEEDNVREGTPYWYLTRLAAQCTAKRMVPDYISEKKMREYKLSKGETPGNGDVYTCMGCRSFLTPDRSGNGWDNVARAGNYEPGKPKYYGRFNQGVVTINLVDVALSSGRDMTKFWEVFEDRLELCHRALRCRHERLKGTLSDAAPILWQYGALARLPKGEPIDKLLYGGYSTISLGYAGLYECVKYMTGKSHTDDEAKPFALSVMQKMNDKCLQWKTAENIDYSLYGTPLESTTYKFAKCLQKRFGLIPGITDKSYITNSYHVHVTEPIDAFTKLRFEAEFQQLSPGGAISYVEVPNMQNNIDAVLEVMQFIYDNIMYAELNTKSDYCQVCGYDGEIEIKEDDGKLIWVCPQCGNTDQNKMNVARRTCGYIGTQFWNQGRTQEIKDRVLHL

SEQ ID NO: 1062 - protein, 755 aa, unidentified
  REGION 1..755: note = Description of Unknown: uncultivated organism sequence
  REGION 1..755: note = Category: MG60 effectors
  REGION 1..755: note = Description: MG60-277 effector
MHELIEKREPKEEKPMKIIKRNGAEVVFDIDKIIMAVTKANDAVDEKVRMTPLQIERISQSVQIACEEMGRSPSVEEIQDLVEKAIMAHGAFEVAKEYITYRYTRSLLRQSNTTDDRILSLIECNNEEVKQENANKNPTINAVQRDYMAGEVSKDITSRILLPKEVVDAHEAGIIHFHDADYYAQHMHNCDLVNLEDMLQNGTVISGTLIEKPHSFSTACNIATQIIAQVASNQYGGQSISLTHLAPFVQVSREKIRKTVEREMAAFGVAPAEETISKVVEDRLREEVRRGVQTIQYQVVTLMTTNGQAPFITVFMYLNEAKSEQEKKDLAMIIEETLRQRYEGVKNEKGVWITPAFPKLIYVLEEDNVREGTPYWYLTRLAAQCTAKRMVPDYISEKKMREYKLSKGETPGHGDVYTCMGCRSFLTPDRSGNGWDNVARAGNYEPGKPKYYGRFNQGVVTINLVDVALSSGRDMTKFWEVFEDRLELCHRALRCRHERLKGTLSDAAPILWQYGALARLKKGEPIDKLLYGGYSTISLGYAGLYECVKYMTGKSHTDDEAKPFALSVMQKMNDKCLQWKTAENIDYSLYGTPLESTTYKFAKCLQKRFGLVPGITDKSYITNSYHVHVTEPIDAFTKLRFEAEFQQLSPGGAISYVEVPNMQNNIDAVLEVMQFIYDNIMYAELNTKSDYCQVCGYDGEIEIKEDDGKLIWVCPQCGNTDQNKMNVARRTCGYIGTQFWNQGRTQEIKDRVLHL

SEQ ID NO: 1063 - protein, 812 aa, unidentified
  REGION 1..812: note = Description of Unknown: uncultivated organism sequence
  REGION 1..812: note = Category: MG60 effectors
  REGION 1..812: note = Description: MG60-278 effector
MDDIGEKLMAENAESDKEELGLICPKCGKKIIDDGTAYRCEAGDFKCGKEILGTEISRDELQKAIAGQSDELGFRSSKTGKTFLARLVLSEAKDSLDFRFSDRNGEDSGLKCPKCGGKIVDDGKAYKCESGDFKCWKIIRGHEITREELQKIFAGQGDKLEFTSKKTGKPFTSRLVLNEDKDGIDFEFAVRKKDDTGLKCPKCHGKIIDAGPIYRCEVGDFKCDKEILGTEITRDELQKVIDEGSSDELDFTDQDTGKPYTARLKLSSDKKSVEVPKPEDTGEKCPNCRNKIMETDKAYWCESCNFTCDKEILGTRISHDDLHKIVEEGNSDELDFTDHDSGKSYKAHLNLSSDKQTVDVPKPEDTGEKCPNCRNKIMETDKAYWCESCNFTCDKEILGTRISHDQLHKIVEEGRSDELDFADHDSGKSYKARLNLSEDNKTVVVPKPKDTGIKCPKCTMKIMETDRAYWCESEACDFTCDKEILDTKITRDELKKVVLNGKSGKLDFTDKDTKKPYKGRLVLNKKKNGLHVDKLDYMKVIFAVISFVVATISFIGIFLPDLFNMNKGSITRFETTLSDKKSAQKLEEFLDANVGKIVELTIHYKQNLVYGLVPWAKYSEDSYYGVKYDPAKDGSWWWDSASAAHDVTFSHFGDNNRFYVKSFLYDKNLFEVEYRDFGGIGYCDAITRYAYQLMIPYVKNDKLAFEWQRDREKSKDYVALPSPYWVLKGTFVVNVKKGEELTDNITTLYDEFQQRKLRSDYGKDYVVPEIAKILAVDPACGERTGNGDYSFSGKSFELEPLTQQQLLQMAYN

SEQ ID NO: 1064 - protein, 728 aa, unidentified
  REGION 1..728: note = Description of Unknown: uncultivated organism sequence
  REGION 1..728: note = Category: MG60 effectors
  REGION 1..728: note = Description: MG60-279 effector
MDAVHTNVIKRNGEEVNFDLDKIVNAINAANKEVDRLHQLNDYQVQAIADNIAKQIEIMTHAIHVEDIQDMVETGIMEMRGYEVAQKYVRYRYKRELARKSNTTDNGILALIDHMNEEVNQENSNKNPVINSTQRDYMAGEVSKDLTKRMLLPKEIVEAHEQGIIHFHDSDYFAQREHNCDLVNLEDMLQNGTVISETMIEKPHSFFTACNVTTQIVAQVASNQYGGQSFTLSHIAPFVDVSRKKIREQVIEERKMCGEALDEEVISKITESRLRAEVKSGIQTIQYQLITLMTCNGQAPFVTMFMYLDEVPEGQTRDDLAMIIEEVLQQRIQGVKNEKGIWITPAFPKLIYVLDKDNITEDSKYWYLTELAAKCTAKRMVPDYISAKVMRELKNGDVYPCMGCRSFPTSEDSQRNPDGTRKYYGRFNQGVVTINLVDVACSAEGHIDRFWEILESRLELCHRALRCRHERLLGTVSDVAPILWQHGALARLKKGETIDKLLFNGYSTISLGYAGLCEMCVRMTGKTHTSPEGKKLALEVMQKLNDKCKEWKEAENISYSVYGTPMESTTYKFAKCLQKRFGIIKGVTDKNYITNSYHIHVTEPVNAFDKLKFESEFQKLSPGGAISYVEVPNLQDNVEAVISVMKFIYDNILYAELNTKSDYCEICGYDGEIKIVTDENGKLIWECPNCGNRDQNNLFVARRTCGYIGTQFWNQGRTQEIKDRVLHL

SEQ ID NO: 1065 - protein, 728 aa, unidentified
  REGION 1..728: note = Description of Unknown: uncultivated organism sequence
  REGION 1..728: note = Category: MG60 effectors
  REGION 1..728: note = Description: MG60-280 effector
MDAVHTNVIKRNGEEVCFNLDKIVNAITAANKEVDRLHQLNDYQVQAIADNIAKQIEIMTHAIHVEDIQDMVETGIMEMRGYEVAQKYVRYRYKRELARKSNTTDNGILALIDHLNEEVNQENSNKNPVINSTQRDYMAGEVSKDLTKRMLLPEEIVEAHEQGIIHFHDSDYFAQREHNCDLVNLEDMLQNGTVISETMIEKPHSFFTACNVTTQIVAQVASNQYGGQSFTLSHIAPFVDVSRKKIREQVIEERKMCGEALDEEVISKITESRLRAEVKSGIQTIQYQLITLMTCNGQAPFVTMFMYLDEVPEGQTRDDLAMIIEEVLQQRIQGVKNEKGIWITPAFPKLIYVLDKDNITEDSKYWYLTELAAKCTAKRMVPDYISAKVMRELKNGDVYPCMGCRSFPTSEDSQRNPDGTRKYYGRFNQGVVTINLVDVACSAEGHMDRFWEILESRLELCHRALRCRHERLLGTVSDVAPILWQHGALARLKKGETIDKLLFNGYSTISLGYAGLCEMCVRMTGKTHTSPEGKKLALEVMQKLNDKCKEWKEAENISYSVYGTPMESTTYKFAKCLQKRFGIIKGVTDKNYITNSYHIHVTEPVNAFDKLKFESEFQKLSPGGAISYVEVPNLQDNVEAVISVMKFIYDNILYAELNTKSDYCEICGYDGEIKIVTDENGKLVWECPNCGNRDQNNLFVARRTCGYIGTQFWNQGRTQEIKDRVLHL

SEQ ID NO: 1066 - protein, 728 aa, unidentified
  REGION 1..728: note = Description of Unknown: uncultivated organism sequence
  REGION 1..728: note = Category: MG60 effectors
  REGION 1..728: note = Description: MG60-281 effector
MDAVHTNVIKRNGEEVNFDLDKIVNAINAANKEVDRLHQLNDYQVQAIADNIAKQIEIMTHAIHVEDIQDMVETGIMEMRGYEVAQKYVRYRYKRELARKSNTTDNGILALIDHMNEEVNQENSNKNPVINSTQRDYMAGEVSKDLTKRMLLPKEIVEAHEQGIIHFHDSDYFAQREHNCDLVNLEDMLQNGTVISETMIEKPHSFFTACNVTTQIVAQVASNQYGGQSFTLSHIAPFVDVSRKKIREQVIEERKMCGEALDEEVISKITESRLRAEVKSGIQTIQYQLITLMTCNGQAPFVTMFMYLDEVPEGQTRDDLAMIIEEVLQQRIQGVKNEKGIWITPAFPKLIYVLDKDNITEDSKYWYLTELAAKCTAKRMVPDYISAKVMRELKNGDVYPCMGCRSFPTSEDSQRNPDGTRKYYGRFNQGVVTINLVDVACSAEGHMDRFWEILESRLELCHRALRCRHERLLGTVSDVAPILWQHGALARLKKGETIDKLLFNGYSTISLGYAGLCEMCVRMTGKTHTSPEGKKLALEVMQKLNDKCKEWKEAENISYSVYGTPMESTTYKFAKCLQKRFGIIKGVTDKNYITNSYHIHVTEPVNAFDKLKFESEFQKLSPGGAISYVEVPNLQDNVEAVISVMKFIYDNILYAELNTKSDYCEICGYDGEIKIVTDENGKLIWECPNCGNRDQNNLFVARRTCGYIGTQFWNQGRTQEIKDRVLHL

SEQ ID NO: 1067 - protein, 728 aa, unidentified
  REGION 1..728: note = Description of Unknown: uncultivated organism sequence
  REGION 1..728: note = Category: MG60 effectors
  REGION 1..728: note = Description: MG60-282 effector
MDAVHTNVIKRNGEEVCFNLDKIVNAITAANKEVDRLHQLNDYQVQAIADNIAKQIEIMTHAIHVEDIQDMVETGIMEMRGYEVAQKYVRYRYKRELARKSNTTDNGILALIDHLNEEVNQENSNKNPVINSTQRDYMAGEVSKDLTKRMLLPEEIVEAHEQGIIHFHDSDYFAQREHNCDLVNLEDMLQNGTVISETMIEKPHSFFTACNVTTQIVAQVASNQYGGQSFTLSHIAPFVDVSRKKIREQVIEERKMCGEALDEEVISKITESRLRAEVKSGIQTIQYQLITLMTCNGQAPFVTMFMYLDEVPEGQTRDDLAMIIEEVLQQRIQGVKNEKGIWITPAFPKLIYVLDKDNITEDSKYWYLTELAAKCTAKRMVPDYISAKVMRELKNGDVYPCMGCRSFPTSEDSQRNPDGTRKYYGRFNQGVVTINLVDVACSAEGHIDRFWEILESRLELCHRALRCRHERLLGTVSDVAPILWQHGALARLKKGETIDKLLFNGYSTISLGYAGLCEMCVRMTGKTHTSPEGKKLALEVMQKLNDKCKEWKEAENISYSVYGTPMESTTYKFAKCLQKRFGIIKGVTDKNYITNSYHIHVTEPVNAFDKLKFESEFQKLSPGGAISYVEVPNLQDNVEAVISVMKFIYDNILYAELNTKSDYCEICGYDGEIKIVTDENGKLVWECPNCGNRDQNNLFVARRTCGYIGTQFWNQGRTQEIKDRVLHL

SEQ ID NO: 1068 - protein, 725 aa, unidentified
  REGION 1..725: note = Description of Unknown: uncultivated organism sequence
  REGION 1..725: note = Category: MG60 effectors
  REGION 1..725: note = Description: MG60-283 effector
MKVIKRSGVETKFDVNKIILAISKANQSTEPEHRISDEEIRRISENIAAQCKKLRKSMNVEEIQDLVENELMSEGTHELAKNYITYRYSRALVRKANTTDAQIMSLIECNNEEVKQENSNKNPTVNSVQRDYMAGEVSKDITKRFLLPEDVVEAHEEGIIHFHDADYFAQHMHNCDLVNLEDMLQNGTVISGTLIEKPKSFSTACNIATQIIAQVASSQYGGQSISLSHLAPFVQVSRDRITKEVQEESRLTGLELSEEQIGIIVERRLRDEIKKGVQTIQYQVVTLMTTNGQAPFVTVFMYLNEVKDPKVREDLALIIEECLNQRYEGVKNEQGVWITPAFPKLIYVLEEDNIREDSKYWYLTKLAAKVTAKRMVPDYISEKKMLEYKIDKNGNGNCYPCMGCRSFLTPYVDENGKPKYYGRFNQGVVTINLVDIACSSNRDHDKFWKIFDDRMNLCHRALQARHNRLKGTLSDVAPILWQYGAIARLKKGEKIDKLLYGGYSTISLGYAGLWETVYYMTGKKMTEPEGTEFGLKIMEKLNEYTGKWKKAENIDYSLYGTPLESTTYKFARCLKKRFGIIEGVTDKNYITNSYHIHVTEPINAFEKLIFESRFQKLSPGGAISYVEVPNMQNNIEAVLEVIKCIYENIMYAELNTKSDYCQCCGYDGEILIVKDEDGKLVWECPRCGNRDQSKLNVARRTCGYIGTQFWNQGRTEEIKERVLHL

SEQ ID NO: 1069 - protein, 768 aa, unidentified
  REGION 1..768: note = Description of Unknown: uncultivated organism sequence
  REGION 1..768: note = Category: MG60 effectors
  REGION 1..768: note = Description: MG60-284 effector
MKIRSTNCIQRAKPGKVNKMNNIIKRSGKEVEFDKKKIENAIKKANAATETAAQMSEAEIVVVMDRILANLDLVPHAISVEEVQDEVEAQIAKIGAFKVAKNYITYRYTHELRREANTTDDKILSLLDLTNEEVKQENSNKNPVVNSVQRDYMAGETSKDLTRRILLPEDISKAHDDGLIHFHDTDYFAQKMFNCQLVDLEGMFNYGHRHGQEITTALSGHGISAPKSFSTAANIATQVIAQVASNQYGGQTITLTDFVGGRHADAINFVDVSRQKWIKKIAEENAAVGTEMTDEQIKKVAEIRLIDEIKSGIQLIQYQLITLQTTNGQAPFITVFMYLNEVYCDDAQKKEDLALLIKLMLEQRIKGVQDQKGNWITPAFPKLIYVLEDDNIEEGSKYYDLTVLAAKCTAKRMVPDYLSEKVMRQLKGDVYPPMGCRSFLTPDKEGMGDNGEHKYYGRFNQGVITINLVDIACSSKKNEDKFWEIFEDRMENLVHKGLRIRHERLLGTPSDVSPIHWQDGAVSRLQSGETIDKLLYNNYSTISVGYAGLAETVYYMKGLSHTSKEGREFGLKVMQFLNDKCAKWRAEENISYSVYGTPLESTTYKFAKCLQKRFGMIDNVTDKNYITNSYHVRVTEEINAFDKLTKEAAFQELSPGGAISYVEIPNLQNNIDAVLAIMKHIYNTIMYAELNSKSDLCECCGYDGEIQIVEDDNKKLIWKCPNCGNTDQTKMHVARRTCGYIGTQYWNQGRTQEIKERVMHVSNPEINL

SEQ ID NO: 1070 - protein, 720 aa, unidentified
  REGION 1..720: note = Description of Unknown: uncultivated organism sequence
  REGION 1..720: note = Category: MG60 effectors
  REGION 1..720: note = Description: MG60-285 effector
MKIIKRNGEEAVFDSRKIELAISKANLEAPMAEQMSAETIHNIAINIEKQCMSENHEMNVEDIQDIVEKEIMKAGAFDIAKKYITYRYQHELMRKANSTDKQIMSLLECQNEEVKQENSNKNSTVVSVQRDYMAGEVSKDITKRFLLDEDIVQAHNEGIIHFHDSDYFAQHMHNCDLVNLEDMLQNGTVISGTRIDTPHSFSTACNIATQIIAQVASSQYGGQSISLAHLAPFVDVSRKKISREMHRMEEETGVYYNEEQFNHIVKARLREEITRGVQTIQYQVVTLMTTNGQSPFVTVFMYLNEAKDEQTKADLALIIEEVLKQRYQGVKNEAGYWVTPAFPKLIYVLEEDNITEESKYFYLTELAAKCTARRMVPDYISEKKMKALKEGNCYPCMGCRSFLSVYHDENGKPKFYGRFNQGVVTLNLVDVACSSGGDYNKFWQILDERLKLCYRALMARHKRLLGTPSDVAPILWQNGALARLKKGEVIDKLLFGGYSTISLGYAGLCECVRYMTGKSHTDPEATPFALKVMKTLNDACEKWKERTNIGFSLYGTPMESTTYKFAKCLKRRFGEIEGVTDKNYITNSYHVHVTEPVDAFTKLTFESQFQELSPGGAVSYVEVPNMEGNIPAVIALLKHIYEKIMYAELNTKSDCCQKCGYTGEIRIVTDSDNKLVWQCPQCGNTDQSTMNVARRTCGYIGTQFWNQGRTQEIKERVLHL

SEQ ID NO: 1071 - protein, 723 aa, unidentified
  REGION 1..723: note = Description of Unknown: uncultivated organism sequence
  REGION 1..723: note = Category: MG60 effectors
  REGION 1..723: note = Description: MG60-286 effector
MRIIKRNGSEEDFNIEKIINAVKKANGSGEHKFLTDEQIEDVADYVEYKCNKIRRAVSVEEIQDMVEDQLMAKGAFELARRYVRYRYNRSLVRKANTTDNRILSLIECNNEEVKQENSNKNPTVNSVQRDYMAGEVSRDLTRRMLLPADIVEADKEGIIHFHDSDYFAQHMHNCDLVNLEDMLQNGTVISDTLIERPHSFSTACNIATQIIAQVASNQYGGQSISLAHLAPFVQVSREKIRRETLAEIEELGVHPTEEKINDIVEQRLRKEVNRGVQTIQYQVVTLLTTNGQAPFVTVFMYLNEAKNEQEKHDLAMIIEETLKQRHKGVKNEKGVWITPAFPKLIYVLEEDNITEDSKYWYLTELAAKCTAKRMVPDYISEKVMLQSKIDKNGEGHCFTCMGCRSFLTPYVDENGKPKYYGRFNQGVVTVNLIDIGLSAGKDLDKFWKIFDERMELCHRALQCRHERLTGTLSDAAPILWQYGALARLKKGEKIDKLLHGGYSTLSLGYAGLWECVYSLIGKKLTEKEGKELGLKIMQKLNDYCAKWKKEENIDYSIYGTPLESTTYKFAKCLQKRFGIIKGVTDKNYITNSYHVHVTENIDAFSKLKLESEFQALSPGGAISYVEVPNMQDNIPAVLQVIKFIYDNIMYAELNTKSDYCQVCGYDGEIKIVHDDGKLVWECPNCGNRDQDKMNVARRTCGYIGTQFWNQGRTQEIEERVLHL

SEQ ID NO: 1072 - protein, 755 aa, unidentified
  REGION 1..755: note = Description of Unknown: uncultivated organism sequence
  REGION 1..755: note = Category: MG60 effectors
  REGION 1..755: note = Description: MG60-287 effector
MSKYPETLIGDWLKDSGNWFLDEEMECVGRMSRALYPYKSMFSPIRVNGITLKNRLVMAPMGNISQAEETGRPNQSMIAYFEERAKGGVGLITSGLIPVSFGIDHTLTEPGGLTYFPKILGSRTFFSGWRDIAHNTHSAGAHFFIQLTAGLGRVGNPQCLVNQHKFPVSASLNPNYYLPAVPCLRISGRKLKKIVKNFGQAAADAKTATIDGVYLHGHEGYLLEQMSNTAFNRRKWGRYADWQAFGLDIVREIRKRTGPDYPIMYRINLSLALNATYGKRMQTVKTLKKFSNERTIEQTLDYMKNLVQAGVDMFDVDLGCYDNWWLPHPPTTMKPGVFLEVAKLVKDHFAENSIVSNKGLPVPIVAVGKLGYPDLAEKAIADEMCDMVMLGRPLLADPMWPRKAYAGQVQEIRPCIGCQEACINEFVEGGHPSCAVNPRTSHESTLPEKPLPAPIKKKVAVVGAGPAGFECAMAALDRGHEVHLIDKQEGVGGMVRLAAIPAFKRDVTNYLEWMERTVDQRVKDNPDFQLMLNTEATLYMLEDGKYDAIVCATGSREKTPGVEGLEKAVFARALLLDTSLLDGKEKIVVVGGGTVGCEVALMLAAEYGRKVTVLEMLPTLMSHVSTANRTHLIHELEKHSVTLINCAKLEKIEDNSVAVYVNESPTVPDPYNTWNPVLPENVPNPLAKPIKSEYKMRSIDADLVVLAVGHEQDNTLHRLIKDAYITPELHLLGDAAHTGMIMHAVRAGYRTGLSI

SEQ ID NO: 1073 - protein, 642 aa, unidentified
  REGION 1..642: note = Description of Unknown: uncultivated organism sequence
  REGION 1..642: note = Category: MG60 effectors
  REGION 1..642: note = Description: MG60-288 effector
MKVIKRDGRVVDFNREKIAIAIEKANQEVTEKERADKQDIKDIIKYIESLDKKRILVEDVQDIIEEQLMDKKKFKLAKKYMIYRYNRALVRKKNTTDESILGLIKNQNMEMLEDGTRKNAVLASSQRDYIAGEVSKDLTKRLLLPEKIVKAHEEGVLYFHDMDYFLQPIFNSSVISIGDMLDNGTVINGKLIESPKSFRVACTVLAQILATVASTQYGGQSVDISHLGKYVRKSYEKFKEEFEQDLGGKLSEEILDKKIKEEVTSGVQTLQYQINTLMTTNGRSPLVSLFMYLREDDEYIKENALIIEEILKQRIEGMKDSEGKYINPEFPKLIYVIDENNCLNGEKYDYLTQLALECANKTQEPSFISAKKMRENYSGNVFSPMGFRSFLTPWKDENGTYKFEGRFNQGIVSINLPQIAIVADGDEDKFFSLLDERLELCHEALLCRHYALLGTVSDTSPIHWIYGAIAHLKSGEKIDKYLKDGYSTISLGYVGVYEATMMMKEVSNTEPNGKEFAIKIVKHLKETVEKWKKASGLGFCLYGETSQKVCKTFERIDKERFGVIKNVTDKEKYTSSYHASEDEKIDYKEKLAFESVFQKLSLGGVVSQIPSEYIGELSDKEEFIKFVYDNVQYLEFTKELKK

SEQ ID NO: 1074 - protein, 728 aa, unidentified
  REGION 1..728: note = Description of Unknown: uncultivated organism sequence
  REGION 1..728: note = Category: MG60 effectors
  REGION 1..728: note = Description: MG60-289 effector
MDAVHTNVIKRNGEEVNFDLDKIVNAINAANKEVDRLHQLNDYQVQAIADNIAKQIEIMTHAIHVEDIQDMVETGIMEMRGYEVAQKYVRYRYKRELARKSNTTDNGILALIDHMNEEVNQENSNKNPVINSTQRDYMAGEVSKDLTKRMLLPKEIVEAHEQGIIHFHDSDYFAQREHNCDLVNLEDMLQNGTVISETMIEKPHSFFTACNVTTQIVAQVASNQYGGQSFTLSHIAPFVDVSRKKIREQVIEERKMCGEALDEEVISKITESRLHAEVKSGIQTIQYQLITLMTCNGQAPFVTMFMYLDEVPEGQTRDDLAMIIEEVLQQRIQGVKNEKGIWITPAFPKLIYVLDKDNITEDSKYWYLTELAAKCTAKRMVPDYISAKVMRELKNGDVYPCMGCRSFPTSEDSQRNPDGTRKYYGRFNQGVVTINLVDVACSAEGHMDRFWEILESRLELCHRALRCRHERLLGTVSDVAPILWQHGALARLKKGETIDKLLFNGYSTISLGYAGLCEMCVRMTGKTHTSPEGKKLALEVMQKLNDKCKEWKEAENISYSVYGTPMESTTYKFAKCLQKRFGIIKGVTDKNYITNSYHIHVTEPVNAFDKLKFESEFQKLSPGGAISYVEVPNLQDNVEAVISVMKFIYDNILYAELNTKSDYCEICGYDGEIKIVTDENGKLIWECPNCGNRDQNNLFVARRTCGYIGTQFWNQGRTQEIKDRVLHL

SEQ ID NO: 1075 - protein, 765 aa, unidentified
  REGION 1..765: note = Description of Unknown: uncultivated organism sequence
  REGION 1..765: note = Category: MG60 effectors
  REGION 1..765: note = Description: MG60-290 effector
MSEKHHSHCLDAMEINDLQCIVRVRSILYRNIKEGVIMDAVHTNVIKRNGEEVNFDLDKIVNAINAANKEVDRLHQLNDYQVQAIADNIAKQIEIMTHAIHVEDIQDMVETGIMEMRGYEVAQKYVRYRYKRELARKSNTTDNGILALIDHMNEEVNQENSNKNPVINSTQRDYMAGEVSKDLTKRMLLPKEIVEAHEQGIIHFHDSDYFAQREHNCDLVNLEDMLQNGTVISETMIEKPHSFFTACNVTTQIVAQVASNQYGGQSFTLSHIAPFVDVSRKKIREQVIEERKMCGEALDEEVISKITESRLRAEVKSGIQTIQYQLITLMTCNGQAPFVTMFMYLDEVPEGQTRDDLAMIIEEVLQQRIQGVKNEKGIWITPAFPKLIYVLDKDNITEDSKYWYLTELAAKCTAKRMVPDYISAKVMRELKNGDVYPCMGCRSFPTSEDSQRNPDGTRKYYGRFNQGVVTINLVDVACSAEGHMDRFWEILESRLELCHRALRCRHERLLGTVSDVAPILWQHGALARLKKGETIDKLLFNGYSTISLGYAGLCEMCVRMTGKTHTSPEGKKLALEVMQKLNDKCKEWKEAENISYSVYGTPMESTTYKFAKCLQKRFGIIKGVTDKNYITNSYHIHVTEPVNAFDKLKFESEFQKLSPGGAISYVEVPNLQDNVEAVISVMKFIYDNILYAELNTKSDYCEICGYDGEIKIVTDENGKLVWECPNCGNRDQNNLFVARRTCGYIGTQFWNQGRTQEIKDRVLHL

SEQ ID NO: 1076 - protein, 733 aa, unidentified
  REGION 1..733: note = Description of Unknown: uncultivated organism sequence
  REGION 1..733: note = Category: MG60 effectors
  REGION 1..733: note = Description: MG60-291 effector
MKIIKRNGKEVDFDVTKIQNAIRKESKATIDECLSEEEIKEISDYLTFKIGKLHYSPNVEEIQHMVQKQIMAAGKFNIATNYIEYRYKHDLMRKANSTDDVILSIIDRDNEEIKQENSNKNPTVNSVQRDYMAGEISKDLTSRIILPEDVLQAHKEGIIHVHDMDYFVQHMHNCDLVNLEDMLQNGTVISETMIEKPHSFSTACNITTQIIAQVASNQYGGQSISLAHLAPFVDISRKKIRKQLIEEEAATGIKLDEKQLDSVIELRLKEEIKRGIQMIQYQVVTLETTNGQTPFITESMYLNEAKNEQEKHDLAMLIEETLKQRIQGVKNENGVWITPAFPKLIYILEEDNINEDAPYYYLTELAAKCTAKRMVPDYVSEKIMLELKGDVYPPMGCRSFLTPDRFTDEGVGNISNANNYESDKHKYYGRFNQGVVTINLVDVALSSKGNINDFWKIFDERLNLCKKALICRHKRLLGTTSDAAPILWQHGALARLKKGEKIDKLLFNGYSTISLGYAGLYECTYYMTGKSHTDDNGGKPFAIAVMEYLNDKCNEWKKETNIDFSLYGTPLESTTYKFAKCLQKRFGKIENVTDHNYITNSYHVCVRENIDAFTKLKFESEFQKLSPGGCISYVEVPNMLNNIPAVLQVIKYIYDNIMYAELNTKSDYCQCCGYDGEIQIVENEDGKLIWHCPKCGNEDQEKMNVARRTCGYIGTQFWNQGRTQEIKDRVLHL

SEQ ID NO: 1077 - protein, 765 aa, unidentified
  REGION 1..765: note = Description of Unknown: uncultivated organism sequence
  REGION 1..765: note = Category: MG60 effectors
  REGION 1..765: note = Description: MG60-292 effector
MSEKHHSHCLDAMEINDLQCIMRVRSILYRNIKEGVIMDAVHTNVIKRNGEEVNFDLDKIVNAINAANKEVDRLHQLNDYQVQAIADNIAKQIEIMTHAIHVEDIQDMVETGIMEMRGYEVAQKYVRYRYKRELARKSNTTDNGILALIDHMNEEVNQENSNKNPVINSTQRDYMAGEVSKDLTKRMLLPKEIVEAHEQGIIHFHDSDYFAQREHNCDLVNLEDMLQNGTVISETMIEKPHSFFTACNVTTQIVAQVASNQYGGQSFTLSHIAPFVDVSRKKIREQVIEERKMCGEALDEEVISKITESRLRAEVKSGIQTIQYQLITLMTCNGQAPFVTMFMYLDEVPEGQTRDDLAMIIEEVLQQRIQGVKNEKGIWITPAFPKLIYVLDKDNITEDSKYWYLTELAAKCTAKRMVPDYISAKVMRELKNGDVYPCMGCRSFPTSEDSQRNPDGTRKYYGRFNQGVVTINLVDVACSAEGHMDRFWEILESRLELCHRALRCRHERLLGTVSDVAPILWQHGALARLKKGETIDKLLFNGYSTISLGYAGLCEMCVRMTGKTHTSPEGKKLALEVMQKLNDKCKEWKEAENISYSVYGTPMESTTYKFAKCLQKRFGIIKGVTDKNYITNSYHIHVTEPVNAFDKLKFESEFQKLSPGGAISYVEVPNLQDNVEAVISVMKFIYDNILYAELNTKSDYCEICGYDGEIKIVTDENGKLIWECPNCGNRDQNNLFVARRTCGYIGTQFWNQGRTQEIKDRVLHL

SEQ ID NO: 1078 - protein, 733 aa, unidentified
  REGION 1..733: note = Description of Unknown: uncultivated organism sequence
  REGION 1..733: note = Category: MG60 effectors
  REGION 1..733: note = Description: MG60-293 effector
MKILKRNKVEVEFDSSKIVNAITKANNSVLEAERLGSECINKIASEVVSDCEALDRVVSVEEVQDMVEKKIMEAGAYQVAKNYITYRYTRQLQRQKNTTDDAILSLVAHKNEEAKEENANKNPIIASTQRDYVAGEVSKDLTMRVLLNDPEIAEAHENGIIHFHDADYFLQTIHNCDIWNLDDMLQNGTVISGVMIDKPKSFATACNIATQIVAQVASSQYGGQTFSLAHLAPFVDVSRQKWAKKIRKDMEEAGVSYTDAQFDQLVENRVREEIQNGVQTIQYQLVTLMTTNGQTPFVSVFMYLDEVPEGRTRDDLAMIIEEVLVQRKKGLKNKVGHWVVTAFPKLLYVLDEDNIYPDSKYYYLTKLAAECTAKTMVPDYISAKKMREFKGDVYACMGCRSFLTPDRFTDAGVGNIAKAKNYVPGQHKYYGRFNQGVVTINLVDVACSSYKDMDKFWQILNDRLELCHRALQKRHKRLKGTLSDVAPILWQYGALARLEPGEVIDPLLYDGYSTISLGYAGVYEMTRYMTGESHTEPNGQAFALKVMNALNDACAKWKKEENIDYSLYGTPMESTTYKFAKCLQKRFGIIPEVTDHSYITNSYHICVREPIDAFEKLSKEAEFQRLSPGGAISYVEVPNMQNNIPAVLAVMTHIYNTIMYAELNTKADYCQVCGYEGEIDLVNQEGKWIWKCPQCGCTDHSKMNIARRVCGYISTNDMNNGRKHEIAERVLHL

SEQ ID NO: 1079 - protein, 722 aa, unidentified
  REGION 1..722: note = Description of Unknown: uncultivated organism sequence
  REGION 1..722: note = Category: MG60 effectors
  REGION 1..722: note = Description: MG60-294 effector
MQVIKRNGTEVPFDETKIVNAITAANNGAGGRLTASQISEITDFVSFKCQKLHRSVSVETIQDMVEQQLMASGEYNVAKHYITYRYKRAEIRRGNTTDAKILSLVDCNNEEAKQENSNKNPTVNSVQRDYIAGEVSRDITERTLLPEDVVQAHKSGIIHFHDTDYYAQRMHNCDLVNLEDMLQNGTVISGTLIEKPHSFSTACNIATQIIAQVASNQYGGQSISLAHLAPFVQVSREKIRRELREEMEISDTQISPEAFNTIVETRVRREVNKGIQTIQYQVVTLLTTNGQAPFLTVFMYLNEAKDEQEKKDLAIIIEETLKQRIEGVKNEKGHWITPAFPKLIYVLEEDNITKDSKYWYLTELAAKCTAKRMVPDYISEKIMKQLKEGNCFPVMGCRSNLSPWKDENGNYKFYGRFNQGVVTINLVDVALSSHGNMEEFWRIFDERLALCYKALMCRHNRLKGTLSDAAPILWQYGAIARLKKGEKIDKLLYGGYSTISLGYAGLAECVRYMTGKSHTDPTATPFALAVMKHMNAACDEWKRETNIGFGIYGTPLESTTYKFAKCLQERFGIIEGVTDKNYITNSYHIPVTEQINAFDKLKFEAQFQALSTGGAISYVEVPNLEHNIDAVMKIITFIYDNIMYAELNTKSDYCQVCGYDKEIQIVTDENTGKLVWECPNCGNRDQNKMNVARRTCGYIGSQFWNQGRTQEIKDRVMHLSLE

SEQ ID NO: 1080 - protein, 728 aa, unidentified
  REGION 1..728: note = Description of Unknown: uncultivated organism sequence
  REGION 1..728: note = Category: MG60 effectors
  REGION 1..728: note = Description: MG60-295 effector
MDAVHTNVIKRNGEEVNFDLDKIVNAINAANKEVDRLHQLNDYQVQAIADNIAKQIEIMTHAIHVEDIQDMVETGIMEMRGYEVAQKYVRYRYKRELARKSNTTDNGILALIDHMNEEVNQENSNKNPVINSTQRDYMAGEVSKDLTKRMLLPEEIVEAHEQGIIHFHDSDYFAQREHNCDLVNLEDMLQNGTVISETMIEKPHSFFTACNVTTQIVAQVASNQYGGQSFTLSHIAPFVDVSRKKIREQVIEERKMCGEALDEEVISKITESRLRAEVKSGIQTIQYQLITLMTCNGQAPFVTMFMYLDEVPEGQTRDDLAMIIEEVLQQRIQGVKNEKGIWITPAFPKLIYVLDKDNITEDSKYWYLTELAAKCTAKRMVPDYISAKVMRELKNGDVYPCMGCRSFPTSEDSQRNPDGTRKYYGRFNQGVVTINLVDVACSAEGHIDRFWEILESRLELCHRALRCRHERLLGTVSDVAPILWQHGALARLKKGETIDKLLFNGYSTISLGYAGLCEMCVRMTGKTHTSPEGKKLALEVMQKLNDKCKEWKEAENISYSVYGTPMESTTYKFAKCLQKRFGIIKGVTDKNYITNSYHIHVTEPVNAFDKLKFESEFQKLSPGGAISYVEVPNLQDNVEAVISVMKFIYDNILYAELNTKSDYCEICGYDGEIKIVTDENGKLIWECPNCGNRDQNNLFVARRTCGYIGTQFWNQGRTQEIKDRVLHL

SEQ ID NO: 1081 - protein, 719 aa, unidentified
  REGION 1..719: note = Description of Unknown: uncultivated organism sequence
  REGION 1..719: note = Category: MG60 effectors
  REGION 1..719: note = Description: MG60-296 effector
MKIIKRNGSEETFDIQKIVVAVTKADKDNGERTLTDSQIEDIAEYVEFKCNKLNRAVSVEEIQDMVENQIMATGAFELARKYVRYRYKRSLVRKANTTDNRILSLIEYNNEDVKQENSNKNPAVNSVQRDYMAGEVSRDLTTRMLLPHDIVEADREGIIHFHDSDYYAQHMHNCDLVNLEDMLQNGTVISGTMIEKPHSFSTACNIATQIIAQVASNQYGGQSISLAHLAPFVDVSREKIRKEVISEQELVGMEYPEDVLNEIVERRLKKEITKGVQTIEYQVITLMTTNGQAPFLTVFMYLNEAKNEREKKDLAMIIEETLRQRYQGVKNEAGVWVTPAFPKLIYVLEEDNIEEGSEYYYLTELAAKCTAKRLVPDYISEKKMKELKEGNCFPVMGCRSCLSPWKDENGNYKFYGRFNQGVVTINLVDVALSSGGDMDKFWKIFDDRLELCYRALMCRHNRLKGTLSDAAPILWQFGALARLKKGEPIDKLLYGGYSTISLGYAGLYECVKYMTGKSHTDPDATPFALDVMKHMNDACNQWKEETNVAFSIYGSPIESTTYKFAKCLQKRFGIVPGITDKSYITNSYHVFVREEIDAFSKLKFESQFQALSSGGAISYVEVPDMKDNIAAVLQVIRFIYDNIMYAELNTKSDYCQECGYDGEIQIITDEEGKLVWECPHCGNRNQDTLNVARRTCGYIGTQFWNQGRTQEIKERVLHL

SEQ ID NO: 1082 - protein, 708 aa, unidentified
  REGION 1..708: note = Description of Unknown: uncultivated organism sequence
  REGION 1..708: note = Category: MG60 effectors
  REGION 1..708: note = Description: MG60-297 effector
MKVVKRDGRVVDFDRSKIVTAIQKANAEVRPKERANKEEVKSVIEYIESLDKKRILVEDIQDIIEEQLMAIGKYELAKKYIVYRYTRALVRKSNTTDESILKLIKNENKELAEENSNKNTMLASTQRDYIAGEVSRDLTRRILLPEKISKANDEGILHFHDADYFIQPIFNCCLINIGDMLDNGTVMNGKMIESPKSFQVACTVLTQIIAAVASNQYGGQSVDLIHLGKYLRRSYNKYRKAIEEKYKNKIPEHIIEDIVQERLRAELKSGVQTIQYQINTLMTTNGQSPFVTLFLHLEKDDPYIKENAMIIEEVIRQRYEGIKNEAGVYVTPAFPKLVYVIDDFNNLTGGEYDYLTELAVKCSAKRMYPDYISAKKMRENYEGNVFSPMGCRSFLSPWKDENGNYKFEGRFNQGVVSINLPQIAIIADGDEEKFWKLLDERLELCKEALMCRHNALVGTSSDISPIHWQYGAIARLKKGEKIDKLLYGGYSTMSLGYIGIYEMTKLMTGVSHTDPKGHEFAIKVMNHLRETTDRWKKETNIGFALYGTPAESLCYKFARIDKEKFGTIKDVTDKGYYTNSYHVDVREKIDAFDKLKFESEFQKISSGGAISYIEIPNMQNNLEALRSVVKFIYDNIQYAEFNTKSDYCHVCGYDGEIKINDDNEWECPNCGNKDHNKMTVVRRTCGYLGENFWNAGKTKEIKQRVLHL

SEQ ID NO: 1083 - protein, 724 aa, unidentified
  REGION 1..724: note = Description of Unknown: uncultivated organism sequence
  REGION 1..724: note = Category: MG60 effectors
  REGION 1..724: note = Description: MG60-298 effector
MNVIKRSGEEVVFDASKIENAIKKANKATTHNQMSDELIRSVTQSVIDKCENLKRSPNVEEIQDMVEGELMEHRCFAVAHNYITYRYERALVRKANSTDKQIMSLLERNNEEVKQENSNKNPLVNSVQRDYMAGEVSKDITKRFLLPQDVMEAHEQGIIHFHDSDYFAQHMHNCCLVNLEDMLQNGTVISETMIEKPHSFSTACNVATQIIAQVASSQYGGQSITLSHLAPFVQVSREKARREVKEELESLNLDSSEDTVNKMAEMRVRKEIEKGVQMIQYQVITLMTTNGQAPFVTVFMYLNEVPEGQTRDDLAIIIEEMLKQRIKGVKNEKGIWITPAFPKLIYVLEENNIEEGSKYWYLTELAAKCTAKRMVPDYISEKKMLELKVDVNGEGHCYPCMGCRSFLTTYLDENGKPKYYGRFNQGVVTLNLVDVACSSKQDEEAFWRIMDERLALCKKALMCRHERLLGTPSDVAPILWQNGALARLKKGEPIDKLLFGGYSTISLGYAGLCECVYYMTGHPHTEEPGTSFGLKVMQYLNDACAKWKAEENIDFSLYGTPMESTTFKFSKHLQERFGIIPHVTDKNYITNSYHVHVTEEIDAFTKLSFESQFQKLSPGGAISYVEVPNMENNIDAVLAIMKHIYNHIMYAELNTKSDYCQVCGYTGEIKIVEDENHKLVWECPNCGNRDQEKMNVARRTCGYIGTQFWNQGRTQEIKERVLHL

SEQ ID NO: 1084 - protein, 727 aa, unidentified
  REGION 1..727: note = Description of Unknown: uncultivated organism sequence
  REGION 1..727: note = Category: MG60 effectors
  REGION 1..727: note = Description: MG60-299 effector
MRKKPSMIIKRDGSKVLFDPKKIELAITKALISEGVASIFTGTAQAIAKSFESENETPTIKEIEEYVFKSLCEAGLPLVAKAYEGYRSIREFQRSDQFTDESILSIVAGGTDEDLRDENSNKNVATASTQRDMIAGEASKDIAMRHMLPPHVVQAHKDGLIHFHDLDYAVQRIFNCCLVDLRGPFKDGTVINKKMIETPRSFRTACTVATQIVQQVACGQYGGQTISLAHLAPYVRVSYEKIKNQVREELFGDDVPLASPTKLCGNREVEHIAKKRLRKEIEDGLQTIQYQVNTFSTSNGQAPFLSIFMYLNEDPEYIEETAMLIEEMIKQRYIGMKNEAGVYVTPAFPKLLYVLDENNVPKDSKYRYLTDLAVKCVARRMMPDFISAKKMKENYEDVFPCMGCRSFLSQYRDKDGKLKWYNRFNQGVVTLNLADAGLSADGNIDAFWKILDERLELVHDGLMCKHKSLLGTKAEKSPIHWQHGVIARLKKDDVIDPYLKDGYSTLSLGYIGLHECVLALIGESHTTERGEELAVRIMRRLRKACDDWRAESGLGFSLYGSPSESTTYRLAQTTQKRFGVVKGITDRDYLTNSYHVDVTEKINAFDKLRFESQFQKISSGGCISYVEVPNLEQNLEVIDQLVSYMYETIQYAEINTKSDYCAKCGFRGEIKLNNNLDWECPQCHTVNRDDLTVCRRTCGYLGDNFWNKGRTEEIGARVLHVDNEDLS

SEQ ID NO: 1085 - protein, 719 aa, unidentified
  REGION 1..719: note = Description of Unknown: uncultivated organism sequence
  REGION 1..719: note = Category: MG60 effectors
  REGION 1..719: note = Description: MG60-300 effector
MKIIKRNGSEAAFDITKIIAAVTKANNADGQSRELTGEQIRAIAAEVEEKCGAMGRAPSVEEIQDMVENQIMGRNAFEVAKRYIRYRYTRSLARRANTTDNQILSLIECNNEEAKQENANKNPTVNSVQRDYMAGEVSKDITRRILLPQEIVEAHEQGIIHFHDSDYFAQHMHNCDLVNLEDMLQNGTVITGTLIEKPHSFSTACNIATQIVAQVASNQYGGQSISLAHLAPFVQVSREKIRGEVLAELEELGTTASEDKIAQIVERRLRAEVERGVQTIQYQVVTLMTTNGQAPFITVFMYLNEAKNEREKRDLAMIIEEVLLQRYEGVKNEKGVWVTPAFPKLIYVLQEDNVAPGAEYYYLTELAAKCTAKRMVPDYISEKKMKELKEGNCFPVMGCRSALSPWKDENGNYKFYGRFNQGVVTLNLVDVALSSGGDMDRFWKIFDERLDLCYRALMCRHNRLKGTLSDAAPILWQYGAIARLKKGEPIDKLLYGGYSTISLGYAGLCECVRYMTGKSHTDPSATPFALAVMKYMNTACERWKAETTIGFGIYGTPLESTTYKFAKCLQKRFGIVPGVTDKPYITNSYHVHVTEEIDAFAKLAFEAQFQALSTGGAISYVEVPNMQQNLEAVLQIIRYIYDNIMYAELNTKSDYCQACGFDGEIRIVEDDGKLVWECPNCGNRDQDTMNVARRTCGYIGTQYWNQGRTAEIKERVLHL

SEQ ID NO: 1086 - protein, 729 aa, unidentified
  REGION 1..729: note = Description of Unknown: uncultivated organism sequence
  REGION 1..729: note = Category: MG60 effectors
  REGION 1..729: note = Description: MG60-301 effector
METAVNTNVIKRNGEEVKFDLSKIENAIFAANKEVDKLHQLSDYQVYAIADNLAKHIEEMTHAVHVEDIQDMVETGIMEMRGYEVAQKYVRYRYKRELARKSNTTDNGILSLIEHMNEEVNQENSNKNPVINSTQRDYMAGEVSKDLTKRMLLPEDIVEAHEAGIIHFHDSDYFAQKEHNCDLVNLEDMLQNGTVISETMIEKPHSFFTACNVTTQIVAQVASNQYGGQSFTLSHIAPFVDVSRKKIRKQVIEERTELGEPLDDDIIDKITEKRLLLEVKSGIQTIQYQLITLMTCNGQAPFVTMFMYLDEVPEGQTRDDLALIIEEVLNQRIIGVKNEKGFYITPAFPKLIYVLDEDNITPGSKYWYLTELAAKCTAKRMVPDYISAKVMREMKNGDVYPCMGCRSFPTSEPNILNPDGTRKYYGRFNQGVVTINLVDVACSSDGDMDEFWKILEERLELCHRALRCRHERLLGTLSDVAPILWQHGALARLKKGEKIDKLLYNGYSTISLGYAGLCEMCVRMTGKTHTSPEGKDFALKVMQKLNDKCAEWKKAENISYSVYGTPMESTTYKFAKCLQKRFGIIKGVTDKNYITNSYHVHVTEHIDAFSKLKFESEFQKLSPGGAISYVEVPNLTNNIEAVISVMQFIYDNILYAELNTKSDFCEKCLYDGEMRIVTDDSGKLVWECPNCGNRDQNNLFVARRTCGYIGTQFWNQGRTQEIKDRVLHL

SEQ ID NO: 1087 - protein, 850 aa, unidentified
  REGION 1..850: note = Description of Unknown: uncultivated organism sequence
  REGION 1..850: note = Category: MG60 effectors
  REGION 1..850: note = Description: MG60-302 effector
MANNVTEIEEKSKSFLYHLVKYYKIFIDTCSLLSIRANKFWEHITPILKAQNASVIVPYRVYEEVEKYADNLELCKKKVPNDPNFNLTAKKAKKKILSLYEQGLVKIFGDKTDNFADNVFQTVFTKFRMKYNLLLITQDKDLASDIMKISESKSVMANNKILVRKINNYGYLSAVEKIKVDVNKNEPKKSVVNTVHNGSQKKKVQVSVAVPEDEIFAHTDTITVVTGSVNVSEYPKENCIVTAKRGGNSKTIHLLSKVSSGGEGIIYTTDIPNVVAKIYKPQKVDRAKFEKLKLMMTKNINCPGVCFPIALLYNTKGEFVGYLMNKAKGIELQKGIFIPRLLQKHFPNWKKKDTVQLCITILKKFKYLHDRNIILGDINPNNILVVSPTEVYFVDTDSYQIEGYPCPVGTINFTAPEIQGKRYDEFLRTLGNEQFAVATLLFMIMLPGKPPYALQGGESQSDNIINGDFAYASGERTNGKAPEGAWRYIWSHMPRYLKDDFYETFHKDGAQHSENSRFSDDDWIKKFEYYEKLLTEENSKFLANDSMSGELIPNRLKKVANVTYVRCKLCGREVDEERTEQGYCSDCLRKGETYNCSRCGNEMVYTNYQRLIRHSHKFDTCKACNDKLNSIYRRYPCRNPRCNNMVEITFRYKEKLEQNNKPLPTVCKDCRNEVYATRRCSICNRVFDITFSEKEYYDSKGYDFPKKCPNCRGVKIPVHRGSSYYNTPRTYNNSIPQPTQKKKSSFCFITTAVCKYFNKPDDCYELTLLRKFRDTWLVKQPGGNELVKEYYSVAPNIVTALDNYSEKDKVYIHIWNNYIKPCIKLIELGANDTCKDLYMNMVNELKEKFN

SEQ ID NO: 1088 - protein, 747 aa, unidentified
  REGION 1..747: note = Description of Unknown: uncultivated organism sequence
  REGION 1..747: note = Category: MG60 effectors
  REGION 1..747: note = Description: MG60-303 effector
MRIIKRSGKEVEYDGSKIIKAIQKANAEVATNERLSDTKIQAIEEDTRAILEELTHTANIEEIQDIVIHQIMKMQAYRLAQVYTEYRYKQALKRKNNSTDDGILALIERQNEELNQENSNKNPVIASTQRDYIAGEVSKDITDRLLLPTDVLEAHRKGIIHFHDRDYFLMHIYNCCLINLEDMLQNGTVITETMIEKPHSFATAANVATQIIAQVASNQYGGQTFNLAHLAPFVDISRQKHIKHYREDITDAITSVPILGKLLTPIMDKIVDPLAKFLGERALKREIRSGIQTIQYQLVTLMTTNGQTPFVSMFMYLKDAKNETERDDLAMLMEEVLRQRIAGIKNEQGVPITPAFPKILFVLDTLTMDPNSKYHYLKELAAECTAKRMVPDYISEKKMLEYKGDVYGCMGCRSFLTPDRFTDKGIGNIARAKNYQEGVHKYWGRFNQGVVTINLPYIACLSEKNMTKFWEILDQYLELCHKALRIRHERLMNTPADVAPILFRYGAIARLDKGEVINDLLFHGYSTISLGYAGLYEMCKYMTGKSHTDPDAKPFALSVMQRMNDACAKWKAEEDIDYSIYGTPIESTTYRFAQKLQEQFGIIPDVTDHNYITNSYHINVREEIDAFSKLKFESEFQALSPGGAISYVEVPDLQNNLKAVEAIQDCIYNEILYAEINTKSDYCQVCGYDGQIEIIEDDHKKLIWKCPNCGNTDQNKMNVARRTCGYIGTQFWNQGRTQEIKDRVLHI

SEQ ID NO: 1089 - protein, 634 aa, unidentified
  REGION 1..634: note = Description of Unknown: uncultivated organism sequence
  REGION 1..634: note = Category: MG60 effectors
  REGION 1..634: note = Description: MG60-304 effector
MKVIKRDGRVVDFNREKIAIAIEKANQEVTEKERADKQDIKDIIKYIESLDKKRILVEDVQDIIEEQLMDKKKFKLAKKYMIYRYNRALVRKKNTTDESILGLIKNQNVEMLEDGTRKNAVLASSQRDYIAGEVSKDLTKRLLLPEKIVKAHEEGVLYFHDMDYFLQPIFNSSVISIGDMLDNGTVINGKLIESPKSFRVACTVLAQILATVASTQYGGQSVDISHLGKYVRKSYEKFKEEFGGVPSKEILDKKIKEEVTSGVQTLQYQINTLMTTNGRSPLVSFFMYLREGDEYIKENALIIEEILKQRIEGMKDAEGEYINPEFPKLIYAIDENNCLNGEKHDYLTQLALECANKTQEPSFISAKKMRENYSGNVFSPMGFRSFLTPWKDENGTYKFEGRFNQGIVSINLPQIAIVADGDEDKFFSLLDERLELCHEALLCRHYALLGTVSDTSPIHWIYGAIAHLKSGEKIDKYLKDGYSTISLGYVGVYEATMMIKEVSNTEPDGKEFAIKIVKYLKETVEKWKKASGLGFCLYGETSQKVCKTFERIDKERFGVIKNVTDKEKYTSSYHASEDEKIDYKEKLAFESVFQKLSLGGVVSQIQSKYIGKLSDKEEFIKFVYDNVQYLEFTK

SEQ ID NO: 1090 - protein, 708 aa, unidentified
  REGION 1..708: note = Description of Unknown: uncultivated organism sequence
  REGION 1..708: note = Category: MG60 effectors
  REGION 1..708: note = Description: MG60-305 effector
MKVVKRDGRVVDFDRSKIVTAIQKANAEVRPKERANKEEVKSVIEYIESLDKKRILVEDIQDIIEEQLMAIGKYELAKKYIVYRYTRALVRKSNTTDESILKLIKNENKELAEENSNKNTMLASTQRDYIAGEVSRDLTRRILLPEKISKANDEGILHFHDADYFIQPIFNCCLINIGDMLDNGTVMNGKMIESPKSFQVACTVLTQIIAAVASNQYGGQSVDLIHLGKYLRRSYNKFKKAIEEKYKNKIPEHIIEDIVQERLRTELKSGVQTIQYQINTLMTTNGQSPFVTLFLHLEKDDPYIKENAMIIEEVIRQRYEGIKNEAGVYVTPAFPKLVYVIDDFNNLTGGEYDYLTELAVKCSAKRMYPDYISAKKMRENYEGNVFSPMGCRSFLSPWKDENGNYKFEGRFNQGVVSINLPQIAIIADGDEEKFWKLLDERLELCKEALMCRHNALVGTPSDISPIHWQYGAIARLKKGEKIDKLLYGGYSTMSLGYIGIYEMTKLMTGVSHTDPKGHEFAIKVMNHLRETTDRWKKETNIGFALYGTPAESLCYKFARIDKEKFGTIKDVTDKGYYTNSYHVDVREKIDAFDKLKFESEFQKISSGGAISYIEIPNMQNNLEALRSVVKFIYDNIQYAEFNTKSDYCHVCGYDGEIKINDDNEWECPNCGNKDHNKMTVVRRTCGYLGENFWNAGKTKEIKQRVLHL

SEQ ID NO: 1091 - protein, 716 aa, unidentified
  REGION 1..716: note = Description of Unknown: uncultivated organism sequence
  REGION 1..716: note = Category: MG60 effectors
  REGION 1..716: note = Description: MG60-306 effector
MLEVIKRNGERVPFNRDKITNAIEKAMNSSSGIYEEGQAAKIASEIEAYAASIQKDLTIYAIEDQVYYRLLKYNNPATARAYENYKTIQAFKRQTNTTDDDVFGLLNNTNLEVLDENSNKNGHVVSTQRDLIAGEVSKDIARRKLIPADIVQAHDSGAIHFHDMDYIIQPMFNCCLINLEDMLANGTVINGKKIDTPKSFQVACTVTTQIIAQVASGQYGGQSINGIDRILAPYVRKSFKKYMKAVVEEQREVYGIEPDMEKAEEIAWKRTKKEIKDGIQTIQYQINTLMTTNGQAPFVTLFMYFKPDYEYAKEAALIDEELLRQRIQGIKNEANVYVTPAFPKLIYVLDEHNVREGSPYFYLTKLAAECTAKRMYPDYISAKKMRESYEGNVFSPMGCRSFLSPWKDEQGNYKFDGRFNMGVVSLNLPQIGILADGDEEKFFQILDKRLELCKKALLLRVDLLKRITSDVSPIHWQYGAIARLKPGETIEKFIYGGYATLSLGYIGIYEATMLTKHCSHTTAEGRKFAMRIMDDLNAHIKKWRKETNIGFALYGTPAENLTNLFCKIDKARFGSIPDVTDKGYYTNSYHVDVREPINVFDKFSFEADFEDKSTGGCISYAEIPNMTHNIPAVLTMVQYIYDHIAYGEFNTKLDYCHECGFDGEIILNDDNEWECPRCHNKDRNKLTVIRRTCGYLGENFWNEGRTQEIKNRVLHI

SEQ ID NO: 1092 - protein, 740 aa, unidentified
  REGION 1..740: note = Description of Unknown: uncultivated organism sequence
  REGION 1..740: note = Category: MG60 effectors
  REGION 1..740: note = Description: MG60-307 effector
MKIIKRSGSEATFDISKIVNAIKGANGEVAPEERLTDDQIALAAHSVEWLCNRSGHTVSVEEIQDMVENQIMAQGRYTVARKYIIYRYLQTLKRQSNTTDDKILSLIECNNEEAKQENSNKNPTVNSVQRDYMAGEVSKDITMRLLLPADVVEAHNEGIIHFHDSDYFAQHMHNCDLVNLEDMLQNGTVISGTLIERPHSFSTACNIATQIIAQVASCQYGGQSISLTHLAPFVEVSRQKIRRQVLQEINALGLEANTDRIADVVETRLRDEIRRGVQTIQYQVVTLMTTNGQAPFVTVFMYLNEARNEQEKRDLAMIIEETLAQRYEGVKNEEGVWITPAFPKLIYVLEEDNITEDSPYFYLTKMAAKCTAKRMVPDYISEKKMRELKLSKGETEGNGDCYTCMGCRSFLTPDRTGNGYDNVANAGNYQPGKPKYYGRFNQGVVTISLPDVALSSHGDMAKFWEIFDERLELCYKALMCRHERLKGTLSDAAPILWQYGALARLKKGEPIDKLLYGGYSTISLGYAGLYECVKYMTGHSHTDAEGTPFAMEVMQHMNDKCNEWKAATNIDFSLYGTPLESTTYKFAKALQRRFGIIPGITDKGYITNSYHVHVTEQIDAFEKLKFESNFQRLSPGGAISYVEVPNMQDNLKAVIRVMQYIYDNIMYAELNTKSDYCQVCGYDGEIQIVEDDGKLVWECPKCGNRDQEKLNVARRTCGYIGTQFWNQGRTQEIRDRVLHL

SEQ ID NO: 1093 - protein, 719 aa, unidentified
  REGION 1..719: note = Description of Unknown: uncultivated organism sequence
  REGION 1..719: note = Category: MG60 effectors
  REGION 1..719: note = Description: MG60-308 effector
MKIIKRNGSEETFDIQKIVVAVTKADKDNGERTLTDSQIEDIAEYVEFKCNKLNRAVSVEEIQDMVENQIMATGAFELARKYVRYRYKRSLVRKANTTDNRILSLIEYNNEDVKQENSNKNPAVNSVQRDYMAGEVSRDLTTRMLLPHDIVEADREGIIHFHDSDYYAQHMHNCDLVNLDDMLQNGTVISGTMIEKPHSFSTACNIATQIIAQVASNQYGGQSISLAHLAPFVDVSREKIRKEVISEQELVGMEYPEDVLNEIVERRLKKEITKGVQTIEYQVITLMTTNGQAPFLTVFMYLNEAKNEREKKDLAMIIEETLRQRYQGVKNEAGVWVTPAFPKLIYVLEEDNIEEGSEYYYLTELAAKCTAKRLVPDYISEKKMKELKEGNCFPVMGCRSCLSPWKDENGNYKFYGRFNQGVVTINLVDVALSSGGDMDKFWKIFDDRLELCYRALMCRHNRLKGTLSDAAPILWQFGALARLKKGEPIDKLLYGGYSTISLGYAGLYECVKYMTGKSHTDPDATPFALDVMKHMNDACNQWKEETNVAFSIYGSPIESTTYKFAKCLQKRFGIVPGITDKSYITNSYHVFVGEEIDAFSKLKFESQFQALSSGGAISYVEVPDMKDNIAAVLQVIRFIYDNIMYAELNTKSDYCQECGYDGEIQIITDEEGKLVWECPHCGNRNQDTLNVARRTCGYIGTQFWNQGRTQEIKERVLHL

SEQ ID NO: 1094 - protein, 738 aa, unidentified
  REGION 1..738: note = Description of Unknown: uncultivated organism sequence
  REGION 1..738: note = Category: MG60 effectors
  REGION 1..738: note = Description: MG60-309 effector
MSPEVKTKVIKRNGKEVSFDISKITHAIEKANEEVDNLHQINIFQISAIADKIAKEVEESTHAVNVEDIQDLVETGIMEMRGYEVAQKYVRYRYKREMKRKSNTTDNGILALLDHINEEVKQENSNKNPVINSTQRDYMAGEVSKDLSRRVLLPEEIVQAHEQGIIHFHDTDYFAQREHNCDLINLEDMLQNGTVISETMIEKPHSFFTACNVTTQIVAQVASNQYGGQSFTLAHLAPFVDISRKKIRANVIAERKECGEVLDETIIDKVTERRLRDEVRSGIQTIQYQLITLMTCNGQAPFVTMFMYLDEVPEGKTRDDLATIIEEVLIQRMQGVKNEKGVWITPAFPKLIYVLDEDNITEDSKYWHLTELAAQCTAKRMVPDYISAKIMKELKKGEVYPCMGCRSFLTVEDSQLNADGSHKFYGRFNQGVVTINLVDVACSSNGDMDEFWRILDERLELCHRALRCRHERLKGTISDVAPILWQNGALARLKKGETIDKLLYDGYSTISLGYAGLYEMCMRMYGKSHTDPEAKPFALKVMQHLNDKCNEWKAAEHISYSIYGTPMESTTYKFSKCLQKRFGIIPGVTDKNYITNSYHVHVSEEIDAFSKLKFESEFQKLSPGGAISYVEVPNMQNNIPAVLAVMKFIYENIMYAELNTKSDYCECCGYDGEIKIIEEDSGKLVWECPNCGNRDQSKMSVARRTCGYIGTQFWNQGRTQEIKDRVLHLSNHTNPEYK

SEQ ID NO: 1095 - protein, 638 aa, unidentified
  REGION 1..638: note = Description of Unknown: uncultivated organism sequence
  REGION 1..638: note = Category: MG60 effectors
  REGION 1..638: note = Description: MG60-310 effector
MKVIKRDGRVVDFNREKIAIAIEKANQEVTEKERADKQDIKDIIKYIESLDKKRILVEDVQDIIEEQLMDKKKFKLAKKYMIYRYNRALVRKKNTTDESILGLIKNQNMEMLEDGTRKNAVLASSQRDYIAGEVSKDLTKRLLLPEKIVKAHEEGVLYFHDMDYFLQPIFNSSVISIGDMLDNGTVINGKLIESPKSFRVACTVLAQILATVASTQYGGQSVNISHLGKYVRKSYEKFKEEFGGVPSKEILDKKIKEEVTSGVQTLQYQINTLMTTNGRSPLVSLFMYLREDDEYIKENALIIEEILKQRIEGMKDAEGKYINPEFPKLIYVIDENNCLNGEKYDYLTHLALECANKTQEPSFISAKKMRENYSGNVFSPMGFRSFLTPWKDENGTYKFEGRFNQGIVSINLPQIAIVADGDEDKFFSLLDERLELCHEALLCRHYALLGTVSDTSPIHWIYGAIAHLKSGEKIDKYLKDGYSTISLGYVGVYEATMMMKEVSNTEPNGKEFAIKIVKYLKETVEKWKKASGLGFCLYGETSQKVCKTFERIDKERFGVIKNVTDKEKYTSSYHASEDEKIDYKEKLAFESVFQKLSLGGVVSQIPSEYIGELSDKEEFIKFVYDNVQYLEFTKELKK

SEQ ID NO: 1096 - protein, 746 aa, unidentified
  REGION 1..746: note = Description of Unknown: uncultivated organism sequence
  REGION 1..746: note = Category: MG60 effectors
  REGION 1..746: note = Description: MG60-311 effector
MIIIKKNPEAEKKAGAKYVIKRNGSEDLFDEDKIVNALFKANDSTIKNKITKKQIGEIADHIKRKVDETPHALNIEDIQDMVENELMQIRAFDVARSYITYRYKRALARQHNTTDDKILSLIEHNNEEVKQENSNKNPIVNSVQRDYMAGEVSKDLCKRVFLPGDIWEAHEDGLIHFHDADYFAQHMHNCCLVNLEDMLQNGTVISGTMIDKPKSFATACNIATQAIAQIASQQYGGQTMSIAHLAPFVEISRQKYMKKQRESMEKAGVKATETQLACIVEDMVDDEIKRGVQMIQYQLITLMTTNGQAPFVTIYMYLNECRDEKTKADMVKIIREMFRQRIQGVKNEQGVWVTPAFPKLIYVLEEDNIREGSRYWELTQLAAKCTAKRMVPDYISEKIMKKLKNGDVYSCMGCRSFLTVDRTKGNVANATNYKEGEHKYYGRFNQGVVTLNLVDVACTSAGDEDYFWEILDKRLELCHKALRIRHERLLGTPSDVAPILWQHGALARLKKGETIDKLLYGGYSTISLGYAGLCECTRYMKGVSHTDPKGTDFAMKIMQKLNDACAKWKEAENIDYSVYGTPLESTTYKFAKCLQKRFGIIPGVADKNYITNSYHVHVTEKINAFDKLKFEAPFQKLSPGGAISYVEVPNLQNNIEAVLSIMQYIYDNIMYAELNTKSDYCEACGYDGEIKIVEDEHGKLVWECPNCGNRDQSRMSVARRTCGYIGTQFWNQGRTQEIKERFVHLY

SEQ ID NO: 1097 - protein, 638 aa, unidentified
  REGION 1..638: note = Description of Unknown: uncultivated organism sequence
  REGION 1..638: note = Category: MG60 effectors
  REGION 1..638: note = Description: MG60-312 effector
MKVIKRDGRVVDFNREKIAIAIEKANQEVTEKERADKQDIKDIIKYIESLDKKRILVEDVQDIIEEQLMDKKKFKLAKKYMIYRYNRALVRKKNTTDESILGLIKNQNMEMLEDGTRKNAVLASSQRDYIAGEVSKDLTKRLLLPEKIVKAHGEGVLYFHDMDYFLQPIFNSSVINIGDMLDNGTVINGKLIESPKSFRVACTVLAQILATVASTQYGGQSVDISHLGKYVRKSYEKFKEEFGGVSSNEILDKKIKEEVTSGVQTLQYQINTLMTTNGRSPLVSLFMYLREGDEYIKENALIIEEILKQRIDGMKDAEGEYINPEFPKLIYVIDKDNCLNGGKYDYLTHLALDCANKTQEPSFISAKKMRENYSGNVFSPMGFRSFLTPWKDENGTYKFEGRFNQGIVSINLPQIAIVADGDEDKFFSLLDERLELCHEALLCRHYALLGTVSDTSPIHWIYGAIAHLKSGEKIDKYLKDGYSTISLGYVGVYEATMMIKEVSNTEPNGKEFAIKIVKHLKETVEKWKKASGLGFCLYGETSQKVCKTFERIDKERFGVIKNVTDKEKYTSSYHASEDEKIDYKEKLAFESVFQKLSLGGVVSQIPSEYIGELSDKEEFIKFVYDNVQYLEFTKELKK

SEQ ID NO: 1098 - protein, 745 aa, unidentified
  REGION 1..745: note = Description of Unknown: uncultivated organism sequence
  REGION 1..745: note = Category: MG60 effectors
  REGION 1..745: note = Description: MG60-313 effector
MIIIKKNPEAEKKAGAKYVIKRNGSEDLFDEDKIVNALFKANDSTIKNKITKKQIGEIADHIKRKVDETPHALNIEDIQDMVENELMQIRAFDVARSYITYRYKRALARQHNTTDDKILSLIEHNNEEVKQENSNKNPIVNSVQRDYMAGEVSKDLCKRVFLPGDIWEAHEDGLIHFHDADYFAQHMHNCCLVNLEDMLQNGTVISGTMIDKPKSFATACNIATQAIAQIASQQYGGQTMSIAHLAPFVEISRQKYMKKQRESMEKAGVKATEAQIASIVEDMVDEEIKRGVQMIQYQLITLMTTNGQAPFVTIYMYLNECRDEKTKADMVKIIREMFRQRIQGVKNEQGVWVTPAFPKLIYVLEEDNIREGSRYWDLTQLAAKCTAKRMVPDYISEKIMKQLKNGDVYSCMGCRSFLTVDRTNGNIANATNYKEGEHKYYGRFNQGVVTLNLVDVACTSAGDEDYFWEILDKRLELCHKALRIRHERLLGTPSDVAPILWQHGALARLKKGETIDKLLYGGYSTISLGYAGLCECTGYMKGVSHTDPDGTEFAMKVMQRLNDACAKWKEAENIDYSVYGTPLESTTYKFAKCLQKRFGIIPGVTDKNYITNSYHVHVTEKINAFDKLKFEAPFQKLSPGGAISYVEVPNLQNNIEAVLSIMQYIYDNIMYAELNTKSDYCEACGYDGEIKIVEDEHGKLVWECPNCGNRDQSRMSVARRTCGYIGTQFWNQGRTQEIKERFVHL

SEQ ID NO: 1099 - protein, 638 aa, unidentified
  REGION 1..638: note = Description of Unknown: uncultivated organism sequence
  REGION 1..638: note = Category: MG60 effectors
  REGION 1..638: note = Description: MG60-314 effector
MKVIKRDGRVVDFNREKIAIAIEKANQEVTEKERADKQDIKDIIKYIESLDKKRILVEDVQDIIEEQLMDKKKFKLAKKYMIYRYNRALVRKKNTTDESILGLIKNQNMEMLEDGIRKNAVLASSQRDYIAGEVSKDLTKRLLLPEKIVKAHGEGVLYFHDMDYFLQPIFNSSVINIGDMLDNGTVINGKLIESPKSFRVACTVLAQILATVASTQYGGQSVDISHLGKYVRKSYEKFKEEFGGVSSNEILDKKIKEEVTSGVQTLQYQINTLMTTNGRSPLVSLFMYLREGDEYIKENALIIEEILKQRIDGMKDAEGEYINPEFPKLIYVIDKDNCLNGGKYDYLTHLALDCANKTQEPSFISAKKMRENYSGNVFSPMGFRSFLTPWKDENGTYKFEGRFNQGIVSINLPQIAIVADGDEDKFFSLLDERLELCHEALLCRHYALLGTVSDTSPIHWIYGAIAHLKSGEKIDKYLKDGYSTISLGYVGVYEATMMIKEVSNTEPNGKEFAIKIVKHLKETVEKWKKASGLGFCLYGETSQKVCKTFERIDKERFGVIKNVTDKEKYTSSYHASEDEKIDYKEKLAFESVFQKLSLGGVVSQIPSEYIGELSDKEEFIKFVYDNVQYLEFTKELKK

SEQ ID NO: 1100 - protein, 745 aa, unidentified
  REGION 1..745: note = Description of Unknown: uncultivated organism sequence
  REGION 1..745: note = Category: MG60 effectors
  REGION 1..745: note = Description: MG60-315 effector
MIIIKKNPEAEKKAGAKYVIKRNGSEDLFDEDKIVNALFKANDSTIKNKITKKQIGEIADHIKRKVDETPHALNIEDIQDMVENELMQIRAFDVARSYITYRYKRALARQHNTTDDKILSLIEHNNEEVKQENSNKNPIVNSVQRDYMAGEVSKDLCKRVFLPGDIWEAHEDGLIHFHDADYFAQHMHNCCLVNLEDMLQNGTVISGTMIDKPKSFATACNIATQAIAQIASQQYGGQTMSIAHLAPFVEISRQKYMKKQRESMEKAGVKATETQLASIVEDMVDEEIKRGVQMIQYQLITLMTTNGQAPFVTIYMYLNECRDEKTKADMVKIIREMFLQRIQGVKNEQGVWVTPAFPKLIYVLEEDNIREGSRYWELTQLAAKCTAKRMVPDYISEKIMKQLKNGDVYSCMGCRSFLTVDRTNGNIANATNYKEGEHKYYGRFNQGVVTLNLVDVACTSAGDEDYFWEILDKRLELCHKALRIRHERLLGTPSDVAPILWQHGALARLKKGETIDKLLYGGYSTISLGYAGLCECTRYMKGVSHTDPDGTEFAMKVMQRLNDACAKWKEAENIDYSVYGTPLESTTYKFAKCLQKRFGIIPGVTDKNYITNSYHVHVTEKINAFDKLKFEAPFQKLSPGGAISYVEVPNLQNNIEAVLSIMQYIYDNIMYAELNTKSDYCEACGYDGEIKIVEDEHGKLVWECPNCGNRDQSRMSVARRTCGYIGTQFWNQGRTQEIKERFVHL

SEQ ID NO: 1101 - protein, 765 aa, unidentified
  REGION 1..765: note = Description of Unknown: uncultivated organism sequence
  REGION 1..765: note = Category: MG60 effectors
  REGION 1..765: note = Description: MG60-316 effector
MSEKHHSHCLDAMEINDLQCIMRVRSILYRNIKEGVIMDAVHTNVIKRNGEEVNFDLDKIVNAINAANKEVDRLHQLNDYQVQAIADNIAKQIEIMTHAIHVEDIQDMVETGIMEMRGYEVAQKYVRYRYKRELARKSNTTDNGILALIDHMNEEVNQENSNKNPVINSTQRDYMAGEVSKDLTKRMLLPKEIVEAHEQGIIHFHDSDYFAQREHNCDLVNLEDMLQNGTVISETMIEKPHSFFTACNVTTQIVAQVASNQYGGQSFTLSHIAPFVDVSRKKIREQVIEERKMCGEALDEEVISKITESRLRAEVKSGIQTIQYQLITLMTCNGQAPFVTMFMYLDEVPEGQTRDDLAMIIEEVLQQRIQGVKNEKGIWITPAFPKLIYVLDKDNITEDSKYWYLTELAAKCTAKRMVPDYISAKVMRELKNGDVYPCMGCRSFPTSEDSQRNPDGTRKYYGRFNQGVVTINLVDVACSAEGHMDRFWEILESRLELCHRALRCRHERLLGTVSDVAPILWQHGALARLKKGETIDKLLFNGYSTISLGYAGLCEMCVRMTGKTHTSLEGKKLALEVMQKLNDKCKEWKEAENISYSVYGTPMESTTYKFAKCLQKRFGIIKGVTDKNYITNSYHIHVTEPVNAFDKLKFESEFQKLSPGGAISYVEVPNLQDNVEAVISVMKFIYDNILYAELNTKSDYCEICGYDGEIKIVTDENGKLIWECPNCGNRDQNNLFVARRTCGYIGTQFWNQGRTQEIKDRVLHL

SEQ ID NO: 1102 - protein, 638 aa, unidentified
  REGION 1..638: note = Description of Unknown: uncultivated organism sequence
  REGION 1..638: note = Category: MG60 effectors
  REGION 1..638: note = Description: MG60-317 effector
MKVIKRDGRVVDFNREKIAIAIEKANQEVTEKERADKQDIKDIIKYIESLDKKRILVEDVQDIIEEQLMDKKKFKLAKKYMIYRYNRALVRKKNTTDESILGLIKNQNMEMLEDGTRKNAVLASSQRDYIAGEVSKDLTKRLLLPEKIVKAHGEGVLYFHDMDYFLQPIFNSSVINIGDMLDNGTVINGKLIESPKSFRVACTVLAQILATVASTQYGGQSVDISHLGKYVRKSYEKFKEEFGGVSSNEILDKKIKEEVTSGVQTLQYQINTLMTTNGRSPLVSLFMYLRKGDEYIKENALIIEEILKQRIEGMKDAEGKYINPEFPKLIYVIDENNCLNGEKYDYLTHLALECANKTQEPSFISAKKMRENYSGNVFSPMGFRSFLTPWKDENGTYKFEGRFNQGIVSINLPQIAIVADGDEDKFFSLLDERLELCHEALLCRHYALLGTVSDTSPIHWIYGAIAHLKSGEKIDKYLKDGYSTISLGYVGVYEATMMMKEVSNTELNGKEFAIKIVKYLKETVEKWKKASGLGFCLYGETSQKVCKTFERIDKERFGVIKNVTDKEKYTSSYHASEDEKIDYKEKLAFESVFQKLSLGGVVSQIPSEYIGELSDKEEFIKFVYDNVQYLEFTKELKK

SEQ ID NO: 1103 - protein, 720 aa, unidentified
  REGION 1..720: note = Description of Unknown: uncultivated organism sequence
  REGION 1..720: note = Category: MG60 effectors
  REGION 1..720: note = Description: MG60-318 effector
MKVIKRDGHMVDYSPEKIENAIIKANTEVDDDEQASSTQIKNIIKYIEKLGKKRILVEDIQDIIEMKLMSIGKYTLAKKYITYRYTRELVRRSNTTDLAIKELIDGESEYWNTENSNKNAKVVTTQRDYLAGITSTDITRRFLLPEDIVKAHDEGIIHFHDADYFAQNALHNCDLINLEDMLQNGTNINGVMIEKPHRFLTAMTIATQIITGVASSQYGGCTISLAHLAPFVRDSKKLYEAKYKRRKLSKEQIDQFVKEDLAKEVTDGVQTFQYQINSMTTTNGQAPFLSVCLYLGETEEYKEELAMLIEEVLKQRIQGMKNEKGVYITPAFPKLLYVLEEDNIKVGSKYYYLTELAAKCTAKRMVPDYISEKVMKETKIDKNGDGQCYPCMGCRSFLTPYLDSDGKPKYYGRFNQGVVTINLVDVALSSDKDMNKFWNIFEERLELAHRALQIRHKRLSKVTSDVAPILWQHGALARLKKGESIHDLLHNGYSTISLGFAGLYECVKYMTGKSHTDNAEGREFGLQVMQKMDDKCDEWKKEENIDYSVYGTPIESTTYKFAKCLKERFGVIKGITDRDYITNSYHVPVFEEIDAFTKLKLESEFQKLSPGGAISYIETPNLTNNIDVVLEIIKFIYDNIMYAELNTKSDYCQECGYDQEILLDENLEWYCPNCGNRNHDTLNVARRTCGYIGTNFWNKGRTQEIKDRVIHIDNKDLDEE

SEQ ID NO: 1104 - protein, 724 aa, unidentified
  REGION 1..724: note = Description of Unknown: uncultivated organism sequence
  REGION 1..724: note = Category: MG60 effectors
  REGION 1..724: note = Description: MG60-319 effector
MNVIKRSGEEVVFDASKIENAIKKANKATTHNQMSDELIRSVTQSVIDKCENLKRSPNVEEIQDMVEGELMEHRCFAVAHNYITYRYERALVRKANSTDKQIMSLLERNNEEVKQENSNKNPLVNSVQRDYMAGEVSKDITKRFLLPQDVMEAHEQGIIHFHDSDYFAQHMHNCCLVNLEDMLQNGTVISETMIEKPHSFSTACNVATQIIAQVASSQYGGQSITLSHLAPFVQVSREKARREVKEELESLNLDSSEDTVNKMAEMRVRKEIEKGVQMIQYQVITLMTTNGQAPFVTVFMYLNEVPEGQTRDDLAIIIEEMLKQRIKGVKNEKGIWITPAFPKLIYVLEENNIEEGSKYWYLTELAARCTAKRMVPDYISEKKMLELKVDANGEGHCYPCMGCRSFLTTYLDENGKPKYYGRFNQGVVTLNLVDVACSSKQNEEAFWRIMDERLALCKKALMCRHERLLGTPSDVAPILWQNGALARLKKGEPIDKLLFGGYSTISLGYAGLCECVYYMTGHPHTEEPGTSFGLKVMQYLNDACAKWKAEENIDFSLYGTPMESTTFKFSKHLQERFGIIPHVTDKNYITNSYHVHVTEEIDAFTKLSFESQFQKLSPGGAISYVEVPNMENNIDAVLAIMKHIYNHIMYAELNTKSDYCQVCGYTGEIKIVEDENHKLVWECPNCGNRDQEKMNVARRTCGYIGTQFWNQGRTQEIKERVLHL

SEQ ID NO: 1105 - protein, 634 aa, unidentified
  REGION 1..634: note = Description of Unknown: uncultivated organism sequence
  REGION 1..634: note = Category: MG60 effectors
  REGION 1..634: note = Description: MG60-320 effector
MKVIKRDGRVVDFNREKIAIAIEKANQEVTEKERADKQDIKDIIKYIESLDKKRILVEDVQDIIEEQLMDKKKFKLAKKYMIYRYNRALVRKKNTTDESILGLIKNQNMEMLEDGTRKNAVLASSQRDYIAGEVSKDLTKRLLLPEKIVKAHEEGVLYFHDMDYFLQPIFNSSVINIGDMLDNGTVVNGKLIESPKSFRVACTVLAQILATVASTQYGGQSVDISHLGKYVRKSYEKFKEEFGGMPSKEILDKKIKEEVTSGVQTLQYQINTLMTTNGRSPLVSLFMYLREGDEYIKENALIIEEILKQRIEGMKDAEGKYINPEFPKLIYVIDENNCLNGEKYDYLTQLALECANKTQEPSFISAKKMRENYSGNVFSPMGFRSFLTPWKDENGTYKFEGRFNQGIVSINLPQIAIVADGDEDKFFSLLDERLELCHEALLCRHYALLGTVSDTSPIHWIYGAIAHLKSGEKIDKYLKDGYSTISLGYVGVYEATMMMKEVSNTEPEGKEFAIKIVKHLKETVEKWKKASGLGFCLYGETSQKVCKTFERIDKERFGVIKNVTDKEKYTSSYHASEDEKIDYKEKLAFESVFQKLSLGGVVSQIPSEYIGKLSDKEEFIKFVYDNVQYLEFTK

SEQ ID NO: 1106 - protein, 740 aa, unidentified
  REGION 1..740: note = Description of Unknown: uncultivated organism sequence
  REGION 1..740: note = Category: MG60 effectors
  REGION 1..740: note = Description: MG60-321 effector
MKIIKRNGSEAVFDITKIIAAVTKANNVVPESQRLTNHQIIELADKVQASCLSRGHAMNVEEIQDIVEDAIMATGAYEVARKYITYRYVQNLKRTHNTTDDRILSLIECNNEEVKQENSNKNPTVNSVQRDYMAGEVSKDLTMRMLLPPEIVKAHEEGIIHFHDADYYAQHMHNCDLVNLDDMLQNGTVISGTLIEKPHSFSTACNIATQIIAQVASSQYGGQSISLTHLAPFVDVSRKKIRRDVEAEMKELGINPGEEKISEIVEARLREEIKRGVQTIQYQVVTLMTTNGQAPFITVFMYLGEAGDNQRLKSDLAIIIEEMLRQRYQGVKNEAGVWITPAFPKLIYVLEEDNIREGTPYFYLTKLAAKCTAKRLVPDYISEKKMKEYKLSKGETEGNGDVYTCMGCRSFLTPDRSGNGWDNIANAKNYDGKPKYYGRFNQGVVTINLVDVALSSGGDFDKFWKIFDERLELCHKALMCRHNRLKGTLSDAAPILWQYGALARLEKGEPIDKLLYGGYSTISLGYAGLYECCKYMTGKSHTDPAAKPFALHVMQHMNDACQTWKKQHNIDFSLYGTPLESTTYKFAKCLQKRFGIIPGITDRNYITNSYHVHVTEQIDAFTKLKFESEFQKLSPGGAISYVEVPNMQDNLEAVIKVMQFIYDNIMYAELNTKSDYCQVCGYDGEISIVEEDGKLIWECPKCHNRDQNKLNVARRTCGYIGTQFWNQGRTAEIKDRVLHL

SEQ ID NO: 1107 - protein, 728 aa, unidentified
  REGION 1..728: note = Description of Unknown: uncultivated organism sequence
  REGION 1..728: note = Category: MG60 effectors
  REGION 1..728: note = Description: MG60-322 effector
MDAVHTNVIKRNGEEVNFDLDKIVNAINAANKEVDRLHQLNDYQVQAIADNIAKQIEIMTHAIHVEDIQDMVETGIMEMRGYEVAQKYVRYRYKRELARKSNTTDNGILALIDHMNEEVNQENSNKNPVINSTQRDYMAGEVSKDLTKRMLLPEEIVEAHEQGIIHFHDSDYFAQREHNCDLVNLEDMLQNGTVISETMIEKPHSFFTACNVTTQIVAQVASNQYGGQSFTLSHIAPFVDVSRKKIREQVIEERKMCGEALDEEVISKITESRLRAEVKSGIQTIQYQLITLMTCNGQAPFVTMFMYLDEVPEGQTRDDLAMIIEEVLQQRIQGVKNEKGIWITPAFPKLIYVLDKDNITEDSKYWYLTELAAKCTAKRMVPDYISAKVMRELKNGDVYPCMGCRSFPTSEDSQRNPDGTRKYYGRFNQGVVTINLVDVACSAEGHMDRFWEILESRLELCHRALRCRHERLLGTVSDVAPILWQHGALARLKKGETIDKLLFNGYSTISLGYAGLCEMCVRMTGKTHTSPEGKKFALEVMQKLNDKCKEWKEAENISYSVYGTPMESTTYKFAKCLQKRFGIIKGVTDKNYITNSYHIHVTEPVNAFDKLKFESEFQKLSPGGAISYVEVPNLQDNVEAVISVMKFIYDNILYAELNTKSDYCEICGYDGEIKIVTDENGKLIWECPNCGNRDQNNLFVARRTCGYIGTQFWNQGRTQEIKDRVLHL

SEQ ID NO: 1108 - protein, 724 aa, unidentified
  REGION 1..724: note = Description of Unknown: uncultivated organism sequence
  REGION 1..724: note = Category: MG60 effectors
  REGION 1..724: note = Description: MG60-323 effector
MNVIKRSGEEVVFDASKIENAIKKANKATTHNQMSEELIRSVTQSVIDKCENLKRSPNVEEIQDMVEGELMEHRCFAVAHNYITYRYERALVRKANSTDKQIMSLLERNNEEVKQENSNKNPLVNSVQRDYMAGEVSKDITKRFLLPQDVMEAHEQGIIHFHDSDYFAQHMHNCCLVNLEDMLQNGTVISETMIEKPHSFSTACNVATQIIAQVASSQYGGQSITLSHLAPFVQVSREKARREVKEELESLNLDSSEDTVNKMAEMRVRKEIEKGVQMIQYQVITLMTTNGQAPFVTVFMYLNEVPEGQTRDDLAIIIEEMLKQRIKGVKNEKGIWITPAFPKLIYVLEENNIEEGSKYWYLTELAARCTAKRMVPDYISEKKMLELKVDVNGEGHCYPCMGCRSFLTTYLDENGKPKYYGRFNQGVVTLNLVDVACSSKQDEEAFWRIMDERLALCKKALMCRHERLLGTPSDVAPILWQNGALARLKKGEPIDKLLFGGYSTISLGYAGLCECVYYMTGHPHTEEPGTSFGLKVMQYLNDACAKWKAEENIDFSLYGTPMESTTFKFSKHLQERFGIIPHVTDKNYITNSYHVHVTEEIDAFTKLSFESQFQKLSPGGAISYVEVPNMENNIDAVLAIMKHIYNHIMYAELNTKSDYCQVCGYTGEIKIVEDENHKLVWECPNCGNRDQEKMNVARRTCGYIGTQFWNQGRTQEIKERVLHL

SEQ ID NO: 1109 - protein, 724 aa, unidentified
  REGION 1..724: note = Description of Unknown: uncultivated organism sequence
  REGION 1..724: note = Category: MG60 effectors
  REGION 1..724: note = Description: MG60-324 effector
MNVIKRSGEEVVFDASKIENAIKKANKATTHNQMSDELIRSVTQSVIDKCENLKRSPNVEEIQDMVEGELMEHRCFAVAHNYITYRYERALVRKANSTDKQIMSLLERNNEEVKQENSNKNPLVNSVQRDYMAGEVSKDITKRFLLPQDVMEAHEQGIIHFHDSDYFAQHMHNCCLVNLEDMLQNGTVISETMIEKPHSFSTACNVATQIIAQVASSQYGGQSITLSHLAPFVQVSREKARREVKEELESLNLDSSEDTVNKMAEMRVRKEIEKGVQMIQYQVITLMTTNGQAPFVTVFMYLNEVPEGQTRDDLAIIIEEMLKQRIKGVKNEKGIWITPAFPKLIYVLEENNIEEGSKYWYLTELAARCTAKRMVPDYISEKKMLELKVDANGEGHCYPCMGCRSFLTTYLDENGKPKYYGRFNQGVVTLNLVDVACSSKQDEEAFWKIMDERLALCKKALMCRHERLLGTPSDVAPILWQNGALARLKKGEPIDKLLFGGYSTISLGYAGLCECVYYMTGHPHTEEPGTSFGLKVMQYLNDACAKWKAEENIDFSLYGTPMESTTFKFSKHLQERFGIIPHVTDKNYITNSYHVHVTEEIDAFTKLSFESQFQKLSPGGAISYVEVPNMENNIDAVLAIMKHIYNHIMYAELNTKSDYCQVCGYTGEIKIVEDENHKLVWECPNCGNRDQEKMNVARRTCGYIGTQFWNQGRTQEIKERVLHL

SEQ ID NO: 1110 - protein, 716 aa, unidentified
  REGION 1..716: note = Description of Unknown: uncultivated organism sequence
  REGION 1..716: note = Category: MG60 effectors
  REGION 1..716: note = Description: MG60-325 effector
MLEVIKRNGQKVPFDRDKITIAIEKAMNSSSGVYEEGQAAKIAGEIEAYAASIHKDMTIYAIEDQVYYRLLKYNNPATARAYENYKAIQSFKRQTNTTDNDVFGLLNNTNLEVLNENSNKNGHVVSTQRDLIAGEVSKDIARRKLIPADIVQAHDSGAIHFHDMDYIIQPMFNCCLINLEDMLANGTVINGKKIDTPKSFQVACTVTTQIIAQVASGQYGGQSINGIDRILAPYVRKSFKKYMSAVVEEQREVYGIEPDMEKAEEIAWKRTKKEIKDGIQTIQYQINTLMTTNGQAPFVTLFMYFQPDYEYAKEAALIDEELLRQRIQGIKNDANVYVTPAFPKLIYVLDEHNVREGSPYFYLTKLAAECTAKRMYPDYISAKKMRESYEGNVFSPMGCRSFLSPWKDAQGNYKFDGRFNMGVVSLNLPQIGILADGDEEKFFQILDKRLELCKKALLLRVELLKKVTSDVSPIHWQYGAIARLQPGETIEKFIYGGYATLSLGYIGMYEATVLTKHCSHTTPEGRKFAMRIMDDLNAHIQQWKKETNIGFALYGTPAENLTNRFCKIDKARFGSIANVTDKDYYTNSYHVDVREPINVFDKFSFEADFEDKSTGGCISYAEIPNMSHNIPAVLTMIQYIYDHIAYGEFNTKLDYCHECGFDGEIILNDDNQWECPRCHNQDRNKLTVIRRTCGYLGENFWNEGRTQEITNRVLHI

SEQ ID NO: 1111 - protein, 1117 aa, unidentified
  REGION 1..1117: note = Description of Unknown: uncultivated organism sequence
  REGION 1..1117: note = Category: MG60 effectors
  REGION 1..1117: note = Description: MG60-326 effector
MKIIKRNGSEQEFNPSKIHVAMTKAFRSVEEGKTVSEETIANLTAKAMAKVQEIPHTPNVEEVQDIVENVLMDSGFHDVSRSYIKYRFTHAVRRNTTDAAILSLIEAENEEVKQENANKNPTVASVQRDYMAGEVSKDLTMRLLLPEEIAKAHNEGILHFHDADYYAQHMHNCCLINLDDMLQNGTVISGTMIEKPHRFSTACNIATQIIAQVASCQYGGQSISLTHLAKFVDVSRKAIRKEVETENKEAAINMTECQMNEVVERRLRKEIRAGIQTIQYQIITLMTTNGQAPFVTVFMYLDEAGNDETLKHDLAICIEEMLKQRYEGVKNEVGVWITPAFPKLIYVLDEDNIRPESPFFYLTKLAAKCTAKRMVPDYISAKKMREYKLSKGETEGHGDVYTCMGCVTGDEVVVYKYLGTMYTESFERMWRRLSAHFPVETQPGRTNDLYIDLHGVSIYDNKLSDFTECHRIIRNENSKILRLKFSNGRVLDCTPDHPFETENRGVVRADELASDDVIMADKKSAFVFSEDGVVPYNTDLAWALGLLLCDASYDGTIVLSLANEGEDDIAQKFSNVMKTTYGLNTNCVVQSRERKGVYKDILCVSDGKRTIQKVCDFLVGEFGGKKKMLRHIPSEVFTWDEDARFAFLAGMIDADGYINNSQRVPAVQIGSINKELAIQQALLAQSLGMPASIYMNHYKGEGRGDTIRYHVTFVPCSRLMEFIVCDKKKAHFNDEVRKNHSISETSYCKMAERMELSGEYATYDVTTASEHFMVSGLYSHNCRSFLTPDRSGNGWNNIANAKNYEPGEPKYYGRFNQGVVTINLPDVALSSGGDFEKFWQIFDERLELCHKALQYRHKRLEGTLSDTSPIHWQYGALARLQKGEPIDKLLHGGYSTISLGYAGLYECCKYMTGKSHTDPDAKPFALKVMQHMNDMCAKWKAEEDIDYSLYGTPLESTTYKFAKCLDRRFGKEWYKISGGKNYITNSYHVHVTEQIDAFTKLKFESEFQKLSPGGAISYVEVPNMQDNLAAVIKVMQFIYDNIMYAELNTKSDYCQVCGYDGEIQIVDDDGKLVWECPNCHNRDFSKMNVARRTCGYIGCQGFNAGRTAEIRDRVLHL

SEQ ID NO: 1112 - protein, 638 aa, unidentified
  REGION 1..638: note = Description of Unknown: uncultivated organism sequence
  REGION 1..638: note = Category: MG60 effectors
  REGION 1..638: note = Description: MG60-327 effector
MKVIKRDGRVVDFNREKIAIAIEKANQEVTEKERADKQDIKDIIKYIEALDKKRILVEDVQDIIEEQLMDKKKFKLAKKYMIYRYNRALVRKKNTTDESILGLIKNQNMEMLEDGTRKNAVLASSQRDYIAGEVSKDLTKRLLLPEKIVKAHEEGILYFHDMDYFLQPIFNSSVINIGDMLDNGTVINGKLIESPKSFRVACTVLAQILATVASTQYGGQSVDISHLGKYVRKSYEKFKEEFGDVPSKEILDKKIKEEVTSGVQTLQYQINTLMTTNGRSPLVSLFMYLREDDEYIKENALIIEEILNQRIEGMKDAEGKYINPEFPKLIYVIDENNCLNNGKYDYLTHLALDCANKTQEPSFISAKKMRENYSGNVFSPMGFRSFLTPWKDENGTYKFEGRFNQGIVSINLPQIAIVADGDEDKFFSLLDERLELCHEALLCRHYALLGTVSDTSPIHWIYGAIAHLKSGEKIDKYLKDGYSTISLGYVGVYEATIMMKEVSNTEPDGKEFAIKIVKHLKETVEKWKKTSGLGFCLYGETSQNVCKTFERIDKERFGVIKNVTDKEKYTSSYHSSENEKIDYKEKLAFESEFQKLSLGGVVSQIPRGYIGELSDKEEFIKFVYDNVQYLEFTEEFVK

SEQ ID NO: 1113 - protein, 724 aa, unidentified
  REGION 1..724: note = Description of Unknown: uncultivated organism sequence
  REGION 1..724: note = Category: MG60 effectors
  REGION 1..724: note = Description: MG60-328 effector
MNVIKRSGEEVVFDSIKIENAIKKANKATTHNQMSDELIHTVTQSVVDKCENLKRSPNVEEIQDMVEGELMEKRCFAVAHNYITYRYERALVRKANSTDKQIMSLLERNNEEVKQENSNKNPLVNSVQRDYMAGEVSKDITKRFLLPQDVMEAHEQGIIHFHDSDYFAQHMHNCCLVNLEDMLQNGTVISETMIEKPHSFSTACNVATQIIAQVASSQYGGQSITLSHLAPFVQVSREKARREVKEELESLNLDSSEDTVNKMAEMRVRKEIEKGVQMIQYQVITLMTTNGQAPFVTVFMYLNEVPEGQTRDDLAIIIEEMLKQRIKGVKNEKGIWITPAFPKLIYVLEENNIEEGSKYWYLTELAAKCTAKRMVPDYISEKKMLELKVDANGEGHCYPCMGCRSFLTTYLDENGKPKYYGRFNQGVVTLNLVDVACSSKQDEEAFWRIMDERLALCKKALMCRHERLLGTPSDVAPILWQNGALARLKKGEPIDKLLFGGYSTISLGYAGLCECVYYMTGHPHTEEPGTSFGLKVMQYLNDACAKWKAEENIDFSLYGTPMESTTFKFSKHLQERFGIIPHVTDKNYITNSYHVHVTEEIDAFTKLSFESQFQKLSPGGAISYVEVPNMENNIDAVLAIMKHIYNHIMYAELNTKSDYCQVCGYTGEIKIVEDENHKLVWECPNCGNRDQEKMNVARRTCGYIGTQFWNQGRTQEIKERVLHL

SEQ ID NO: 1114 - protein, 760 aa, unidentified
  REGION 1..760: note = Description of Unknown: uncultivated organism sequence
  REGION 1..760: note = Category: MG60 effectors
  REGION 1..760: note = Description: MG60-329 effector
MKVIKRDCSEVDFDKSKISTAILKAMKNGSGIVKQKIAEDIANEIEEDCKDKDEVSISDIESMVYDKLITKKQRLTAKAYEGYRSIREFQRENENTIDTEITELLSGESDYWNNENSNKNPRLNTTQRDYLAGIVSKDASRRYILPPEIVQAHDDGLIHVHDLDYLIQYMNNCCLINLEDMLQNGTVISETLIEKPHSFSTACTVATQIIAQVASSQYGGQSISLAHLAPFVDISRQKIRKEVIEEQEYLYRNIDEKEWVKPRKVLGKKLRKDQEKFYKNKDRLLKFIDATDIEDIVEKRLKKEIEKGIQTIQYQITTLMTTNGQAPFITLFMYLNEAHNQREKDDLAMLIEEELRQSYLGVKNEEGVYITPAFPKVIYVLQEDNIHEEDKYWYLTEMAAKCSMKRLTPDYISEKIMKEMKDGNCYPVMGCRSALTVWYDENGKPKFYGRFNSGVVTVSLPDIALSSGGDFNEFWRIFDERTELCHKALKIRHQRLRGTKSDVAPILWQHGAFARLKKGESIDKLLFGGYSTLSLGYAGLAECVKYMTGHYHCDEGIGEKFGLEVMQALNDKCSQWKIDENIDYSLYGTPLEATTEKFAKKLKERFGIIEGVTDRTYITNSYHIPVFIHIDAFGKLRIEAKFQRLSPGGSISYIECPNMENNIPAVLEVMKFIYNNNMYAELNTKSDYCQKCGWSKEIKLIDEGGKLIWECPNCGNRDVRTMDITRRTCGYKGTARNGWNQGRLGDIHDRVPHLDDIEEE

SEQ ID NO: 1115 - protein, 638 aa, unidentified
  REGION 1..638: note = Description of Unknown: uncultivated organism sequence
  REGION 1..638: note = Category: MG60 effectors
  REGION 1..638: note = Description: MG60-330 effector
MKVIKRDGRVVDFNREKIAIAIEKANQEVTEKERADKQDIKDIIKYIESLDKKRILVEDVQDIIEEQLMDKKKFKLAKKYMIYRYNRALVRKKNTTDESILGLIKNQNMEMLEDGTRKNAVLASSQRDYIAGEVSKDLTKRLLLPEKIVKAHGEGVLYFHDMDYFLQPIFNSSVINIGDMLDNGTVINGKLIESPKSFRVACTVLAQILATVASTQYGGQSVDISHLGKYVRKSYEKFKEEFGGVSSNEILDKKIKEEVTSGVQTLQYQINTLMTTNGRSPLVSLFMYLRKGDEYIKENALIIEEILKQRIEGMKDAEGKYINPEFPKLIYVIDENNCLNGEKYDYLTHLALECANKTQEPSFISAKKMRENYSGNVFSPMGFRSFLTPWKDENGTYKFEGRFNQGIVSINLPQIAIVADGDEDKFFSLLDERLELCHEALLCRHYALLGTVSDTSPIHWIYGAIAHLKSGEKIDKYLKDGYSTISLGYVGVYEATMMMKEVSNTELNGKEFAIKIVKSLKETVEKWKKASGLGFCLYGETSQKVCKTFERIDKERFGVIKNVTDKEKYTSSYHASEDEKIDYKEKLAFESVFQKLSLGGVVSQIPSEYIGELSDKEEFIKFVYDNVQYLEFTKELKK

SEQ ID NO: 1116 - protein, 634 aa, unidentified
  REGION 1..634: note = Description of Unknown: uncultivated organism sequence
  REGION 1..634: note = Category: MG60 effectors
  REGION 1..634: note = Description: MG60-331 effector
MKVIKRDGRVVDFNREKIAIAIEKANQEVTEKERADKQDIKDIIKYIESLDKKRILVEDVQDIIEEQLMDKKKFKLAKKYMIYRYNRALVRKKNTTDESILGLIKNQNMEMLEDGTRKNAVLASSQRDYIAGEVSKDLTKRLLLPEKIVKAHEEGVLYFHDMDYFLQPIFNSSVINIGDMLDNGTVINGKLIESPKSFRVACTVLAQILATVASTQYGGQSVDISHLGKYVRKSYEKFKEEFGGVPSKEILDKKIKEEVTSGVQTLQYQINTLMTTNGRSPLVSLFMYLREGDEYIKENALIIEEILKQRIEGMKDAKGKYINPEFPKLIYVIDENNCLNGEKYDYLTHLALECANKTQEPSFISAKKMRENYSGNVFSPMGFRSFLTPWKDENGTYKFEGRFNQGIVSINLPQIAIVADGDEDKFFSLLDERLELCHEALLCRHYALLGTVSDTSPIHWIYGAIAHLKSGEKIDKYLKDGYSTISLGYVGVYEATMMVKEVSNNEPEGKEFAIKIVKHLKETVEKWKKASGLGFCLYGETSQKVCKTFERIDKERFGVIKNVTDKEKYTSSYHASEDEKIDYKEKLAFESVFQKLSLGGVVSQIQSKYIGELNDKEEFIKFVYDNVQYLEFIK

SEQ ID NO: 1117 - protein, 724 aa, unidentified
  REGION 1..724: note = Description of Unknown: uncultivated organism sequence
  REGION 1..724: note = Category: MG60 effectors
  REGION 1..724: note = Description: MG60-332 effector
MNVIKRSGEEVVFDASKIENAIKKANKATTHNQMSDELIRSVTQSVINKCENLKRSPNVEEIQDMVEGELMEHRCFAVAHNYITYRYERALVRKANSTDKQIMSLLERNNEEVKQENSNKNPLVNSVQRDYMAGEVSKDITKRFLLPQDVMEAHEQGIIHFHDSDYFAQHMHNCCLVNLEDMLQNGTVISETMIEKPHSFSTACNVATQIIAQVASSQYGGQSITLSHLAPFVQVSREKARREVKEELESLNLDSSEDTVNKMAEMRVRKEIEKGVQMIQYQVITLMTTNGQAPFVTVFMYLNEVPEGQTRDDLAIIIEEMLKQRIKGVKNEKGIWITPAFPKLIYVLEENNIEEGSKYWYLTELAAKCTAKRMVPDYISEKKMLELKVDVNGEGHCYPCMGCRSFLTTYLDENGKPKYYGRFNQGVVTLNLVDVACSSKQDEEAFWRIMDERLALCKKALMCRHERLLGTPSDVAPILWQNGALARLKKGEPIDKLLFGGYSTISLGYAGLCECVYYMTGHPHTEEPGTSFGLKVMQYLNDACAKWKAEENIDFSLYGTPMESTTFKFSKHLQERFGIIPHVTDKNYITNSYHVHVTEEIDAFTKLSFESQFQKLSPGGAISYVEVPNMENNIDAVLAIMKHIYNHIMYAELNTKSDYCQVCGYTGEIKIVEDENHKLVWECPNCGNRDQEKMNVARRTCGYIGTQFWNQGRTQEIKERVLHL

SEQ ID NO: 1118 - protein, 780 aa, unidentified
  REGION 1..780: note = Description of Unknown: uncultivated organism sequence
  REGION 1..780: note = Category: MG60 effectors
  REGION 1..780: note = Description: MG60-333 effector
MENEVNNKVETEEEVLSSNVDVIKRNGKEVRFDQRKIQAAIRKANKDVDERYRISDIQIRTISYMIKLWVKELGHTPTVDEIQDKVVISLGHESPELQHAYDIYRYDRDLERNGNSTDREILSLVDRQNEIAMQENSNKNPIVESTQRDYIAGLVSRDISERILFDKDLVEAHREGKIHIHDTDYFLQTIHNCDLVNLEDMLQNGTVISGTLIRKPHSFRTACNIATQVIAQVASAQYGGQTITLSHLAPFVDVSRQAIRKAVIEEGKISGVDYTDEIIDKITHSRLKKEITDGIQTLNYQLVTLLTTNGQTPFVTIFMYIDEVPEGQTREDLVLIIEEVLRQRMDGTENEDGVKTTPAFPKLIYCLDEDNVKEGTKYWDTTVLAAQCTAKRMNPDYISAKIMREQKGDVYPCMGCRSFLTPDRTQKEFEVVKEDGTTEIVKPLGNIANAKNYDEANHKYYGRFNQGVCTISLPDVALSSGGDKEKFWKIFDERLEMCHRVLQTRHNRLMGTPSDVAPILWQYGALARLEKHETIDKLLFHGYSTISLGYAGLYECTKYMTGESHTDEKAGKPFALEVMKHMNDACAKWKKAEDIDYSLYGTPIESTTYKFAKALQTRFGIVEGITDHGYITNSYHVNVREKIDAFKKLEFEAEFQNLSPGGAVSYVEVPDMQSNIPAVLSIMQYIYEHIMYAELNTKSDYCMNCGYDGEIQIVKNENGKLIWKCPKCGNTDQSKMSVARRTCGYIGTQYWNQGRTEEIQDRVMHVSLENFKPCSCGCDS

SEQ ID NO: 1119 - protein, 873 aa, unidentified
  REGION 1..873: note = Description of Unknown: uncultivated organism sequence
  REGION 1..873: note = Category: MG60 effectors
  REGION 1..873: note = Description: MG60-334 effector
MPKFFATCPKGLEGLLNAELVQLGAESVKETVAGVSFSGDLNLAVRVCLWTRFATRVLLTIGSFHTDSDIELYNGAYSLHYEDYFSSDQTISVDFNGQNSFINNTLYGALRVKDALCDRFVKLTGSRPNVDRENPDVCINAHLDKKNNVTISLDLSGKALHRREYRTEAGIAPLKENLAAAIVARSGYVSGSVVDPMCGSGTLLIEAAMKAADIAPGLFRSSYGFEKLKDFDAVEFTHYKREAHARAEAGKQRLIDARVSFYGFDRDPAVLEKAVQNVERAGLSQLIKFTAGDLHELKNPVTSGSKGFVITNPPYGERLGNVAELLELYSSLGFCLKKEFAGWKATVISSSEDLLSCLRLRADKTYRLYNGALECQLRVYSIGEKLQVTDDGSENAGRITDSGKDAGFTLSTETLRVAEEFANRLKKNLKRLEKWAAREGIEAYRIYDADLPNYNAAIDLYGSYVVIQEYAAPNSVDAKIAHRRMLDLIQVVVGVTGIKGDHVILKVRERKKGESQYEKLNETKHTLLVREYMASFIVNLWDYLDTGLFLDHREVRRMITKMSAGKSFLNIFSYTGSATVAAAIGGARETTTVDMSRTYLAWAKDNMLANGFSGRNHQFIQADCLRWLDISPKTYDLIFADPPTFSNSKRMEATFDVQRDHVALIAKLTRLLNLGGTLIFSNNNRSFKLDSDAITAMGYKITDVSEKTVQEDFRRNKKIHCCFILEKVIDVPVPEDYSDASFGSVSGLKAKVEYLNGGVSGDRREGRGGRERPVRDGRDGAPGRERNGSFRKHDNDAFGKSRSYTFRNGERQEAPADGRSFRETDGSENRPVIPAVRRSRMPSRVIGGASAGGQTAPRGPRLSRNIGRKEDKE

SEQ ID NO: 1120 - protein, 719 aa, unidentified
  REGION 1..719: note = Description of Unknown: uncultivated organism sequence
  REGION 1..719: note = Category: MG60 effectors
  REGION 1..719: note = Description: MG60-335 effector
MKVVKRDGKKVEFDAIKIENAILKAMKCGSGIVDEKCAHDIAVEIEKWHEHSDDNISIYRIEGQVFEKLIEKGQILTAKAYEGYRKVREFQRETNTIDNEIYGIVNQTNKEAMEENSNKDATVLATQRDLIAGEFSRDYCRRLLLPPKIVQAHDDGIIHFHDMDYYIQKMHNCDLVNLKDMFAKGTVINDKLIETPKSLQTACTVATQIVQQVANGQYGGQTISLAHLSPFVRLSYEKHQHNVRHEGRLIGIEYTDEQVEKIATSRIKDEIKAGIQTIQYQINTFSTTNGQAPFLSVFMYLREEPEYIKETAMLIEETLRQRYVGMKNPVGAYVTPAFPKLLYVLDDNNVPQDSEYRYLTDLAVKCVSKRMMPDFISAKVMRENYEGQVFPCMGCRSFLSPWKDENGEYKWYGRFNQGVVTLNLADAGLSANHKLDVFWKILDERLELCKEALMLRHESLKGTLSDVSPIHWRYGALARLKSGETIDKLLENGYSTISLGYIGLYECVVSLIGDTHTSKDGNELATKIMQRLREACDSWKEETGLGFGLYGTPAESTTYTFARALKKRFGIVKGITDKDYLTNSYHVNVKEHIDAFDKLKVEAKFQKVSSGGAISYVEVTNMSENLDALSALIDYMYDTIQYAEINTKSDYCQECGFDGEILLDENREWYCPNCGNRNHKSLNVCRRTCGYLGDNFWNQGRTQEIAERFVHLDNHLLGE

SEQ ID NO: 1121 - protein, 716 aa, unidentified
  REGION 1..716: note = Description of Unknown: uncultivated organism sequence
  REGION 1..716: note = Category: MG60 effectors
  REGION 1..716: note = Description: MG60-336 effector
MLEVIKRNGERVPFNRDKITVAIEKAMNSSSGIYEEGQAAKIASEIEAYAASIQKDLTIYAIEDQVYYRLLKYNNPATARAYENYKTIQAFKRQTNTTDDDVFGLLNNTNLEVLDENSNKNGHVVSTQRDLIAGEVSKDIARRKLIPADIVQAHDSGAIHFHDMDYIIQPMFNCCLINLEDMLANGTVINGKKIDTPKSFQVACTVTTQIIAQVASGQYGGQSINGIDRILAPYVRKSFKKYMKAVVEEQREVYGIEPDMEKAEEIAWKRTKKEIKDGIQTIQYQINTLMTTNGQAPFVTLFMYFQPDYEYAREAALIDEELLRQRIQGIKNEANVYVTPAFPKLIYVLDEHNVREGSPYFYLTKLAAECTAKRMYPDYISAKKMRESYEGNVFSPMGCRSFLSPWKDEKGNYQFDGRFNMGVVSLNLPQIGILADGDEEKFFQILDKRLELCKKALLLRVDLLKRITSDVSPIHWQYGAIARLKPGETIEKFIYGGYATLSLGYIGIYEATVLTKHCSHTAPEGRKFAMRIMDDLNAHIKKWRKETNIGFALYGTPAENLTNLFCKIDKARFGSIPDVTDKGYYTNSYHVDVREPINVFDKFSFEADFEDKSTGGCISYAEIPNMTHNIPAVLTMVQYIYDHITYGEFNTKLDYCHECGFDGEIILNDDNEWECPRCHNKDRNKLTVIRRTCGYLGENFWNEGRTQEIKNRVLHI

SEQ ID NO: 1122 - protein, 638 aa, unidentified
  REGION 1..638: note = Description of Unknown: uncultivated organism sequence
  REGION 1..638: note = Category: MG60 effectors
  REGION 1..638: note = Description: MG60-337 effector
MKVIKRDGRVVDFNREKIAIAIEKANQEVTEKERADKQDIKDIIKYIESLDKKRILVEDVQDIIEEQLMDKKKFKLAKKYMIYRYNRALVRKKNTTDESILGLIKNQNMEMLEDGTRKNAVLASSQRDYIAGEVSKDLTKRLLLPEKIVKAHGEGVLYFHDMDYFLQPIFNSSVINIGDMLDNGTVINGKLIESPKSFRVACTVLAQILATVASTQYGGQSVDISHLGKYVRKSYEKFKEEFGGVSSNEILDKKIKEEVTSGVQTLQYQINTLMTTNGRSPLVSLFMYLREGDEYIKENALIIEEILKQRIDGMKDAEGEYINPEFPKLIYVIDKDNCLNGGKYDYLTHLALDCANKTQEPSFISAKKMRENYSGNVFSPMGFRSFLTPWKDENGTYKFEGRFNQGIVSINLPQIAIVADGDEDKFFSLLDERLELCHEALLCRHYALLGTVSDTSPIHWIYGAIAHLKSGEKIDKYLKDGYSTISLGYVGVYEATMMIKEVSNTEPNGKEFAIKIVKHLKETVEKWKKASGLGFCLYGETSQKVCKTFERIDKERFGVIKNVTDKEKYTSSYHASEDEKIDYKEKLAFESVFQKLSLGGVVSQIPSEYIGELSDKEEFIKFVYDNVQYLGFTKELKK

SEQ ID NO: 1123 - protein, 716 aa, unidentified
  REGION 1..716: note = Description of Unknown: uncultivated organism sequence
  REGION 1..716: note = Category: MG60 effectors
  REGION 1..716: note = Description: MG60-338 effector
MLEVIKRNGERVPFNRDKITNAIEKAMNSSSGIYEEGQAAKIASEIEAYAASIQKDLTIYAIEDQVYYRLLKYNNPATARAYENYKTIQAFKRQTNTTDDDVFGLLNNTNLEVLDENSNKNGHVVSTQRDLIAGEVSKDIARRKLIPADIVQAHDSGAIHFHDMDYIIQPMFNCCLINLEDMLANGTVINGKKIDTPKSFQVACTVTTQIIAQVASGQYGGQSINGIDRILAPYVRKSFKKYMKAVVEEQREVYGIEPDMEKAEEIAWKRTKKEIKDGIQTIQYQINTLMTTNGQAPFVTLFMYFKPDYEYAKEAALIDEELLRQRIQGIKNEANVYVTPAFPKLIYVLDEHNVREGNPYFYLTKLAAECTAKRMYPDYISAKKMRESYEGNVFSPMGCRSFLSPWKDEQGNYKFDGRFNMGVVSLNLPQIGILADGDEEKFFQILDKRLELCKKALLLRVDLLKRITSDVSPIHWQYGAIARLKPGETIEKFIYGGYATLSLGYIGIYEATMLTKHCSHTTAEGRKFAMRIMDDLNAHIKKWRKETNIGFALYGTPAENLTNLFCKIDKARFGSIPDVTDKGYYTNSYHVDVREPINVFDKFSFEADFEDKSTGGCISYAEIPNMTHNIPAVLTMVQYIYDHIAYGEFNTKLDYCHECGFDGEIILNDDNEWECPRCHNKDRNKLTVIRRTCGYLGENFWNEGRTQEIKNRVLHI

SEQ ID NO: 1124 - protein, 724 aa, unidentified
  REGION 1..724: note = Description of Unknown: uncultivated organism sequence
  REGION 1..724: note = Category: MG60 effectors
  REGION 1..724: note = Description: MG60-339 effector
MNVIKRSGEEVVFDASKIENAIKKANKATTHNQMSDELIRSVTQSVINKCENLKRSPNVEEIQDMVEGELMEHRCFAVAHNYITYRYERALVRKANSTDKQIMSLLERNNEEVKQENSNKNPLVNSVQRDYMAGEVSKDITKRFLLPQDVMEAHEQGIIHFHDSDYFAQHMHNCCLVNLEDMLQNGTVISETMIEKPHSFSTACNVATQIIAQVASSQYGGQSITLSHLAPFVQVSREKARREVKEELESLNLDSSEDTVNKMAEMRVRKEIEKGVQMIQYQVITLMTTNGQAPFVTVFMYLNEVPEGQTRDDLAIIIEEMLKQRIKGVKNEKGIWITPAFPKLIYVLEENNIEEGSKYWYLTELAAKCTAKRMVPDYISEKKMLELKVDANGEGHCYPCMGCRSFLTTYLDENGKPKYYGRFNQGVVTLNLVDVACSSKQDEEAFWRIMDERLALCKKALMCRHERLLGTPSDVAPILWQNGALARLKKGEPIDKLLFGGYSTISLGYAGLCECVYYMTGHPHTEEPGTSFGLKVMQYLNDACAKWKAEENIDFSLYGTPMESTTFKFSKHLQERFGIIPHVTDKNYITNSYHVHVTEEIDAFTKLSFESQFQKLSPGGAISYVEVPNMENNIDAVLAIMKHIYNHIMYAELNTKSDYCQVCGYTGEIKIVEDENHKLVWECPNCGNRDQEKMNVARRTCGYIGTQFWNQGRTQEIKERVLHL

SEQ ID NO: 1125 - protein, 724 aa, unidentified
  REGION 1..724: note = Description of Unknown: uncultivated organism sequence
  REGION 1..724: note = Category: MG60 effectors
  REGION 1..724: note = Description: MG60-340 effector
MNVIKRSGEEVVFDASKIENAIKKANKATTHNQMSDELIRSVTQSVIDKCENLKRSPNVEEIQDMVEGELMEHRCFAVAHNYITYRYERALVRKANSTDKQIMSLLERNNEEVKQENSNKNPLVNSVQRDYMAGEVSKDITKRFLLPQDVMEAHEQGIIHFHDSDYFAQHMHNCCLVNLEDMLQNGTVISETMIEKPHSFSTACNVATQIIAQVASSQYGGQSITLSHLAPFVQVSREKARREVKEELESLNLDSSEDTVNKMAEMRVRKEIEKGVQMIQYQVITLMTTNGQAPFVTVFMYLNEVPEGQTRDDLAIIIEEMLKQRIKGVKNEKGIWITPAFPKLIYVLEENNIEEGSKYWYLTELAARCTAKRMVPDYISEKKMLELKVDANGEGHCYPCMGCRSFLTTYLDENGKPKYYGRFNQGVVTLNLVDVACSSKQDEDAFWRIMDERLELCKKALMCRHERLLGTPSDVAPILWQNGALARLKKGEPIDKLLFGGYSTISLGYAGLCECVYYMTGHPHTEEPGTSFGLKVMQYLNDACAKWKAEENIDFSLYGTPMESTTFKFSKHLQERFGIIPHVTDKNYITNSYHVHVTEEIDAFTKLSFESQFQKLSPGGAISYVEVPNMENNIDAVLAIMKHIYNHIMYAELNTKSDYCQVCGYTGEIKIVEDENHKLVWECPNCGNRDQEKMNVARRTCGYIGTQFWNQGRTQEIKERVLHL

SEQ ID NO: 1126 - protein, 724 aa, unidentified
  REGION 1..724: note = Description of Unknown: uncultivated organism sequence
  REGION 1..724: note = Category: MG60 effectors
  REGION 1..724: note = Description: MG60-341 effector
MNVIKRSGEEVVFDSIKIENAIKKANKATTHNQMSDELIRSVTQSVIDKCENLKRSPNVEEIQDMVEGELMEHRCFAVAHNYITYRYERALVRKANSTDKQIMSLLERNNEEVKQENSNKNPLVNSVQRDYMAGEVSKDITKRFLLPQDVMEAHEQGIIHFHDSDYFAQHMHNCCLVNLEDMLQNGTVISETMIEKPHSFSTACNVATQIIAQVASSQYGGQSITLSHLAPFVQVSREKARREVKEELESLNLDSSEDTVNKMAEMRVRKEIEKGVQMIQYQVITLMTTNGQAPFVTVFMYLNEVPEGQTRDDLAIIIEEMLKQRIKGVKNEKGIWITPAFPKLIYVLEENNIEEGSKYWYLTELAAKCTAKRMVPDYISEKKMLELKVDANGEGHCYPCMGCRSFLTTYLDENGKPKYYGRFNQGVVTLNLVDVACSSKQDEEAFWRIMDERLALCKKALMCRHERLLGTPSDVAPILWQNGALARLKKGEPIDKLLFGGYSTISLGYAGLCECVYYMTGHPHTEEPGTSFGLKVMQYLNDACAKWKAEENIDFSLYGTPMESTTFKFSKHLQERFGIIPHVTDKNYITNSYHVHVTEEIDAFTKLSFESQFQKLSPGGAISYVEVPNMENNIDAVLAIMKHIYNHIMYAELNTKSDYCQVCGYTGEIKIVEDENHKLVWECPNCGNRDQEKMNVARRTCGYIGTQFWNQGRTQEIKERVLHL

SEQ ID NO: 1127 - protein, 735 aa, unidentified
  REGION 1..735: note = Description of Unknown: uncultivated organism sequence
  REGION 1..735: note = Category: MG60 effectors
  REGION 1..735: note = Description: MG60-342 effector
MKKPMLVLKRNGEEVTFDRQKIFNAISAANKEVAPIHQLNKYQIEAVTKNVTEKIEEMSHIVSVEEIQDMVEVAIMEMRGYEVAQKYVRYRHKRELARKSNTTDEGILALINLSNEEIKQENSNKNPTVNSTQRDYMAGEVSKDLTMRVLLPEDIVKAHKEGIIHFHDSDYFAQKMYNCCLVNLKDMFENETVISGTKIETPKSFYTGCNVATQIVAQVASNQYGGQTITLSDLAPFVDVSRKKITQKVKEELAESGLSATDKQISKIVHKRLKEEIKSGIQTIQYQLVTLMTTNGQTPFVSIFMYLDEVPEGQTRDDLALIIEEVLRQRIQGVKNEKGVWVTPAFPKLLYILDEDNIHEDSKYWYLTELAAKCTAKRMVPDYISAKIMKEIKNGEVYPCMGCRSFLTVEDGIRNPDGSHKFYGRFNQGVVTINLVDVACSSYGDMDKFWKILDERLELCHKALRYRHERLLHTKSDVAPILWQNGAIARLEKGETIDKLLFGGYSTISLGYAGLYEMCVRMTGHSHTDPEAKKFALSVMQRLNDKCKEWREAENIGYSVYGTPMESTTYKFAKCLQKRFGIIPGVTDKNYITNSYHVHVTEEIDAFSKLKFESEFQKLSPGGAISYVEVPDMQGNIPAVLSLIKYIYENIMYAELNSKSDYCEVCGYEGEIKIVETESGKLIWECPCCGNRDQNKMFVARRTCGYIGTQFWNQGRTQEIKDRVIHMSYHALNKN

SEQ ID NO: 1128 - protein, 706 aa, unidentified
  REGION 1..706: note = Description of Unknown: uncultivated organism sequence
  REGION 1..706: note = Category: MG60 effectors
  REGION 1..706: note = Description: MG60-343 effector
METNPQIELAFDFLQYTGTNVFLTGKAGTGKTTFLRELKRRSPKRMIVVAPTGVAAINAGGVTIHSFFQLPFGPYVPGNMEETPGGENRYTNKFSREKINIIRSLDLLVIDEISMVRADLLDAVSDVLCRYKDRSRPFGGVQLLMIGDLQQLAPVVKEEEWGVLKERYASPFFFCSRALQEVPYAGIELTQVYRQTDAFFLDLLNKVRDNRADQQTLQALNRRYIPGFRPDDTEGYITLTTHNYQAQQINREKLDELEGKAYSYEAEIVDEFPEYSFPTDQHLVLKKGAQVMFVKNDASPEKRYYNGKIGRITAISSDHILVRCGGEKEAITVAKEEWTNTKYSIDAETQEITETVEGVFRQYPLKTAWAITIHKSQGLTFERAIVDAGAAFTHGQVYVALSRCKTLEGLVLSSPLRTGALICDQVVRQFTESVERNQPGREQLADARKAYYLQLLKELFDYSGVLRRVQYMSRLMNEHLWRLYPELTERYRTVREFCHNELKDVGERFQAQLERLVSECGDPEQDGQVRERVAKGLAYFRENTERVAVLVRDTQPEVDNKEVRKSLNEALGRLQQEVEVKMATLEAAVGGFSVMGHLQAKAKAMIEKPKPKTRKVSDKVDVPDDILHPDLYQILRQWRKEEAASMNLPVYTVLHQKALLGIANTLPTNGRELLAIPGIGKKVAERYGAKLLEIVNDFRFATLGEA

SEQ ID NO: 1129 - protein, 724 aa, unidentified
  REGION 1..724: note = Description of Unknown: uncultivated organism sequence
  REGION 1..724: note = Category: MG60 effectors
  REGION 1..724: note = Description: MG60-344 effector
MNVIKRSGEEVVFDASKIENAIKKANKATTHNQMSDELIRSVTQSVIDKCENLKRSPNVEEIQDMVEGELMEHRCFAVAHNYITYRYERALVRKANSTDKQIMSLLERNNEEVKQENSNKNPLVNSVQRDYMAGEVSKDITKRFLLPQDVMEAHEQGIIHFHDSDYFAQHMHNCCLVNLEDMLQNGTVISETMIEKPHSFSTACNVATQIIAQVASSQYGGQSITLSHLAPFVQVSREKARREVKEELESLNLDSSEDTVNKMAEMRVRKEIEKGVQMIQYQVITLMTTNGQAPFVTVFMYLNEVPEGQTRDDLAIIIEEMLKQRIKGVKNEKGIWITPAFPKLIYVLEENNIEEGSKYWYLTELAAKCTAKRMVPDYISEKKMLELKVDVNGEGHCYPCMGCRSFLTTYLDENGKPKYYGRFNQGVVTLNLVDVACSSKQDEEAFWKIMDERLALCKKALMCRHERLLGTPSDVAPILWQNGALARLKKGEPIDKLLFGGYSTISLGYAGLCECVYYMTGHPHTEEPGTSFGLKVMQYLNDACAKWKAEENIDFSLYGTPMESTTFKFSKHLQERFGIIPHVTDKNYITNSYHVHVTEEIDAFTKLSFESQFQKLSPGGAISYVEVPNMENNIDAVLAIMKHIYNHIMYAELNTKSDYCQVCGYTGEIKIVEDENHKLVWECPNCGNRDQEKMNVARRTCGYIGTQFWNQGRTQEIKERVLHL

SEQ ID NO: 1130 - protein, 724 aa, unidentified
  REGION 1..724: note = Description of Unknown: uncultivated organism sequence
  REGION 1..724: note = Category: MG60 effectors
  REGION 1..724: note = Description: MG60-345 effector
MNVIKRSGEEVVFDASKIENAIKKANKATTHNQMSDELIRSVTQSVIDKCENLKRSPNVEEIQDMVEGELMEHRCFAVAHNYITYRYERALVRKANSTDKQIMSLLERNNEEVKQENSNKNPLVNSVQRDYMAGEVSKDITKRFLLPQDVMEAHEQGIIHFHDSDYFAQHMHNCCLVNLEDMLQNGTVISETMIEKPHSFSTACNVATQIIAQVASSQYGGQSITLSHLAPFVQVSREKARREVKEELESLNLDSSEDTVNKMAEMRVRKEIEKGVQMIQYQVITLMTTNGQAPFVTVFMYLNEVPEGQTRDDLAIIIEEMLKQRIKGVKNEKGIWITPAFPKLIYVLEENNIEEGSKYWYLTELAARCTAKRMVPDYISEKKMLELKVDANGEGHCYPCMGCRSFLTTYLDENGKPKYYGRFNQGVVTLNLVDVACSSKQDEEAFWRIMDERLALCKKALMCRHERLLGTPSDVAPILWQNGALARLKKGEPIDKLLFGGYSTISLGYAGLCECVYYMTGHPHTEEPGTSFGLKVMQYLNDACAKWKAEENIDFSLYGTPMESTTFKFSKHLQERFGIIPHVTDKNYITNSYHVHVTEEIDAFTKLSFESQFQKLSPGGAISYVEVPNMENNIDAVLAIMKHIYNHIMYAELNTKSDYCQVCGYTGEIKIVEDENHKLVWECPNCGNRDQEKMNVARRTCGYIGTQFWNQGRTQEIKERVLHL

SEQ ID NO: 1131 - protein, 716 aa, unidentified
  REGION 1..716: note = Description of Unknown: uncultivated organism sequence
  REGION 1..716: note = Category: MG60 effectors
  REGION 1..716: note = Description: MG60-346 effector
MLEVIKRNGERVPFNRDKITVAIEKAMNSSSGIYEEGQAAKIASEIEAYAASIQKDLTIYAIEDQVYYRLLKYNNPATARAYENYKTIQAFKRQTNTTDDDVFGLLNNTNLEVLDENSNKNGHVVSTQRDLIAGEVSKDIARRRLIPADIVQAHDSGAIHFHDMDYIIQPMFNCCLINLEDMLANGTVINGKKIDTPKSFQVACTVTTQIIAQVASGQYGGQSINGIDRILAPYVRKSFKKYMKAVVEEQREVYGIEPDMEKAEEIAWKRTKKEIKDGIQTIQYQINTLMTTNGQAPFVTLFMYFQPDYEYAREAALIDEELLRQRIQGIKNEANVYVTPAFPKLIYVLDEHNVREGSPYFYLTKLAAECTAKRMYPDYISAKKMRESYEGNVFSPMGCRSFLSPWKDEKGNYQFDGRFNMGVVSLNLPQIGILADGDEEKFFQILDKRLELCKKALLLRVDLLKRITSDVSPIHWQYGAIARLKPGETIEKFIYGGYATLSLGYIGIYEATVLTKHCSHTAPEGRKFAMRIMDDLNAHIKKWRKETNIGFALYGTPAENLTNLFCKIDKARFGSIPDVTDKGYYTNSYHVDVREPINVFDKFSFEADFEDKSTGGCISYAEIPNMTHNIPAVLTMVQYIYDHITYGEFNTKLDYCHECGFDGEIILNDDNEWECPRCHNKDRNKLTVIRRTCGYLGENFWNEGRTQEIKNRVLHI

SEQ ID NO: 1132 - protein, 708 aa, unidentified
  REGION 1..708: note = Description of Unknown: uncultivated organism sequence
  REGION 1..708: note = Category: MG60 effectors
  REGION 1..708: note = Description: MG60-347 effector
MKVIKRDGRVVDYNRDKIITAIEKANKEVKTKERVTKEEIKEITKYIEELDKKRILVEDIQDIIEEQLMDLKKFELAKKYMIYRYTRALVRKANTTDESILGLIKNQNKELLEENSNKNAVLASTQRDYIAGEVSKDLTKRILLPEKITKAHEDGVLHFHDMDYFLQPIFNCCLINIGDMLDNGTVMNGKLIESPKSFQVACTVMTQIIAAVASNQYGGQSVDISHLGKYVRKSYEKFRRTFENEFGNELSEDIIERLTQQRLKKEISAGVQTIQYQINTLMTTNGQSPFVTIFLNLKKDDPYIKENAMVIEEIIRQRYEGIKNEKGVYVTPAFPKLIYVLDEHNCLKGGEYDYLTKLAVKCSAKRLYPDYISAKKMRENYEGNVFSPMGCRSFLSPWKDENGNYKFEGRFNQGVVSINLPQIGIIADGDEEKFWKLLDERLEICKEALMCRHYSLLGTLSNTSPIHWRYGAIARMKPGEKIDELLKGGYSTLSLGYIGIYETTKLMKGVSHTTPEGHEFAIKVMKRLRDATAEWKKETGLGFALYGTPAESLCYRFARIDKEKFGEIKDVTDKGYYTNSYHVDVREKIDAFSKLKFESEFQELSLGGAISYVEIPNMRHNLKALEDLVKFIYDNIQYAEFNTKSDYCHVCGFDGEIIINDNLEWECPNCGNKDKNKMNVTRRTCGYLGENFWNEGKTKEIKARVLHL

SEQ ID NO: 1133 - protein, 716 aa, unidentified
  REGION 1..716: note = Description of Unknown: uncultivated organism sequence
  REGION 1..716: note = Category: MG60 effectors
  REGION 1..716: note = Description: MG60-348 effector
MLEVIKRNGERVPFNRDKITIAIEKAMNSSSGIYEEGQAAKIASEIEAYAASIQKDLTIYAIEDQVYYRLLKYNNPATARAYENYKTIQAFKRQTNTTDDDVFGLLNNTNLEVLDENSNKNGHVVSTQRDLIAGEVSKDIARRKLIPADIVQAHDSGAIHFHDMDYIIQPMFNCCLINLEDMLANGTVINGKKIDTPKSFQVACTVTTQIIAQVASGQYGGQSINGIDRILAPYVRKSFKKYMKAVVEEQREVYGIEPDMEKAEEIAWKRTKKEIKDGIQTIQYQINTLMTTNGQAPFVTLFMYFQPDYEYAREAALIDEELLRQRIQGIKNEANVYVTPAFPKLIYVLDEHNVREGSPYFYLTKLAAECTAKRMYPDYISAKKMRESYEGNVFSPMGCRSFLSPWKDEKGNYQFDGRFNMGVVSLNLPQIGILADGDEEKFFQILDKRLELCKKALLLRVDLLKRITSDVSPIHWQYGAIARLKPGETIEKFIYGGYATLSLGYIGIYEATVLTKHCSHTAPEGRKFAMRIMDDLNAHIKKWRKETNIGFALYGTPAENLTNLFCKIDKARFGSIPDVTDKGYYTNSYHVDVREPINVFDKFSFEADFEDKSTGGCISYAEIPNMTHNIPAVLTMVQYIYDHITYGEFNTKLDYCHECGFDGEIILNDDNEWECPRCHNKDRNKLTVIRRTCGYLGENFWNEGRTQEIKNRVLHI

SEQ ID NO: 1134 - protein, 724 aa, unidentified
  REGION 1..724: note = Description of Unknown: uncultivated organism sequence
  REGION 1..724: note = Category: MG60 effectors
  REGION 1..724: note = Description: MG60-349 effector
MNVIKRSGEEVVFDASKIENAIKKANKATTHNQMSDELIRSVTQSVINKCENLKRSPNVEEIQDMVEGELMEHRCFAVAHNYITYRYERALVRKANSTDKQIMSLLERNNEEVKQENSNKNPLVNSVQRDYMAGEVSKDITKRFLLPQDVMEAHEQGIIHFHDSDYFAQHMHNCCLVNLEDMLQNGTVISETMIEKPHSFSTACNVATQIIAQVASSQYGGQSITLSHLAPFVQVSREKARREVKEELESLNLDSSEDTVNKMAEMRVRKEIEKGVQMIQYQVITLMTTNGQAPFVTVFMYLNEVPEGQTRDDLAIIIEEMLKQRIKGVKNEKGIWITPAFPKLIYVLEENNIEEGSKYWYLTELAARCTAKRMVPDYISEKKMLELKVDANGEGHCYPCMGCRSFLTTYLDENGKPKYYGRFNQGVVTLNLVDVACSSKQDEEAFWRIMDERLALCKKALMCRHERLLGTPSDVAPILWQNGALARLKKGEPIDKLLFGGYSTISLGYAGLCECVYYMTGHPHTEEPGTSFGLKVMQYLNDACAKWKAEENIDFSLYGTPMESTTFKFSKHLQERFGIIPHVTDKNYITNSYHVHVTEEIDAFTKLSFESQFQKLSPGGAISYVEVPNMENNIDAVLAIMKHIYNHIMYAELNTKSDYCQVCGYTGEIKIVEDENHKLVWECPNCGNRDQEKMNVARRTCGYIGTQFWNQGRTQEIKERVLHL

SEQ ID NO: 1135 - protein, 724 aa, unidentified
  REGION 1..724: note = Description of Unknown: uncultivated organism sequence
  REGION 1..724: note = Category: MG60 effectors
  REGION 1..724: note = Description: MG60-350 effector
MNVIKRSGEEVVFDASKIENAIKKANKATTHNQMSDELIRSVTQSVINKCENLKRSPNVEEIQDMVEGELMEHRCFAVAHNYITYRYERALVRKANSTDKQIMSLLERNNEEVKQENSNKNPLVNSVQRDYMAGEVSKDITKRFLLPQDVMEAHEQGIIHFHDSDYFAQHMHNCCLVNLEDMLQNGTVISETMIEKPHSFSTACNVATQIIAQVASSQYGGQSITLSHLAPFVQVSREKARREVKEELESLNLDSSEDTVNKMAEMRVRKEIEKGVQMIQYQVITLMTTNGQAPFVTVFMYLNEVPEGQTRDDLAIIIEEMLKQRIKGVKNEKGIWITPAFPKLIYVLEENNIEEGSKYWYLTELAARCTAKRMVPDYISEKKMLELKVDANGEGHCYPCMGCRSFLTTYLDENGKPKYYGRFNQGVVTLNLVDVACSSKQDEEAFWKIMDERLALCKKALMCRHERLLGTPSDVAPILWQNGALARLKKGEPIDKLLFGGYSTISLGYAGLCECVYYMTGHPHTEEPGTSFGLKVMQYLNDACAKWKAEENIDFSLYGTPMESTTFKFSKHLQERFGIIPHVTDKNYITNSYHVHVTEEIDAFTKLSFESQFQKLSPGGAISYVEVPNMENNIDAVLAIMKHIYNHIMYAELNTKSDYCQVCGYTGEIKIVEDENHKLVWECPNCGNRDQEKMNVARRTCGYIGTQFWNQGRTQEIKERVLHL

SEQ ID NO: 1136 - protein, 745 aa, unidentified
  REGION 1..745: note = Description of Unknown: uncultivated organism sequence
  REGION 1..745: note = Category: MG60 effectors
  REGION 1..745: note = Description: MG60-351 effector
MAIVIKMNDKKNENAKYVIKRNGAEALFDEDKIVNALFKANDSTLKNKITKQQIVNIADHIKAYVEQTTYALNIEDIQDMVENELMQIKAFDVARSYITYRYKRALARQKNTTDDKILSLIEHNNEEVKQENSNKNPVVNSVQRDYMAGEVSKDLCKRIFLPSDIWEAHEDGIIHFHDADYFAQHMHNCCLVNLEDMLQNGTVISDTMIDRPKSFSTACNIATQAIAQIASQQYGGQTMSIAHLAPFVDVSRQKYMRKQMASMEKAGIKTTEAQLESVVEDMVDEEIKRGVQMIQYQLITLMTTNGQAPFVTIYMYLNECKDGRTKADMVKVIREMLKQRIQGVKNEKGVYVTPAFPKLIYVLEEDNIHEGDKYWELTKLAAKCTAKRMVPDYISEKIMKELKQGDVYSCMGCRSFLTVDRTKENIANAGNYKDGEHKYYGRFNQGVVTLNLVDVACTSARDEDYFWEILDKRLELCHKALRIRHERLLGTPSDVAPILWQHGALARLKKGETIDKLLYGGYSTISLGYAGLCECTRYMKGVSHTDPLGTEFATRVMQKLNDACAKWKAEENIDYSVYGTPLESTTYKFAKCLQKRFGIIPGVTDKNYITNSYHVHVTEKINAFDKLKFEAPFQKLSPGGAISYVEVPNLQDNIEAVLAIMQYIYENIMYAELNTKSDYCEVCGYDGEIRVVEDEHGKLVWECPNCGNRDQNKMSVARRTCGYIGTQFWNQGRTQEIKERYVHLQ

SEQ ID NO: 1137 - protein, 853 aa, unidentified
  REGION 1..853: note = Description of Unknown: uncultivated organism sequence
  REGION 1..853: note = Category: MG60 effectors
  REGION 1..853: note = Description: MG60-352 effector
MARSIEKIFEDNILLKYNLYNSIFTTLPFEKIEHVGTLLPLFSSYCSKGFEKKQSPKQIVQGFFENYLPDIKEEKQFDILFRFIQYVEREIVLFDAIEESAFPLLQSKKQNNSIKYIIEQALQEKKTEELKHFIENFRIRTVLTAHPTQFYPGKVLGIITDLSEAIKNNNFVLIKNLLLQLGKTPFIKHKKPSPLDEANHLIWYLENILYDAIPEIYNNIIEDLLEKESPNAIFEIGFWPGGDRDGNPFVTTEITLKVAEQLKLAILKKYHSDLKKLKRRLTFNGIFNKLESLEKNIQKIIINPKKKTELTQEKLLDRLHEIRTVLKEKHQSIFISDLDELIRKVRIFGFYFASLDIRQDSRIHTSAFNHITRIYPDVLTENYADFDEKQKLVYLGEINKKINISEFKDPMAISTLESMQAIKKIQKSNGKKGAHRYIISNTQSATNVMQVFCMLRMSGFNKKMPVDIVPLFETINDLQSAGKIMEILYKNPAYKKHLKSRKNEQIIMLGFSDGTKDGGYLAANWSIYRAKEDLSLMAQKYDIKVVFFDGRGGPPARGGGKTHSFYSSLGKNIENKAIEITVQGQTISSQYGSIELAKHNLEQLLSAGIKNKVFQGENNELSAENRKILEHLSDLAYRKYKNFKEHPKFIPYLEKMSTLKYYGKTKIGSRPTKRANSDKLIFSDLRAIPFVGAWSQLKQNVPGFFGVGSALLHYEQEGAFNKIENLYAESKFFKALIENVIVSLKKSFFQLTEYMKNDEEFGDFWKIIYDEYNNTQRLLLKLTKRKDLLEKSPETKASIETRHKIVLPLLTIQQYALQEIQITGKENKERIENLEKMIVRSLFGNINASRNAV

SEQ ID NO: 1138 - protein, 717 aa, unidentified
  REGION 1..717: note = Description of Unknown: uncultivated organism sequence
  REGION 1..717: note = Category: MG60 effectors
  REGION 1..717: note = Description: MG60-353 effector
MKVIKRDGHVVDYEPEKIEAAIQKANQEVDEADRVSDIQIRNIIKYIEGLKKKRMLVEDIQDVIEMRLMSLGKYVLAKAYITYRYTRELVRRSNTTDLTIKELIDGDSEYWNTENSNKNARVVTTQRDYLAGITSTDITRRFLLPEDVVNAHDSGIIHFHDADYFAQNALHNCDLINLDDMLQNGTSINGVMIEKPHRFLTAMTIATQLITAVSSSQYGGATITLTHLAPFVRASREYYEKRYSNRKLTKEQVKKFVEEDLHKEIVDGVQTFQYQINSMTTTNGQAPFLSVNMYLGETEEYKDELAMIIEEVLRQRIQGMKNEKGVWITPAFPKLLYVLEEDNINPKSKYYYLTKLATECTAKRMVPDYISEKVMKELKIDKNGNGQCYPCMGCRSFLTPYVDNDGKPKYYGRFNQGVVTLNLPDIALSSKKDMDEFWKIFDERLELSHKALRIRYKRLSKATSDVAPILWQHGALARLPKGASIKELLHNGYSTISLGYAGLYECVKYMTGKSHTDGAEGEEFGLKVMQHLNDACNKWKEEEKIDYSVYGTPIESTTYKFAKCLKERFGVIKGITDRNYITNSYHIPVFEEVDAFTKLAIESKFQKLSPGGAISYVEAPNLVKNLDAVLELITFIYNNIMYAEINTKSDYCHKCGYTGEILIDDNLEWYCPECGNRDHTKLNVARRTCGYIGTNFWNKGRTQEIKERVLHIDNKEA

SEQ ID NO: 1139 - protein, 706 aa, unidentified
  REGION 1..706: note = Description of Unknown: uncultivated organism sequence
  REGION 1..706: note = Category: MG60 effectors
  REGION 1..706: note = Description: MG60-354 effector
METNPQIELAFDFLQYTGTNVFLTGKAGTGKTTFLRELKRRSPKRMIVVAPTGVAAINAGGVTIHSFFQLPFGPYVPGNAEGGAENEKRYTNKFSREKINIIRSLDLLVIDEISMVRADLLDAVSDVLCRYKDRSRPFGGVQLLMIGDLQQLAPVVKDDEWSLLKERYASPFFFCSRALQEVPYVGIELTQVYRQTDAFFLDLLNKVRDNRADQATLQALNRRYIPGFRPDDTEGYITLTTHNYQAQQINREKLEELEEKAYSYEAEIVDEFPEYSFPTDRHLVLKKGAQVMFVKNDASPEKRYYNGKIGRVTAISSDHILVRCGEEREAITVAKEEWTNTKYTIDAETQEISETVEGVFRQYPLKTAWAITIHKSQGLTFERAIVDAGAAFTHGQVYVALSRCKTLEGLVLSSPLRTGALICDQVVRQFTEGIEQGQPGREQLADAKRAYYLQLLKELFDYNGVLRRMQYMSRILNEHLWRLYPELTERYRTEREFCHNELKDVGERFQMQLERLVNECREPEQDGQVRERVAKGLAYFRERTGRVFALVQDTQPEVDNKEVRKSLNEALGRLQQEVEVKMATLEAAAGGFSVMGYLQAKARAMIEKPKAKARKISDKVDVPEDILHPDLYQILRQWRKEEAASMNLPVYTVLHQKALLGIANILPTNGRELLSIPGIGKKVAERYGKKLLEMVNDYRFATLGDA

SEQ ID NO: 1140 - protein, 716 aa, unidentified
  REGION 1..716: note = Description of Unknown: uncultivated organism sequence
  REGION 1..716: note = Category: MG60 effectors
  REGION 1..716: note = Description: MG60-355 effector
MLEVIKRNGERVPFNRDKITVAIEKAMNSSSGIYEEGQAAKIAGEIEAYAASIQKDLTIYAIEDQVYYRLLKYNNPATARAYENYKTIQAFKRQTNTTDDDVFGLLNNTNLEVLDENSNKNGHVVSTQRDLIAGEVSKDIARRKLIPADIVQAHDSGAIHFHDMDYIIQPMFNCCLINLEDMLANGTVINGKKIDTPKSFQVACTVTTQIIAQVASGQYGGQSINGIDRILAPYVRKSFKKYMKAVVEEQREVYGIEPDMEKAEEIAWKRTKKEIKDGIQTIQYQINTLMTTNGQAPFVTLFMYFQPDYEYAREAALIDEELLRQRIQGIKNEANVYVTPAFPKLIYVLDEHNVREGSPYFYLTKLAAECTAKRMYPDYISAKKMRESYEGNVFSPMGCRSFLSPWKDEKGNYQFDGRFNMGVVSLNLPQIGILADGDEEKFFQILDKRLELCKKALLLRVDLLKRITSDVSPIHWQYGAIARLKPGETIEKFIYGGYATLSLGYIGIYEATVLTKHCSHTAPEGRKFAMRIMDDLNAHIKKWRKETNIGFALYGTPAENLTNLFCKIDKARFGSIPDVTDKGYYTNSYHVDVREPINVFDKFSFEADFEDKSTGGCISYAEIPNMTHNIPAVLTMVQYIYDHITYGEFNTKLDYCHECGFDGEIILNDDNEWECPRCHNKDRNKLTVIRRTCGYLGENFWNEGRTQEIKNRVLHI

SEQ ID NO: 1141 - protein, 716 aa, unidentified
  REGION 1..716: note = Description of Unknown: uncultivated organism sequence
  REGION 1..716: note = Category: MG60 effectors
  REGION 1..716: note = Description: MG60-356 effector
MLEVIKRNGERVPFNRDKITVAIEKAMNSSSGIYEEGQAAKIAGEIEAYAASIQKDLTIYAIEDQVYYRLLKYNNPATARAYENYKTIQAFKRQTNTTDDDVFGLLNNTNLEVLDENSNKNGHVVSTQRDLIAGEVSKDIARRKLIPADIVQAHDSGAIHFHDMDYIIQPMFNCCLINLEDMLANGTVINGKKIDTPKSFQVACTVTTQIIAQVASGQYGGQSINGIDRILAPYVRKSFKKYMKAVVEEQREIYGIEPDMEKAEEIAWKRTKKEIKDGIQTIQYQINTLMTTNGQAPFVTLFMYFQPDYEYAREAALIDEELLRQRIQGIKNEANVYVTPAFPKLIYVLDEHNVREGSPYFYLTKLAAECTAKRMYPDYISAKKMRESYEGNVFSPMGCRSFLSPWKDEKGNYQFDGRFNMGVVSLNLPQIGILADGDEEKFFQILDKRLELCKKALLLRVDLLKRITSDVSPIHWQYGAIARLKPGETIKKFIYGGYATLSLGYIGIYEATVLTKHCSHTAPEGRKFAMRIMDDLNAHIKKWRKETNIGFALYGTPAENLTNIFCKIDKARFGSIPDVTDKGYYTNSYHVDVREPINVFDKFSFEADFEDKSTGGCISYAEIPNMTHNIPAVLTMVQYIYDHITYGEFNTKLDYCHECGFDGEIILNDDNEWECPRCHNKDRNKLTVIRRTCGYLGENFWNEGRTQEIKNRVLHI

SEQ ID NO: 1142 - protein, 752 aa, unidentified
  REGION 1..752: note = Description of Unknown: uncultivated organism sequence
  REGION 1..752: note = Category: MG60 effectors
  REGION 1..752: note = Description: MG60-357 effector
MYIYDEILDGNMHTEEPNMCVMKRSGERVPFDRVKIAEAIERANREEGILSERLTDAQIDQITRGIEKDASNAGRDLSVEEIQDKVEDALMCSGRPKVARLYITYRYKHNEMRKMSNIDQKIAGVVERDNEEVKQENSNKNPTVLSVQRDYMAGEWSRYYTSRYLLPEEIVDAHKNGIIHFHDADYFAQHMHNCDLVNLEDMLQNGTCISGTHIDKPKSFSTACTVASQIVAQVASSQYGGQTITMSHLAPFVDISRKKITSRLAEELHETGIEVPAEKLSELVEKELLKEIESGCQTIQYQLITLQSTNGQAPFVTVFLYLGEVPEGQLRDDLAIVIEVMLKQRILGVKDKSGVYITPAFPKLIYVLQEDNIREGTPYFYLTELAAKCTAKRMVPDYISEKKALELKGDVYPCMGCRSFLTPDRFTDAGVGNIANDKSYVPGRHKYYGRFNQGVVTLNLVDIACSSGRDERKFWDIMNERLDLCHRALRIRHERLKGTPSDVAPILWQDGAIARLASGETIDRLLMNGYSTISLGYAGLAECVFYMKGTSHTSEEGKEFGLRVMQALNDACAKWKKAENIDYSVYGTPLESTTYKFAKCLQRRFGKIPGVTDKNYITNSYHIHVSEHIDAFSKLSKEAEFQQLSPGGAISYVEVPNMQNNIPAVIRVMQHIYDSILYAELNTKSDLCEVCGFDGEIQVKKDVTGKLVWECPNCGNRDQSKMHVARRTCGYIGTQYWNQGRTAEIADRVLHL

SEQ ID NO: 1143 - protein, 716 aa, unidentified
  REGION 1..716: note = Description of Unknown: uncultivated organism sequence
  REGION 1..716: note = Category: MG60 effectors
  REGION 1..716: note = Description: MG60-358 effector
MLEVIKRNGERVPFNRDKITIAIEKAMNSSSGIYEEGQAAKIAGEIEAYAASIQKDLTIYAIEDQVYYRLLKYNNPATARAYENYKTIQAFKRQTNTTDDDVFGLLNNTNLEVLDENSNKNGHVVSTQRDLIAGEVSKDIARRKLIPADIVQAHDSGAIHFHDMDYIIQPMFNCCLINLEDMLANGTVINGKKIDTPKSFQVACTVTTQIIAQVASGQYGGQSINGIDRILAPYVRKSFKKYMKAVVEEQREVYGIEPDMEKAEEIAWKRTKKEIKDGIQTIQYQINTLMTTNGQAPFVTLFMYFQPDYEYAREAALIDEELLRQRIQGIKNEANVYVTPAFPKLIYVLDEHNVREGSPYFYLTKLAAECTAKRMYPDYISAKKMRESYEGNVFSPMGCRSFLSPWKDKKGNYQFDGRFNMGVVSLNLPQIGILADGDEEKFFQILDKRLELCKKALLLRVDLLKRITSDVSPIHWQYGAIARLKPGETIEKFIYGGYATLSLGYIGIYEATVLTKHCSHTAPEGRKFAMRIMDDLNAHIKKWRKETNIGFALYGTPAENLTNLFCKIDKARFGSIPDVTDKGYYTNSYHVDVREPINVFDKFSFEADFEDKSTGGCISYAEIPNMTHNIPAVLTMVQYIYDHITYGEFNTKLDYCHECGFDGEIILNDDNEWECPRCHNKDRNKLTVIRRTCGYLGENFWNEGRTQEIKNRVLHI

SEQ ID NO: 1144 - protein, 656 aa, unidentified
  REGION 1..656: note = Description of Unknown: uncultivated organism sequence
  REGION 1..656: note = Category: MG60 effectors
  REGION 1..656: note = Description: MG60-359 effector
MKKEGLMKVIKRDGRAVDYDRSKIQIAIEKANQEVKESERVSKEDILGIISYIEELDKKRILVEDIQDIIEQKIMELKKYELAKKYIVYRYTRALVRKQNTTDETILGIIRNDNKEEGQEDNEITVSAQRDYIAGEVSKDLTKRLLLPEKVASADEEGVLYFHDSEYFVHPMINSSFVGIGDMLDNGTVMSNAKIESPKSFLVACTVATQIMAAIANNQYGGQAIDMQCFGKYLRKSYEKFKGEIENEFNGELEKESIENLVNKRLKTELKSGIQIMQYQFNTLKVIKGRMPQITLFLHLDKEDTYIKENAMIIEEILKQKQNGFKDENGQNITLEFPKLIYVIDEFNNLAGGEYDYLTKLALECSLKTKSPSYISAKIMRQYYNGNVFCPMDAGSFLLPWERENLINKETSTKSNNSIDFKEKSKFNQGIVSINLPQIAIIADGDEKKFWKLLEERLDICLDALKCRHYSLVGISSDMSPTHWQYGGIARLEKGEKIDKLLYNGYSTLTLGYVGIYEMAMKMTGQNHLEGNGREFAVKVLEYLNETTKKWKKETNIDFILCGITSKKVGKRFLKKDKEKFGTIKGITDKEYYTGSYLMDPKQNEETLTALSFEKEFQKMSPGGNASYLKVANLKMDELEEILKYSYENICYLRLI

SEQ ID NO: 1145 - protein, 706 aa, unidentified
  REGION 1..706: note = Description of Unknown: uncultivated organism sequence
  REGION 1..706: note = Category: MG60 effectors
  REGION 1..706: note = Description: MG60-360 effector
METNPQIELAFDFLQYTGTNVFLTGKAGTGKTTFLRELKRRSPKRMIVVAPTGVAAINAGGVTIHSFFQLPFGPYVPGNMEETPGGENRYTNKFSREKINIIRSLDLLVIDEISMVRADLLDAVSDVLCRYKDRSRPFGGVQLLMIGDLQQLAPVVKEEEWGLLKERYASPFFFCSRALQEVPYAGIELTQVYRQTDAFFLDLLNKVRDNRADQQTLQALNRRYIPGFRPDDTEGYITLTTHNYQAQQINREKLDELEGKAYSYEAEIVDEFPEYSFPTDQHLVLKKGAQVMFVKNDASPEKRYYNGKIGRITAISSDHILVRCGGEKEAITVAKEEWTNTKYSIDAETQEITETVEGVFRQYPLKTAWAITIHKSQGLTFERAIVDAGAAFTHGQVYVALSRCKTLEGLVLSSPLRTGALICDQVVRQFTESVERNQPGREQLADARKAYYLQLLKELFDYSGVLRRVQYMSRLMNEHLWRLYPELTERYRTVREFCHNELKDVGERFQAQLERLVSECGDPEQDGQVRGRVAKGLAYFRENTERVAVLVRDTQPEVDNKEVRKSLNEALGRLQQEVEVKMATLEAAVGGFSVMGHLQAKAKAMIEKPKPKTRKVSDKVDVPDDILHPDLYQILRQWRKEEAASMNLPVYTVLHQKALLGIANTLPTNGRELLAIPGIGKKVAERYGAKLLEIVNDFRFATLGEA

SEQ ID NO: 1146 - protein, 717 aa, unidentified
  REGION 1..717: note = Description of Unknown: uncultivated organism sequence
  REGION 1..717: note = Category: MG60 effectors
  REGION 1..717: note = Description: MG60-361 effector
MKVIKRDGHVVDYEPEKIEAAIQKANQEVDEADRVSDIQIRNIIKYIEGLKKKRMLVEDIQDVIEMRLMSLGKYVLAKAYITYRYTRELVRRSNTTDLTIKELIDGDSEYWNTENSNKNARVVTTQRDYLAGITSTDITRRFLLPEDVVNAHDSGIIHFHDADYFAQNALHNCDLINLNDMLQNGTSINGVMIEKPHRFLTAMTIATQLITAVSSSQYGGATITLTHLAPFVRASREYYEKRYSNRKLTKEQVKKFVEEDLHKEIVDGVQTFQYQINSMTTTNGQAPFLSVNMYLGETEEYKDELAMIIEEVLRQRIQGMKNEKGVWITPAFPKLLYVLEEDNINPKSKYYYLTKLAAECTAKRMVPDYISEKVMKELKIDKNGNGQCYPCMGCRSFLTPYVDNDGKPKYYGRFNQGVVTLNLPDIALSSKKDMDEFWKIFDERLELSHKALRIRYKRLSKATSDVAPILWQHGALARLPKGASIKELLHNGYSTISLGYAGLYECVKYMTGKSHTDGAEGEEFGLKVMQHLNDACNKWKEEEKIDYSVYGTPIESTTYKFAKCLKERFGVIKGITDRNYITNSYHIPVFEEVDAFTKLAIESKFQKLSPGGAISYVEAPNLVKNLDAVLEIITFIYNNIMYAEINTKSDYCHKCGYTGEILIDDNLEWYCPECGNRDHTKLNVARRTCGYIGTNFWNKGRTQEIKERVLHIDNKEA

SEQ ID NO: 1147 - protein, 724 aa, unidentified
  REGION 1..724: note = Description of Unknown: uncultivated organism sequence
  REGION 1..724: note = Category: MG60 effectors
  REGION 1..724: note = Description: MG60-362 effector
MNVIKRSGEEVVFDASKIENAIKKANKATTHNQMSDELIRSVTQSVIDKCENLKRSPNVEEIQDMVEGELMEHRCFAVAHNYITYRYERALVRKANSTDKQIMSLLERNNEEVKQENSNKNPLVNSVQRDYMAGEVSKDITKRFLLPQDVMEAHEQGIIHFHDSDYFAQHMHNCCLVNLEDMLQNGTVISETMIEKPHSFSTACNVATQIIAQVASSQYGGQSITLSHLAPFVQVSREKARREVKEELESLNLDSSEDTVNKMAEMRVRKEIEKGVQMIQYQVITLMTTNGQAPFVTVFMYLNEVPEGQTRDDLAIIIEEMLKQRIKGVKNEKGIWITPAFPKLIYVLEENNIEEGSKYWYLTELAARCTAKRMVPDYISEKKMLELKVDANGEGHCYPCMGCRSFLTTYLDENGKPKYYGRFNQGVVTLNLVDVACSSKQDEEAFWKIMDERLALCKKALMCRHERLLGTPSDVAPILWQNGALARLKKGEPIDKLLYGGYSTISLGYAGLCECVYYMTGHPHTEEPGTSFGLKVMQYLNDACAKWKAEENIDFSLYGTPMESTTFKFSKHLQERFGIIPHVTDKNYITNSYHVHVTEEIDAFTKLSFESQFQKLSPGGAISYVEVPNMENNIDAVLAIMKHIYNHIMYAELNTKSDYCQVCGYTGEIKIVEDENHKLVWECPNCGNRDQEKMNVARRTCGYIGTQFWNQGRTQEIKERVLHL

SEQ ID NO: 1148 - protein, 724 aa, unidentified
  REGION 1..724: note = Description of Unknown: uncultivated organism sequence
  REGION 1..724: note = Category: MG60 effectors
  REGION 1..724: note = Description: MG60-363 effector
MNVIKRSGEEVVFDSIKIENAIKKANKATTHNQMSDELIHTVTQSVVDKCENLKRSPNVEEIQDMVEGELMEKRCFAVAHNYITYRYERALVRKANSTDKQIMSLLERNNEEVKQENSNKNPLVNSVQRDYMAGEVSKDITKRFLLPQDVMEAHEQGIIHFHDSDYFAQHMHNCCLVNLDDMLQNGTVISETMIEKPHSFSTACNVATQIIAQVASSQYGGQSITLSHLAPFVQVSREKARREVKEELESLNLDSSEDTVNKMAEMRVRKEIEKGVQMIQYQVITLMTTNGQAPFVTVFMYLNEVPEGQTRDDLAIIIEEMLKQRIKGVKNEKGIWITPAFPKLIYVLEENNIEEGSKYWYLTELAAKCTAKRMVPDYISEKKMLELKVDANGEGHCYPCMGCRSFLTTYLDENGKPKYYGRFNQGVVTLNLVDVACSSKQDEEAFWKIMDERLALCKKALMCRHERLLGTPSDVAPILWQNGALARLKKGEPIDKLLFGGYSTISLGYAGLCECVYYMTGHPHTEEPGTSFGLKVMQYLNDACAKWKAEENIDFSLYGTPMESTTFKFSKHLQERFGIIPHVTDKNYITNSYHVHVTEEIDAFTKLSFESQFQKLSPGGAISYVEVPNMENNIDAVLAIMKHIYNHIMYAELNTKSDYCQVCGYTGEIKIVEDENHKLVWECPNCGNRDQEKMNVARRTCGYIGTQFWNQGRTQEIKERVLHL

SEQ ID NO: 1149 - protein, 752 aa, unidentified
  REGION 1..752: note = Description of Unknown: uncultivated organism sequence
  REGION 1..752: note = Category: MG60 effectors
  REGION 1..752: note = Description: MG60-364 effector
MYIYDEILDGNMHTEEPNMCVMKRSGERVPFDRVKIAEAIERANREEGILSERLTDAQIDQITRGIEKDASNAGRDLSVEEIQDKVEDALMCSGRPKVARLYITYRYKHNEMRKMSNIDQKIAGVVERDNEEVKQENSNKNPTVLSVQRDYMAGEWSRYYTSRYLLPEEIVDAHKSGIIHFHDADYFAQHMHNCDLVNLEDMLQNGTCISGTHIDKPKSFSTACTVASQIVAQVASSQYGGQTITMSHLAPFVDISRKKITSRLAEELHETGIEVPAEKLSELVEKELLKEIESGCQTIQYQLITLQSTNGQAPFVTVFLYLGEVPEGQLRDDLAIVIEVMLKQRILGVKDKSGVYITPAFPKLIYVLQEDNIREGTPYFYLTELAAKCTAKRMVPDYISEKKALELKGDVYPCMGCRSFLTPDRFTDAGVGNIANDKSYVPGRHKYYGRFNQGVVTLNLVDIACSSGRDERKFWDIMNERLDLCHRALRIRHERLKGTPSDVAPILWQDGAIARLASGETIDRLLMNGYSTISLGYAGLAECVFYMKGTSHTSKEGKEFGLRVMQALNDACAKWKKAENIDYSVYGTPLESTTYKFAKCLQRRFGKIPGVTDKNYITNSYHIHVSEHIDAFSKLSKEAEFQQLSPGGAISYVEVPNMQNNIPAVIRVMQHIYDSILYAELNTKSDLCEVCGFDGEIQVKKDVTGKLVWECPNCGNRDQSKMHVARRTCGYIGTQYWNQGRTAEIADRVLHL

SEQ ID NO: 1150 - protein, 760 aa, unidentified
  REGION 1..760: note = Description of Unknown: uncultivated organism sequence
  REGION 1..760: note = Category: MG60 effectors
  REGION 1..760: note = Description: MG60-365 effector
MKVIKRDCSEVDFDKSKISTAILKAMKNGSGIVKQKIAEDIANEIEEDCKDKDEVSISDIESMVYDKLITKKQRLTAKAYEGYRSIREFQRENENTIDTEITELLSGESDYWNNENSNKNPRLNTTQRDYLAGIVSKDASRRYILPPEIVQAHDDGLIHVHDLDYLIQYMNNCCLINLEDMLQNGTVISETLIEKPHSFSTACTVATQIIAQVASSQYGGQSISLAHLAPFVDISRQKIRKEVIEEQEYLYRNIDEKEWVKPRKVLGKKLRKDQEKFYKNKDRLLKFIDATDIEDIVEKRLKKEIEKGIQTIQYQITTLMTTNGQAPFITLFMYLNEAHNQREKDDLAMLIEEELRQSYLGVKNEEGVYITPAFPKVIYVLQEDNIHEEDKYWYLTEMAAKCSMKRLTPDYISEKIMKEMKDGNCYPVMGCRSALTVWHDENGKPKFYGRFNSGVVTVSLPDIALSSGGDFNEFWRIFDERTELCHKALKIRHQRLRGTKSDVAPILWQHGAFARLKKGESIDKLLFGGYSTLSLGYAGLAECVKYMTGHYHCDEGIGEKFGLEVMQALNDKCSQWKIDENIDYSLYGTPLEATTEKFAKKLKERFGIIEGVTDRTYITNSYHIPVFIHIDAFGKLRIEAKFQRLSPGGSISYIECPNMENNIPAVLEVMKFIYNNNMYAELNTKSDYCQKCGWSKEIKLIDEGGKLIWECPNCGNRDVRTMDITRRTCGYKGTARNGWNQGRLGDIHDRVPHLDDIEEE

SEQ ID NO: 1151 - protein, 733 aa, unidentified
  REGION 1..733: note = Description of Unknown: uncultivated organism sequence
  REGION 1..733: note = Category: MG60 effectors
  REGION 1..733: note = Description: MG60-366 effector
MNILKRNGSEVLFDKSKIVIAISKANEEVEPHERLPISRIEAIANDIEADCAHLGYEVSVEDVQDMVEKQILDSNAFTLAKTYMRYRQDHNIARGKQELYKRLLAIVEGDSEEATQENSNKNPVIASTQRDYMAGEVSRDITNTMLLPKDIVDAHNAGIIHFHDADYYAQHMHNCDLINLEDMLQNGTVISGTLIEKPHSFSTACNIATQIIAQVASNQYGGQSISLSHLAPFVDVSRQKIRDSVMKELELAGAAPTQETIAEIVEMRLKDEIKRGIQTIQYQVVTLMTTNGQAPFITVFMYLDEVSDPQTKADLAMIIEETLRQRYQGVKNETGAWVTPAFPKLIYVLDEDNIHEDSPYWYLTVMAAKCTARRMVPDYISAKKMRELKGDVYTCMGCRSFLTPDRFTDEGAGNIANAGNYDPTKHKYYGRFNQGVVTINLPDVGLSAHKDFDLFWKIFDERLELCHRALKLRHERLLGTPSDISPIHWQYGALARLKKGETIDKLLFNGYSTISLGYAGLYECTVAMTGKSHTDPAGKEFALAVMQHMNDKCNEWKAAENIDYSLYGTPIESTTYKFAKCLKKRFGIIPEVTDHNYITNSYHISVREKVDAFTKLAFESDFQKLSPGGAISYVEVPDMQNNIPAVLEVMKFIYDHIMYAELNTKSDYCQVCGWDGEIPIVEDENGKLIFKCPRCGNEDRSKLNIARRTCGYIGTNDWNQGRVQEIKERVLHL

SEQ ID NO: 1152 - protein, 717 aa, unidentified
  REGION 1..717: note = Description of Unknown: uncultivated organism sequence
  REGION 1..717: note = Category: MG60 effectors
  REGION 1..717: note = Description: MG60-367 effector
MKVIKRDGHMVDWCPEKIEDAIMKANKEVEEDEQASSVQIRNIIKYIEKLGKKRILVEDIQDIIEMKLMSQGKYELAKRYITYRYTRELVRRSNTTDQSIKELIDGESEYWNTENSNKNAKIVTTQRDYLAGITSTDITRRFLLPEDIVEAHDAGIIHFHDADYFAQNALHNCDLVNLEDMLQNGTSINGVMIEKPHRFLTAMTIATQIITAVSSSQYGGVTITLTHLAPFVRDSYKRYLDKYKKRKLSKEDCEKFAMEDTKKEIVDGVQTFQYQVNSMTTTNGQAPFLSVCMYLGETDEYKEELAWIIEEFLKQRIVGMKNEQGVYITPAFPKLLYVLEEDNIHKNSKYYYLTKLAAECTSKRMVPDYISEKIMKELKIDKNGNGNCYPCMGCRSFLTPYVDENGKPKYYGRFNQGVVTINLVDVALSSDKDMDVFWQIFEERLELCHRALQIRHKRLSKATSDVAPILWQHGALARLPKGASIHDLLHNGYSTISLGYAGLYECVKYMTGHSHTDNGKGKEFGLKVMEKMNEKCKEWKELENIDYSVYGTPIEATTYKFAKGLKERFGVVKGITDRDYITNSYHVPVFEEIDAFTKLKLESEFQKLSPGGAISYIETPNLSNNIDVVLEVMNFIYDNIMYAELNTKSDYCQECGYTGEILIDDNMEWYCPNCGNRDHSKLNVARRTCGYIGTNFWNKGRTQEIKERVIHIDNKEA

SEQ ID NO: 1153 - protein, 724 aa, unidentified
  REGION 1..724: note = Description of Unknown: uncultivated organism sequence
  REGION 1..724: note = Category: MG60 effectors
  REGION 1..724: note = Description: MG60-368 effector
MNVIKRSGEEVVFDASKIENAIKKANKATTHNQMSDELIHSVTQSVIDKCENLKRSPNVEEIQDMVEGELMEHRCFAVAHNYITYRYERALVRKANSTDKQIMSLLERNNEEVKQENSNKNPLVNSVQRDYMAGEVSKDITKRFLLPQDVMEAHEQGIIHFHDSDYFAQHMHNCCLVNLEDMLQNGTVISETMIEKPHSFSTACNVATQIIAQVASSQYGGQSITLSHLAPFVQVSREKARREVKEELESLNLDSSEDTVNKMAEMRVRKEIEKGVQMIQYQVITLMTTNGQAPFVTVFMYLNEVPEGQTRDDLAIIIEEMLKQRIKGVKNEKGIWITPAFPKLIYVLEENNIEEGSKYWYLTELAAKCTAKRMVPDYISEKKMLELKVDANGEGHCYPCMGCRSFLTTYLDENGKPKYYGRFNQGVVTLNLVDVACSSKQDEEAFWRIMDERLALCKKALMCRHERLLGTPSDVAPILWQNGALARLKKGEPIDKLLFGGYSTISLGYAGLCECVYYMTGHPHTEEPGTSFGLKVMQYLNDACAKWKAEENIDFSLYGTPMESTTFKFSKHLQERFGIIPHVTDKNYITNSYHVHVTEEIDAFTKLSFESQFQKLSPGGAISYVEVPNMENNIDAVLAIMKHIYNHIMYAELNTKSDYCQVCGYTGEIKIVEDENHKLVWECPNCGNRDQEKMNVARRTCGYIGTQFWNQGRTQEIKERVLHL

SEQ ID NO: 1154 - protein, 752 aa, unidentified
  REGION 1..752: note = Description of Unknown: uncultivated organism sequence
  REGION 1..752: note = Category: MG60 effectors
  REGION 1..752: note = Description: MG60-369 effector
MTYYDETLDGNLDMEEQKIYIMKRSGERVIFDKEKIIQAIRKANLEEGILAERLTEDQIVDIVNGIEKDARNASRDLSVEEIQDKVEDGLMGTGKHKVARLYITYRYKHNEMRKMSNIDQKISGVVERDNEEVKQENSNKNPTVLSVQRDYMAGEWSRYYTSRYLLPDDIVMAHKEGVIHFHDADYFAQHMHNCCLVNLGDMLDNGTCISGTHIDTPRSFSTACTVASQIVAQVASSQYGGQTITMSHLAKYVDISRQKITKRLRNEFEEAGINIPEDKLKDIVELEVRKEVESGCQTVQYQLITLQSTNGQAPFVTVFLYLNEVPEGQTRDDLAMIIEVMFKQRILGVKDREGHYITPAFPKLIYVLQENNITEGSKYFYLTKLAAECTAKRMVPDYISEKKSMELKGDCFPCMGCRSFLTPDRFTDTGVGNLANALNFDVTKHKYYGRFNQGVVTINLVDAACSSGGDEKKFWEIMEERLDLCHKALRIRHERLLGTPSDVAPILWQDGALARLKPGETIDKLLYDGYSTISLGYAGLAECVYYMKGVSHTSEEGEAFGLRVMQLLNDSCATWKQHENIDYSVYGTPLESTTYKFAKCLQRRFGKIPHVTDKNYITNSYHVHVTEKIDAFSKLTKEAEFQKLSPGGAVSYVEVPSMQNNIPAVITVLQHMYNTILYAELNTKLDMCDKCGFNGEIQIVKDDTGKLVWECPNCGNRDQNEMHVSRRTCGYIGTQYWNQGRTAEIADRVLHL

SEQ ID NO: 1155 - protein, 758 aa, unidentified
  REGION 1..758: note = Description of Unknown: uncultivated organism sequence
  REGION 1..758: note = Category: MG60 effectors
  REGION 1..758: note = Description: MG60-370 effector
MSGVLFILERGGNMIIIKKNPEAEKKAGAKYVIKRNGSEDLFDENKIVIALFKANDSTIRNKITKKQIGAIADHIKSKVDETPHALNIEDIQDMVENELMRIRAFDVARSYITYRYKRALARQHNTTDDKILSLIEHNNEEVKQENSNKNPIVNSVQRDYMAGEVSKDLCKRVFLPGDIWEAHEDGLIHFHDADYFAQHMHNCCLVNLEDMLQNGTVISGTMIDKPKSFATACNIATQAIAQIASQQYGGQTMSIAHLAPFVEISRQKYMKKQRESMEKAGVKATEAQIASIVEDMVDEEIKRGVQMIQYQLITLMTTNGQAPFVTIYMYLNECRDEKTKADMVKIIREMFRQRIQGVKNEQGVWVTPAFPKLIYVLEEDNIREGSRYWDLTQLAAKCTAKRMVPDYISEKIMKQLKNGDVYSCMGCRSFLTVDRTNGNIANATNYKEGEHKYYGRFNQGVVTLNLVDVACTSAGDEDYFWEILDKRLELCHKALRIRHERLLGTPSDVAPILWQHGALARLKKGETIDKLLYGGYSTISLGYAGLCECTGYMKGVSHTDPDGTEFAMKVMQRLNDACAKWKEAENIDYSVYGTPLESTTYKFAKCLQKRFGIIPGVTDKNYITNSYHVHVTEKINAFDKLKFEAPFQKLSPGGAISYVEVPNLQNNIEAVLSIMQYIYDNIMYAELNTKSDYCEACGYDGEIKIVEDEHGKLVWECPNCGNRDQSRMSVARRTCGYIGTQFWNQGRTQEIKERFVHL

SEQ ID NO: 1156 - protein, 758 aa, unidentified
  REGION 1..758: note = Description of Unknown: uncultivated organism sequence
  REGION 1..758: note = Category: MG60 effectors
  REGION 1..758: note = Description: MG60-371 effector
MSGVLFILERGGNMIIIKKNPEAEKKAGAKYVIKRNGSEDLFDENKIVIALFKANDSTIRNKITKKQIGAIADHIKSKVDETPHALNIEDIQDMVENELMRIGAFDVARSYITYRYKRALARQHNTTDDKILSLIEHNNEEVKQENSNKNPIVNSVQRDYMAGEVSKDLCKRVFLPGDIWEAHEDGLIHFHDADYFAQHMHNCCLVNLEDMLQNGTVISGTMIDKPKSFATACNIATQAIAQIASQQYGGQTMSIAHLAPFVEISRQKYMKKQRESMEKAGVKATEAQIASIVEDMVDEEIKRGVQMIQYQLITLMTTNGQAPFVTIYMYLNECRDEKTKADMVKIIREMFRQRIQGVKNEQGVWVTPAFPKLIYVLEEDNIREGSRYWDITQLAAKCTAKRMVPDYISEKIMKQLKNGDVYSCMGCRSFLTVDRTNGNIANATNYKEGEHKYYGRFNQGVVTLNLVDVACTSAGDEDYFWEILDKRLELCHKALRIRHERLLGTPSDVAPILWQHGALARLKKGETIDKLLYGGYSTISLGYAGLCECTRYMKGVSHTDPDGTEFAMKVMQRLNDACAKWKEAENIDYSVYGTPLESTTYKFAKCLQKRFGIIPGVTDKNYITNSYHVHVTEKINAFDKLKFEAPFQKLSPGGAISYVEVPNLQNNIEAVLSIMQYIYDNIMYAELNTKSDYCEACGYDGEIKIVEDEHGKLVWECPNCGNRDQSRMSVARRTCGYIGTQFWNQGRTQEIKERFVHL

SEQ ID NO: 1157 - protein, 732 aa, unidentified
  REGION 1..732: note = Description of Unknown: uncultivated organism sequence
  REGION 1..732: note = Category: MG60 effectors
  REGION 1..732: note = Description: MG60-372 effector
MNVIKRSGEEVSFDADKILLAIEKANQATQENRQISEDKITEITNRVIQKCNEIARSISVEEIQDLVENELMAEGAYTVAHNYITYRYERALVRKANTTDKKILSLLGRNNEEAMQENSNKNPTVNSTQRDYMAGEVSKDITRRFLLPKEIWDAHEKGIIHFHDSDYFAQPMYNCCLVNLEDMLQNGTVISGTHIDKPHSFATACNIATQIIAQVASNQYGGQTITLSHLAPFVDISRQKYRKSVKAEMEAAGVEISEDKINTIAEERVKREVTTGVQTIQYQIITLMTTNGQAPFVTVFMYLDEVAEGQTRDDLALIIEEMLKQRMQGVKNEKGVYITPAFPKLIYCLDEDNIYNDSKYYYLTKLAAECTAKRMVPDYISAKIMKELKGDVYPCMGCRSFLTPDRFTENGWENNEHAMNSSSKHKYYGRFNQGVVTINLVDVACSSKKDMNAFWKIFDERLDLCYKALMIRHDRLKGTPSDVAPILWQYGAIARLEKGETIDKLLFNGYSTISLGYGGLAECVRYMTGLSHTTPEGEKFGLAVMKHLNDACAKWKQQTNIDFSVYGTPMESTTYKFAKCLQERFGIIKGVTDKNYITNSYHIHVTEEINAFDKLTEESKFQELSPGGAISYVEVPNMQNNIQAVLQLMKHIYNTIMYAELNTKSDYCQVCGYTGEIQITEDENKKLIWKCPNCGNTDQNKMNVARRTCGYIGTQFWNQGRTQEIKERVLHL

SEQ ID NO: 1158 - protein, 822 aa, unidentified
  REGION 1..822: note = Description of Unknown: uncultivated organism sequence
  REGION 1..822: note = Category: MG60 effectors
  REGION 1..822: note = Description: MG60-373 effector
MKQKPVHNPELQLAYDFVQYTGQNIFLTGRAGTGKTTFLRDLKRQSPKRMIVVAPTGVAAINAGGVTIHSFFQLPFGPRVPGYTENEDNHLRFGRHKRNIIRSLDLLVIDEISMVRADLLDSIDERLRQFRRNNQPFGGVQLLLIGDMQQLPPVVKGDEWELLRKFYDTPYFFSSRALLKSNYVTITLQHVYRQRDEKFINILNKIRDKQVDEETLARLNERYQPDFNPGDDNYIILTTHNAKAKAINDKKLAALKGKKVRFTASVTGNFPEYMYPTELELELKPGAQVMFVKNDPDAEKRFFNGKIGNITEIREDGIVVRCPDDDEDIYVEPLEWQNVKYIIEEQNKEIKEKVEGTFTQIPLKLAWAITIHKSQGLTFDRAVIDSEAAFAHGQVYVALSRCRSLEGLVLSTKFSPYSLKQDKSIEGFNIQTNKRQAGPEELTVSKTAYQRQLLEDLIDFSEMQRHVNSFYFLLHDNRKSLQPEVEVPVKEMKEQVLKEITEISEKFKSQIGRLLEKKNDAEKHDELQERIRKGAVYFSDKLNDCILRKIKEFSVESDNAEVLKKVKKAEKRLLEEVWYKRACLDACRDGFIVKDYLKERAMASLEEMPKKRPSKTEKLPVSKDIANAGLYELLKEWRNVRAQELGMPYFMVLPLKTMRALSNQVPSNMDELKRVHGFGRKKIEQFGEELLELLNEYRHDHELKTEPLPEPVKKKEKKPKINTREVSLKLWLQHKDIAKVALERGLTRATVEGHLAHYVGLGELQVEEFVDEEKIRKITKVMTEHNNFTLAEIKAKLGDDVSYGELKMVRQHLLWLGKSKSI

SEQ ID NO: 1159 - protein, 732 aa, unidentified
  REGION 1..732: note = Description of Unknown: uncultivated organism sequence
  REGION 1..732: note = Category: MG60 effectors
  REGION 1..732: note = Description: MG60-374 effector
MNVIKRSGEEVSFDADKILLAIEKANQATQENRQISEDKITEITNRVIQKCNEIARSISVEEIQDLVENELMAEGAYTVAHNYITYRYERALVRKANTTDKKILSLLGRNNEEAMQENSNKNPTVNSTQRDYMAGEVSKDITRRFLLPKEIWDAHEKGIIHFHDSDYFAQPMYNCCLVNLEDMLQNGTVISGTHIDKPHSFATACNIATQIIAQVASNQYGGQTITLSHLAPFVDISRQKYRKSVKAEMEAAGVEISEDKINTIAEERVKREVTTGVQTIQYQIITLMTTNGQAPFVTVFMYLDEVAEGQTRDDLALIIEEMLKQRMQGVKNEKGVYITPAFPKLIYCLDEDNIYNDSKYYYLTKLAAECTAKRMVPDYISAKIMKELKGDVYPCMGCRSFLTPDRFTENGWENNEHAMNSSSKHKYYGRFNQGVVTINLVDVACSSKKDMNAFWKIFDERLDLCYKALMIRHDRLKGTPSDVAPILWQYGAIARLEKGETIDKLLFNGYSTISLGYGGLAECVRYMTGLSHTTPEGEKFGLAVMKHLNDACTKWKQQTNIDFSVYGTPMESTTYKFAKCLQERFGIIKGVTDKNYITNSYHIHVTEEINAFDKLTEESKFQELSPGGAISYVEVPNMQNNIQAVLQLMKHIYNTIMYAELNTKSDYCQVCGYTGEIQITEDENKKLIWKCPNCGNTDQNKMNVARRTCGYIGTQFWNQGRTQEIKERVLHL

SEQ ID NO: 1160 - protein, 716 aa, unidentified
  REGION 1..716: note = Description of Unknown: uncultivated organism sequence
  REGION 1..716: note = Category: MG60 effectors
  REGION 1..716: note = Description: MG60-375 effector
MLEVIKRNGERVPFNRDKITIAIEKAMNSSSGIYEEGQAAKIAGEIEAYAASIQKDLTIYAIEDQVYYRLLKYNNPATARAYENYKTIQAFKRQTNTTDDDVFGLLNNTNLEVLDENSNKNGHVVSTQRDLIAGEVSKDIARRKLIPADIVQAHDSGAIHFHDMDYIIQPMFNCCLINLEDMLANGTVINGKKIDTPKSFQVACTVTTQIIAQVASGQYGGQSINGIDRILAPYVRKSFKKYMKAVVEEQREVYGIEPDMEKAEEIAWKRTKKEIKDGIQTIQYQINTLMTTNGQAPFVTLFMYFQPDYEYAREAALIDEELLRQRIQGIKNEANVYVTPAFPKLIYVLDEHNVREGSPYFYLTKLAAECTAKRMYPDYISAKKMRESYQGNVFSPMGCRSFLSPWKDEKGNYQFDGRFNMGVVSINLPQIGILADGDEEKFFQILDKRLELCKKALLLRVDLLKRITSDVSPIHWQYGAIARLKPGETIEKFIYGGYATLSLGYIGIYEATVLTKHCSHTAPEGRKFAMRIMDDLNAHIQKWKKETNIGFALYGTPAENLTNLFCKIDKARFGSIPDVTDKGYYTNSYHVDVREPINVFDKFSFEADFEDKSTGGCISYAEIPNMTHNIPAVLTMVQYIYDHITYGEFNTKLDYCHECGFDGEIILNDDNEWECPRCHNKDRNKLTVIRRTCGYLGENFWNEGRTQEIKSRVLHI

SEQ ID NO: 1161 - protein, 706 aa, unidentified
  REGION 1..706: note = Description of Unknown: uncultivated organism sequence
  REGION 1..706: note = Category: MG60 effectors
  REGION 1..706: note = Description: MG60-376 effector
METNPQIELAFDFLQYTGTNVFLTGKAGTGKTTFLRELKRRSPKRMIVVAPTGVAAINAGGVTIHSFFQLPFGPYVPGNAEGGAENEKRYTNKFSREKINIIRSLDLLVIDEISMVRADLLDAVSDVLCRYKDRSRPFGGVQLLMIGDLQQLAPVVKDDEWVLLKERYASPFFFCSRALQEVPYVGIELTQVYRQTDAAFLDLLNKVRDNRADQATLQALNRRYIPGFRPDDTEGYITLTTHNYQAQQINREKLEELEEKAYSYEAEIVDEFPEYSFPTDRHLVLKKGAQVMFVKNDASPEKRYYNGKIGRVTAISSDHILVRCGEEREAIMVAKEEWTNTKYTIDAETQEISETVEGVFRQYPLKTAWAITIHKSQGLTFERAIVDAGAAFTHGQVYVALSRCKTLEGLVLSSPLRTGALICDQVVRQFTEGIEQGQPGREQLADAKRAYYLQLLKELFDYNGVLRRMQYMSRILNEHLWRLYPELTERYRTEREFCHNELKDVGERFQMQLERLVNECREPEQDGQVRERVAKGLAYFREHTGRVFALVQDTQPEVDNKEVRKSLNEALGRLQQEVEVKMATLEAAAGGFSVMGHLQAKARAMIEKPKVKARKISDKVDVPEDILHPDLYQILRQWRKEEAASMNLPVYTVLHQKALLGIANILPTNGRELLSIPGIGKKVAERYGKKLLEMVNDYRFATLGDA

SEQ ID NO: 1162 - protein, 1147 aa, unidentified
  REGION 1..1147: note = Description of Unknown: uncultivated organism sequence
  REGION 1..1147: note = Category: MG60 effectors
  REGION 1..1147: note = Description: MG60-377 effector
MKTFAYKQQKSVTFGLIGKEGNPFVKEKKNNFKIKYREQEINFNCDARDRIYGDNLWWLQRIFHYMQNILHMIFAKEPYHRFTFSYEFTLVERKKLQTRRIAEKALKDKIWRKYEKQFQKLLNNISLFDEILEEKEDNFSKISHIVRIIRYINWDTQKLEHCISNYTYFWDKIEKKSALEEFKNFIQKNWDFWELLEFYSKLDKEQFEEYKIALNPAILNTHSEVNQQNWTQELDSLKRSLEALERKNNFNKNIKRFFEEDLEAYINYILYQKNFFKQSKNVEYKNKTQRIYEKYSNLSSNARYQEELVIDFIEGNEIDLENPYKVAQEELDKYLQQQESINSLKNLKSNINFVQLKTFLYQLTWKRAEIKENNKKSEEKLDYQKLSEYIVIIKWEINSRLENANYRYGEFIKRDGIKAQTAQKLWQKYGEYMQKLNFDKELKWYTHFWFIVRKWKRFFIRTYKKEDILNKNQGFTLQDAENLLKEKRDVKWEYTAFLFQSLTLKWLLKLIFIKNAFNLDFKEEYKIYQIWKQKKYIKDRFQSTKLIDFLIKILTSNKWKELFPYVDNYFKKGNQYSKFQEFEKDLLKNSYKVKKYQCNFDESELIELDIVDRKFEHNDAVEPRLKRQNDIQILVEWFFSKQNFSFIRLLPEIKIFVRYQKLFNDMKKRVVSWIDSNWDRYEKEINEKERFYKTISKASFMLELNPCRIGGTPQKEKKEYQDYIIDLYEKREDFHIISIDIGENSFATLGVYDRDLMPKKIDVKWLPQQNENQNKDIIDITDLKIEKWEIVQTNTKNSEKYKSYKNMFENILRYQIYLKDILEQVGEIELKKENYNNIAQKIEESINRISELRFNTGNIIDEVKQDFPLLKNGLKQLLFSYIQNLHNGQDKTINITQYYHQIFEKLELQKVINFKDAFWANFVGVMKEILNRYPGIIVFESLHTGNNYDSYNDVIKKRLQNTTSEKSKEFRTFGTYIWMYIVQSLVNSFSKIIDIKNEKVNQLIYWEKNYETTIWKEKYSNNGILFFVDEKNTSSVCPICNWNFIQKIKKNWEVIEQENKNIKKLFGHWRWKEFETSMHHINDENNKNYQRWKWKSGNLEKGDLCDYGIWNKNYPEFEFIKSWDDLATYNIAKKAKEYLESLSKKED

SEQ ID NO: 1163 - protein, 463 aa, unidentified
  REGION 1..463: note = Description of Unknown: uncultivated organism sequence
  REGION 1..463: note = Category: MG60 effectors
  REGION 1..463: note = Description: MG60-378 effector
MVNLKNFKNLYEVRKTVRFELKPYKKTRELLKWKNNYQSLDSYIKHIKDWEFEDWFDWNDFCLWKYEDFLKESKKYYWFLFQINAEIQKWRNDTTKKNIHFDLKKSKGIFKNIPSLKKIQWFEWLKSKLLEIQDEYQNYFNFFDQLQHKQHKNEKKSDISIYLRKIAYLNRNLFTIFNFFDTYKTNQEILDKKKEIIDYDFEKLNNSIIASHENEISGACFWKFTFNKFALFRREASLLKEKLETNKQVLQKAVATMVADGEIINDNWTIVDINTNQIHSLTLQKKICYSLKFEEEIWTLQGRLEKFNFNRNLDEVISELDDINGQLLNQYIQNFVNGYKNDENILEVSFYTDHEGNEIFDKSKKYDSYENGQKKEKFYPSLLKLDLEQFVEAQKRNQIKIQPGQTLEWYQYINLLGKDELANEEKEQKKLLNKFLQILFKQEFINPDYNTIKKFRDTLAKYR

SEQ ID NO: 1164 - protein, 1232 aa, unidentified
  REGION 1..1232: note = Description of Unknown: uncultivated organism sequence
  REGION 1..1232: note = Category: MG61 effectors
  REGION 1..1232: note = Description: MG61-1 effector
MDYAKFTKQGKLIKGIKLELVPQGNTRDAISEYKIVEADQQLADMVKEVVMAGNEFYKDFIKQIVRHMDGADWQAYGEAVENKTADQKAYDEAVKSISASIKNAILDTAELYGGKKTLFAKDFITIVLRKYVETAENFPYNRERVLTCIDVLSDKNALFKTPYVKWEHIIFGESKGSIAERMLSNFDIFYDNRNKYAALKEATAITDFDDFFTDYASYTRYVGQGGIELYNSAIRGIYSESGAKISEGINEYINKLKMKHPELHVNMLKKLQKQILSNSEPLFKVATIQNAEELKGIMNKVKVAEESVLSSAKELLVHMETSDLHDLYISGQRLYFVCQKVAKDGEILEELIFNDECSRVEKLTEKKKEEIRGAIVKQDYNFAYIDSLLSEYAEKTVKMVINEELQKLIAAIVSSGASYDSITINPKWKAVPDKEVTVIREYLESFVELNKFIKCLQVRDSDVYPDFKTYATLNALADELGALNKAYNMVRNFVTKKVNDKDGKTRLCFGKGALLERGWNRKNQAVDWLGNIDHMLLTKDGKYYYAVPAPVKRKTKIYISDTKPSDEVYEYMEISKQSSFLKTFARLFTSLGLKNIGDADDITMDLGNGSMTVTKEFLVKYKDGECKKDVDFMHKSIDIAKEFLAKHYSYANFNFSELKKTEDYASFYEFANDVDKYTYAVKTKYIDAAIIDKAVEDKELLLFMLSSMDLYKPQESCKDITALYTRYFFSEENKKKADIWLNANPAIYYRKPLIKFEKTHPAGSILVRKTYEDKDGITHIVPDKVYMSLYNHYNKNTPLNEEAMQYVDLVEHHVAVQDYVKDARYTREMFTINLSFTLNGDAGDAAQTYTINNMVKEQIKAKMPRMLTVVRGYRNLLEYCVTDETGKVFESGNFNTIGGVNFKEKLEDLDKIRKIDAQNWKYEKTVVNIKESYLGMVTSSIVKKAVEYDAIINVEQLSDAFKDKRSCMDNQVFKKFEEKLVNKLACYYDKEKAPTEPGGYLNPLQLASPNCLSNTQNGILFYVSPAYTNEVCPKSNFINLLDFSAAKTLKAKREFLRKMSGICYDAEHEAFHFSFCYDDMPIKLPVKEKKELNDKTNQEFGKHIWTVYTNGVRTEYNKKERKLIELNGTEILGKECAKNNVMLTDHMDVDSMPNSVVNEMIHIFQKYSFGEVAQKDVYYVSPVSPQAGPICTPGELRLKSMSEKGYMILHNIVAGKEKFAVNKIEWLEEKLG

SEQ ID NO: 1165 - protein, 1253 aa, unidentified
  REGION 1..1253: note = Description of Unknown: uncultivated organism sequence
  REGION 1..1253: note = Category: MG61 effectors
  REGION 1..1253: note = Description: MG61-2 effector
MELNKFCRLNQSIKTCSLELVPIGRTRETIEKHNVIEEDSKRKENAVLAKEVSDSFIREFIADYKGDFDWSELVACFGKHEEYAGIKEKMEEKIAREFSDAFNGYISKFLKANGVGKADNKTKWSDASYIDVVLPLYASLHPDYDNPKYKEAIASICHCSSTIFKRYITAYEKIINGTKKGSFAERVMDNFQIICTNRLMCEIVFSKIKKADDFRLFLDAPESMNEYLSQKGIDQYNETIGDSFSEKGEILRYGLNHYINEWNQKNPDSRMPKLQKLKKQILSVAEPAFRIDVIDNEKELQETIKNIRAAEVRYSGKLKDILENLNYTNTYIHDGVLVKAAGRENLAKMITGEWNFFREQIREREERRIRDEYLQKKNRIKTKLTKKDEKQIEDTVSKGMYSLVDLNKMLGEEKANIESKLLDEYVKNRSEREKHYTVVANADFMSKESLPTSDEIKIIQNYLDKVIQMTHIIRCLDADAQNEKVDLVFLDDAAELEDDKTLIVTGYNLIRNFLTKKREKTAKEKAVQLCFGRPAHFEQKWNNKQAGKFGNVDAALLEENGKFYYIVPAAKNESKLNFPVTDEPQAGRCYNYLSTQKAIGFAKAFAKFTIKSPEAMSGYAKSEEPFEISVGNQKMTVSKKMYDSYEAKTFRDSEEEKIKLIDYAKEFLQKHGSYNTYDWSELRESKDYVNYGEFCSEVDSIAFRVVNRYISKDLVDDAVLRGDLYMFEITSQDMYKDKNRMKNIMALRFHAIMEGMKTGNKSIIINNAPQIRYRPQIIEAEDKHPAGSKLVNKKTTDGKTIPGDIYLELCDFYNGRKSSLSPEASLYNERVSVKVSDREHIKDKHYTAEKFLITLSYTMNKNVASNTSVYKLNEMIRNEIKENGCNIMSVIRGIDNLLYYAVIDENGNKIEAGDLNVVGDTDFNEMLSVVGTQRYIDQKNWKYEKKVAELKDTYLGQACRKIASIAVKNNAVIVIDKINENTKRKNAAFDNNVYRKFEDALVNTLSNYYDRSIKADEPGGISNPLQLCVNEDNNFQNGILFYTYDAFTKNICMDTGFINLLNTFNVKTVAAKLGFLKKMDGIYYDSDRQEFVFEFAWGKLGSVLKEEEAALYTGLDKSWKVRTHLTRYKRDRESGKYKEVDGTEILKKLIKEKHPDMIGEKINVDKLTSNEVQTVYEIFTLYVNGFIPRMDGESSEYMSPVSDWNSMSNIAYDEMTALQLARKGSLTIGRIKNGFEGKDINISRVDWLNEILR

SEQ ID NO: 1166 - protein, 846 aa, unidentified
  REGION 1..846: note = Description of Unknown: uncultivated organism sequence
  REGION 1..846: note = Category: MG61 effectors
  REGION 1..846: note = Description: MG61-3 effector
MDFTKFQKLNSIIKTCSFEMIPIGKTRETMEKHNVIEEDAERKSNAELTKEASDSFIREFIADYKEDMDWKDLYDAYGEDRARFTDIMNQKAEKLAKRFSDSFNEYINTFLKANGINDKKSKWSDSGYVDVVLPLYVSIHPDFSNDKYERAVASLLHCSNSLFKKYTTSYARIIAGTKKGSFADRSMENFQTACANSVMFDLISRNLSSVGSHDAFKEVFADAPLNMNEYLSQKGISRYNEFVGDSFDESGQVIRYGVNHYINEWNQTHPDERMPKMHKLKKQILSIVEPSFRIRTINDETELFGTFDNIRTAEQRYAGMLESILENMNTADIYDKSGILVTSAERDSLANAITGEWSYFRRQIKEEEENRIREEYLQKKNRVKTKLTQKDNKQIEDALNKSIYSVADLNKMLGSDFGTIEEKLLDEYIRNKSKKESAYAQLVKTDFYDKKTIPAGDDVQRIQQYLDKVLSLTHIVRGLCADSQDPRTDFVFSDDVSSLEDDRVQIISCYNLIRNFVTKKREKTAKEKQIQLCFGRPAHFEQVWNNKQEGKFGNVDAALLEYAGKYYYMVPAAKNEAKLNFPVTDEPQMGECYNYLATKKAIGFAKAFAKFYIKSPEAMEGFEKTEEPFEISVGNDTMIISRKVYEDYEAKTFRESEEAKNKLIDCAKEFLSKNLSYCIYDWSVLKEANDYVNYGEFCNEVDSIAFRVINRYVSKKLVDDAVERGNLYMFEISSLDMYKDSSRMKNIMALRFNQIMNGMFTGDKSIIINNAPQIRYRPVVIEKKDVHPVGSRLVNKNTTDGRTIPGDVYLELCAYYNGKKDSLSPEASLYNEKVSVKDSDRAHIKD

SEQ ID NO: 1167 - protein, 1259 aa, unidentified
  REGION 1..1259: note = Description of Unknown: uncultivated organism sequence
  REGION 1..1259: note = Category: MG61 effectors
  REGION 1..1259: note = Description: MG61-4 effector
MDFTKFQKLNSIIKTCSFEMIPIGKTRETMEKHNVIEEDAERKSNAELTKEVSDSFIREFIADYKEDMDWKDLYDAYGEDRARFTDIMNQKAEKLAKRFSDSFNEYINTFLKANGIKDKKSKWSDSGYVDVVLPLYVSIHPDFSNDKYERAVASLLHCSNSLFKKYTTSYARIIAGTKKGSFADRSMENFQTACANSVMFDLISINLSNVGSHDAFKEVFADAPLNMNEYLSQKGISRYNEFVGDSFDESGQVIRYGVNHYINEWNQTHPDERMPKMHKLKKQILSIVEPSFRIRTINDETELFGTFDNIRTAEQRYAGMLESILENMNTADIYDKSGILVTSAERDSLANAITGEWSYFRRQIKEEEENRIREEYLQKKNRVKTKLTQKDNKQIEDALNKSIYSVADLNKMLGSDFGTIEEKLLDEYIRNKSKKESAYAQLVKTDFYDKKTIPAGDDVQRIQQYLDKVLGLTHIVRGLCADSQDPRTDFVFSDDVSSLEDDRVQIISCYNLIRNFVTKKREKTAKEKQIQLCFGRPAHFEQVWNNKQEGKFGNVDAALLEYAGKYYYMVPAAKNEAKLNFPVTDEPQRGECYNYLATKKAIGFAKAFAKFYIKSPEAMEGFEKTEEPFEISVGNDTMIISRKVYEDYEAKTFRESEEAKNKLIDCAKEFLSKNLSYCIYDWSGLKETKDYVNYGEFCNEVDSIAFRVINRYVSKKLVDDAVERGNLYMFEISSLDMYKDSSRMKNIMALRFNQIMNGMFTGDKSIIINNAPQIRYRPVVIEKKDVHPVGSRLVNKNTTDGRTIPGDVYLELCAYYNGKKDSLSPEASLYNEKVSVKDSDRAHIKDKHYTEEKFLITFSYTANKNVASATSGYQLNEMVRKEIRENGCNIMAVIRGIDNLLYYAVVDENGNRIEAGDLNVVGDTDFYEKLTILGKQRYTDQKNWKHENKVADLKDTYLGQVCRKIASIAVKNNAVIVIDKINERTKRKNAAFDNNMYRKFENALVNSLTDYYDIGIRGDEPGSVKNPLQLTVKEDNGFQNGIIFYQFDTFTKNICMRTGFVNLLNTFEIKTVASKVAFLKKLSGIYYDNDINEFVFEFTWRNIGCILKDEELSLYDGMDKIWKVRTHFTRYMRNAEKNKYVEIDGTEVLKELIRKNHPDMIGGKIDVDRLTSEEVKKVFEIFTLYTNGYIPRMDDAESGYMSPACDWNNFGTIRYDEMTALQLAKKSSLMIGKVKSGKDWKDMNVSRVEWLNHVLKADW

SEQ ID NO: 1168 - protein, 1259 aa, unidentified
  REGION 1..1259: note = Description of Unknown: uncultivated organism sequence
  REGION 1..1259: note = Category: MG61 effectors
  REGION 1..1259: note = Description: MG61-5 effector
MDFTKFQKLNSIIKTCSFEMIPIGKTRETMEKHNVIEEDAERKSNAELTKEVSDSFIREFIADYKEDMDWKDLYDAYGEDRARFTDIMNQKAEKLAKRFSDSFNEYINTFLKANGIKDKKSKWSDSGYVDVVLPLYVSIHPDFSNDKYERAVASLLHCSNSLFKKYTTSYARIIAGTKKGSFADRSMENFQTACANSVMFDLISINLSNVGSHDAFKEVFADAPLNMNEYLSQKGISRYNEFVGDSFDESGQVIRYGVNHYINEWNQTHPDERMPKMHKLKKQILSIVEPSFRIRTINDETELFGTFDNIRTAEQRYAGMLESILENMNTADIYDKSGILVTSAERDSLANAITGEWSYFRRQIKEEEENRIREEYLQKKNRVKTKLTQKDNKQIEDALNKSIYSVADLNKMLGSDFGTIEEKLLDEYIRNKSKKESAYAQLVKTDFYDKKTIPAGDDVQRIQQYLDKVLGLTHIVRGLCADSQDPRTDFVFSDDVSSLEDDRVQIISCYNLIRNFVTKKREKTAKEKQIQLCFGRPAHFEQVWNNKQEGKFGNVDTALLEYAGKYYYMVPAAKNEAKLNFPVTDEPQRGECYNYLATKKAIGFAKAFAKFYIKSPEAMEGFEKTEEPFEISVGNDTMIISRKVYEDYEAKTFRESEEAKNKLIDCAKEFLSKNLSYCIYDWSGLKETKDYVNYGEFCNEVDSIAFRVINRYVSKKLVDDAVERGNLYMFEISSLDMYKDSSRMKNIMALRFNQIMNGMFTGDKSIIINNAPQIRYRPVVIEKKDVHPVGSRLVNKNTTDGRTIPGDVYLELCAYYNGKKDSLSPEASLYNEKVSVKDSDRAHIKDKHYTEEKFLITFSYTANKNVASATSGYQLNEMVRKEIRENGCNIMAVIRGIDNLLYYAVVDENGNRIEAGDLNVVGDTDFYEKLTILGKQRYTDQKNWKHENKVADLKDTYLGQVCRKIASIAVKNNAVIVIDKINERTKRKNAAFDNNMYRKFENALVNSLTDYYDIGIRGDEPGSVKNPLQLTVKEDNGFQNGIIFYQFDTFTKNICMRTGFVNLLNTFEIKTVASKVAFLKKLSGIYYDNDINEFVFEFTWRNIGCILKDEELSLYDGMDKIWKVRTHFTRYMRNAEKNKYVEIDGTEVLKELIRKNHPDMIGGKIDVDRLTSEEVKKVFEIFTLYTNGYIPRMDDAESGYMSPACDWNNFGTIRYDEMTALQLAKKSSLMIGKVKSGKDWKDMNVSRVEWLNHVLKADW

SEQ ID NO: 1169 - protein, 1259 aa, unidentified
  REGION 1..1259: note = Description of Unknown: uncultivated organism sequence
  REGION 1..1259: note = Category: MG61 effectors
  REGION 1..1259: note = Description: MG61-6 effector
MDFTKFQKLNSIIKTCSFEMIPIGKTRETMEKHNVIEEDAERKSNAELTKEVSDSFIREFIADYKEDMDWKDLYDAYGEDRARFTDIMNQKAEKLAKRFSDSFNEYINTFLKANGIKDKKSKWSDSGYVDVVLPLYVSIHPDFSSDKYERAVASLLHCSNSLFKKYTTSYARIIAGTKKGSFADRSMENFQTVCANSVMFDLISRNLSSVECHDTFKEVFADAPLNMNEYLSQKGISRYNEFVGDSFDESGQVIRYGVNHYINEWNQTHPDERMPKMHKLKKQILSIVEPSFRIRTINDETELFGTFDNIRTAEQRYAGMLESILENMNTADIYDKSGILVTSAERDSLANAITGEWSYFRRQIKEEEENRIREEYLQKKNRVKTKLTQKDNKQIEDALNKSIYSVADLNKMLGSDFGTIEEKLLDEYIRNKSKKESAYAQLVKTDFYDKKTIPAGDDVQRIQQYLDKVLSLTHIVRGLCADSQDPRTDFVFSDDVSSLEDDRVQIVTCYNLIRNFVTKKREKTAKEKQIQLCFGRPAHFEQVWNNKQEGKFGNVDAALLEYAGKYYYMVPAAKNEAKLNFPVTDEPQRGECYNYLATKKAIGFAKAFAKFYIKSPEAMEGFEKTEEPFEISVGNDTMIISRKVYEDYEAKTFRESEEAKNKLIDCAKEFLSKNLSYCIYDWSVLKEANDYVNYGEFCNEVDSIAFRVINRYVSKKLVDDAVERGNLYMFEISSLDMYKDSSRMKNIMALRFNQIMNGMFTGDKSIIINNAPQIRYRPVVIEKKDVHPVGSRLVNKNTTDGRTIPGDVYLELCAYYNGKKDSLSPEASLYNEKVSVKDSDRAHIKDKHYTEEKFLITFSYTANKNVASATSGYQLNEMVRKEIRENGCNIMAVIRGIDNLLYYAVVDENGNRIEAGDLNVVGDTDFYEKLTILGKQRYTDQKNWKHENKVADLKDTYLGQVCRKIASIAVKNNAVIVIDKINESTKRKNAAFDNNMYRKFENALVNSLTDYYDIGIRGDEPGSVKNPLQLTVKEDNGFQNGIIFYQFDTFTKNICMRTGFVNLLNTFEIKTVASKVAFLKKLSGIYYDNDINEFVFEFTWRNIGCILKDEELSLYDGMDKIWKVRTHFTRYMRNAEKNKYVEIDGTEVLKELIRKNHPDMIGGKIDVDRLTSEEVKKVFEIFTLYTNGYIPRMDDAESGYMSPACDWNNFGTIRYDEMTALQLAKKSSLMIGKVKSGKDWKDMNVSRVEWLNHVLKADW

SEQ ID NO: 1170 - protein, 1259 aa, unidentified
  REGION 1..1259: note = Description of Unknown: uncultivated organism sequence
  REGION 1..1259: note = Category: MG61 effectors
  REGION 1..1259: note = Description: MG61-7 effector
MDFTKFQKLNSIIKTCSFEMIPIGKTRETMEKHNVIEEDAERKSNAELTKEVSDSFIREFIADYKEDMDWKDLYDAYGEDRARFTDIMNQKAEKLAKRFSDSFNEYINTFLKANGIKDKKSKWSDSGYVDVVLPLYVSIHPDFSSDKYERAVASLLHCSNSLFKKYTTSYARIIAGTKKGSFADRSMENFQTVCANSVMFDLISRNLSSVECHDTFKEVFADAPLNMNEYLSQKGISRYNEFVGDSFDESGQVIRYGVNHYINEWNQTHPDERMPKMHKLKKQILSIVEPSFRIRTINDETELFGTFDNIRTAEQRYAGMLESILENMNTADIYDKSGILVTSAERDSLANAITGEWSYFRRQIKEEEENRIREEYLQKKNRVKTKLTQKDNKQIEDALNKSIYSVADLNKMLGSDFGTIEEKLLDEYIRNKSKKESAYAQLVKTDFYDKKTIPAGDDVQRIQQYLDKVLSLTHIVRGLCADSQDPRTDFVFSDDVSSLEDDRVQIVTCYNLIRNFVTKKREKTAKEKQIQLCFGRPAHFEQVWNNKQEGKFGNVDAALLEYAGKYYYMVPAAKNEAKLNFPVTDEPQRGECYNYLATKKAIGFAKAFAKFYIKSPEAMEGFEKTEEPFEISVGNDTMIISRKVYEDYEAKTFRESEEAKNKLIDCAKEFLSKNLSYCIYDWSVLKEANDYVNYGEFCNEVDSIAFRVINRYVSKKLVDDAVERGNLYMFEISSLDMYKDSSRMKNIMALRFNQIMNGMFTGDKSIIINNAPQIRYRPVVIEKKDVHPVGSRLVNKNTTDGRTIPGDVYLELCAYYNGKKDSLSPEASLYNEKVSVKDSDRAHIKDKHYTEEKFLITFSYTANKNVASATSGYQLNEMVRKEIRENGCNIMAVIRGIDNLLYYAVVDENGNRIEVGDLNVVGDTDFYEKLTILGKQRYTDQKNWKHENKVADLKDTYLGQVCRKIASIAVKNNAVIVIDKINESTKRKNAAFDNNMYRKFENALVNSLTDYYDIGIRGDEPGSVKNPLQLTVKEDNGFQNGIIFYQFDTFTKNICMRTGFVNLLNTFEIKTVASKVAFLKKLSGIYYDNDINEFVFEFTWRNIGCILKDEELSLYDGMDKIWKVRTHFTRYMRNAEKNKYVEIDGTEVLKELIRKNHPDMIGGKIDVDRLTSEEVKKVFEIFTLYTNGYIPRMDDAESGYMSPACDWNNFGTIRYDEMTALQLAKKSSLMIGKVKSGKDWKDMNVSRVEWLNHVLKADW

SEQ ID NO: 1171 - protein, 1259 aa, unidentified
  REGION 1..1259: note = Description of Unknown: uncultivated organism sequence
  REGION 1..1259: note = Category: MG61 effectors
  REGION 1..1259: note = Description: MG61-8 effector
MDFTKFQKLNSIIKTCSFEMIPIGKTRETMEKHNVIEEDAERKSNAELTKEVSDSFIREFIADYKEDMDWKDLYDAYGEDRARFTDIMNQKAEKLAKRFSDSFNEYINTFLKANGINDKKSKWSDSGYVDVVLPLYVSIHPDFSNDKYERAVASLLHCSNSLFKKYTTSYARIIAGTKKGSFADRSMENFQTACANSVMFDLISRNLSSVGSHDAFKEVFADAPLNMNEYLSQKGISRYNEFVGDSFDESGQVIRYGVNHYINEWNQTHPDERMPKIHKLKKQILSIVEPSFRIRTINDETELFGTFDNIRTAEQRYAGMLESILENMNTADIYDKSGILVTSAERDSLANAITGEWSYFRRQIKEEEENRIREEYLQKKNRVKTKLTQKDNKQIEDALNKSIYSVADLNKMLGSDFGTIEEKLLDEYIRNKSKKESAYAQLVKTDFYDKKTIPAGDDVQRIQQYLDKVLSLTHIVRGLCADSQDPRTDFVFSDDVSSLEDDRVQIISCYNLIRNFVTKKREKTAKEKQIQLCFGRPAHFEQVWNNKQEGKFGNVDAALLEYAGKYYYMVPAAKNEAKLNFPVTDEPQMGECYNYLATKKAIGFAKAFAKFYIKSPEAMEGFEKTEEPFEISVGNDTMIISRKVYEDYEVKTFRESEEAKNKLIDCAKEFLSKNLSYCIYDWSVLKEANDYVNYGEFCNEVDSIAFRVINRYVSKKLVDDAVERGNLYMFEISSLDMYKDSSRMKNIMALRFNQIINGMFTGDKSIIINNAPQIRYRPVVIEKKDVHPVGSRLVNKNTTDGRTIPGDVYLELCAYYNGKKDSLSPEASLYNEKVSVKDSDRAHIKDKHYTEEKFLITFSYTANKNVASATSGYQLNEMVRKEIRENGCNIMAVIRGIDNLLYYAVVDENGNRIEAGDLNVVGDTDFYEKLTILGKQRYTDQKNWKHENKVADLKDTYLGQVCRKIASIAVKNNAVIVIDKINESTKRKNAAFDNNMYRKFENALVNSLTDYYDIGIRGDEPGSVKNPLQLTVKEDNGFQNGIIFYQFDTFTKNICMRTGFVNLLNTFEIKTVASKVAFLKKLSGIYYDNDINEFVFEFTWRNIGCILKDEELPLYDGMDKIWKVRTHFTRYMRNAEKNKYVEIDGTEVLKELIRKNHPDMIGGKIDVDRLTSEEVKKVFEIFTLYTNGYIPRMDDAESGYMSPACDWNNFGTIRYDEMTALQLAKKSSLMIGKVKSGKDWKDMNVSRVEWLNHVLKADW

SEQ ID NO: 1172 - protein, 1259 aa, unidentified
  REGION 1..1259: note = Description of Unknown: uncultivated organism sequence
  REGION 1..1259: note = Category: MG61 effectors
  REGION 1..1259: note = Description: MG61-9 effector
MDFTKFQKLNSIIKTCSFEMIPIGKTRETMEKHNVIEEDAERKSNAELTKEVSDSFIREFIADYKEDMDWKDLYDAYGEDRARFTDIMNQKAEKLAKRFSDSFNEYINTFLKANGINDKKSKWSDSGYVDVVLPLYVSIHPDFSNDKYERAVASLLHCSNSLFKKYTTSYARIIAGTKKGSFADRSMENFQTACANSVMFDLISRNLSSVGSHDAFKEVFADAPLNMNEYLSQKGISRYNEFVGDSFDESGQVIRYGVNHYINEWNQTHPDERMPKMHKLKKQILSIVEPSFRIRTINDETELFGTFDNIRTAEQRYAGMLESILENMNTADIYDKSGILVTSAERDSLANAITGEWSYFRRQIKEEEENRIREEYLQKKNRVKTKLTQKDNKQIEDALNKSIYSVADLNKMLGSDFGTIEEKLLDEYIRNKSKKESAYAQLVKTDFYDKKTIPAGDDVQRIQQYLDKVLSLTHIVRGLCADSQDPRTDFVFSDDVSSLEDDRVQIISCYNLIRNFVTKKREKTAKEKQIQLCFGRPAHFEQVWNNKQEGKFGNVDAALLEYAGKYYYMVPAAKNEAKLNFPVTDEPQMGECYNYLATKKAIGFAKAFAKFYIKSPEAMEGFEKTEEPFEISVGNDTMIISRKVYEDYEAKTFRESEEAKNKLIDCAKEFLSKNLSYCIYDWSGLKETKDYVNYGEFCNEVDSIAFRVINRYVSKKLVDDAVERGNLYMFEISSLDMYKDSSRMKNIMALRFNQIMNGMFTGDKFIIINNAPQIRYRPVVIEKKDVHPVGSRLVNKNTTDGRTIPGDVYLELCAYYNGKKDSLSPEASLYNEKVSVKDSDRAHIKDKHYTEEKFLITFSYTANKNVASATSGYQLNEMVRKEIRENGCNIMAVIRGIDNLLYYAVVDENGNRIEAGDLNVVGDTDFYEKLTILGKQRYTDQKNWKHENKVADLKDTYLGQVCRKIASIAVKNNAVIVIDKINERTKRKNAAFDNNMYRKFENALVNSLTDYYDIGIRGDEPGSVKNPLQLTVKEDNGFQNGIIFYQFDTFTKNICMRTGFVNLLNTFEIKTVASKVAFLKKLSGIYYDNDINEFVFEFTWRNIGCILKDEELSLYNGMDKIWKVRTHFTRYMRNAEKNKYVEIDGTEVLKELIRKNHPDMIGGKIDVDRLTSEEVKKVFEIFTLYTNGYIPRMDDAESGYMSPACDWNNFGTIRYDEMTALQLAKKSSLMIGKVKSGKDWKDMNVSRVEWLNHVLKADW

SEQ ID NO: 1173 - protein, 1259 aa, unidentified
  REGION 1..1259: note = Description of Unknown: uncultivated organism sequence
  REGION 1..1259: note = Category: MG61 effectors
  REGION 1..1259: note = Description: MG61-10 effector
MDFTKFQKLNSIIKTCSFEMIPIGKTRETMEKHNVIEEDAERKSNAELTKEVSDSFIREFIADYKEDMDWKDLYDAYGEDRARFTDIMNQKAEKLAKRFSDSFNEYINTFLKANGINDKKSKWSDSGYVDVVLPLYVSIHPDFSNDKYERAVASLLHCSNSLFKKYTTSYARIIAGTKKGSFADRSMENFQTACANSVMFDLISRNLSSVGSHDAFKEVFADAPLNMNEYLSQKGISRYNEFVGDSFDESGQVIRYGVNHYINEWNQTHPDERMPKMHKLKKQILSIVEPSFRIRTINDETELFGTFDNIRTAEQRYAGMLESILENMNTADIYDKSGILVTSAERDSLANAITGEWSYFRRQIKEEEENRIREEYLQKKNRVKTKLTQKDNKQIEDALNKSIYSVADLNKMLGSDFGTIEEKLLDEYIRNKSKKESAYAQLVKTDFYDKKTIPAGDDVQRIQQYLDKVLSLTHIVRGLCADSQDPRTDFVFSDDVSSLEDDRVQIISCYNLIRNFVTKKREKTAKEKQIQLCFGRPAHFEQVWNNKQEGKFGNVDAALLEYAGKYYYMVPAAKNEAKLNFPVTDEPQMGECYNYLATKKAIGFAKAFAKFYIKSPEAMEGFEKTEEPFEISVGNDTMIISRKVYEDYEAKTFRESEEAKNKLIDCAKEFLSKNLSYCIYDWSVLKEANDYVNYGEFCNEVDSIAFRVINRYVSKKLVDDAVERGNLYMFEISSLDMYKDSSRMKNIMALRFNQIMNGMFTGDKSIIINNAPQIRYRPVVIEKKDVHPVGSRLVNKNTTDGRTIPGDVYLELCAYYNGKKDSLSPEASLYNEKVSVKDSDRAHIKDKHYTEEKFLITFSYTANKNVASATSGYQLNEMVRKEIRENGCNIMAVIRGIDNLLYYAVVDENGNRIEAGDLNVVGDTDFYEKLTILGKQRYTDQKNWKHENKVADLKDTYLGQVCRKIASIAVKNNAVIVIDKINESTKRKNAAFDNNMYRKFENALVNSLTDYYDIGIRGDEPGSVKNPLQLTVKEDNGFQNGIIFYQFDTFTKNICMRTGFVNLLNTFEIKTVASKVAFLKKLSGIYYDNDINEFVFEFTWRNIGCILKDEELPLYDGMDKIWKVRTHFTRYMRNAEKNKYVEIDGTEVLKELIRKNHPDMIGGKIDVDRLTSEEVKKVFEIFTLYTNGYIPRMDDAESGYMSPACDWNNFGTIRYDEMTALQLAKKSSLMIGKVKSGKDWKDMNVSRVEWLNHVLKADW

SEQ ID NO: 1174 - protein, 1259 aa, unidentified
  REGION 1..1259: note = Description of Unknown: uncultivated organism sequence
  REGION 1..1259: note = Category: MG61 effectors
  REGION 1..1259: note = Description: MG61-11 effector
MDFTKFQKLNSIIKTCSFEMIPIGKTRETMEKHNVIEEDAERKSNAELTKEVSDSFIREFIADYKEDMDWKDLYDAYGEDRARFTDIMNQKAEKLAKRFSDSFNEYINTFLKANGINDKKSKWSDSGYVDVVLPLYVSIHPDFSNDKYERAVASLLHCSNSLFKKYTTSYARIIAGTKKGSFADRSMENFQTACANSVMFDLISRNLSSVGSHDAFKEVFADAPLNMNEYLSQKGISRYNEFVGDSFDESGQVIRYGVNHYINEWNQTHPDERMPKMHKLKKQILSIVEPSFRIRTINDETELFGTFDNIRTAEQRYAGMLESILENMNTADIYDKSGILVTSAERDSLANAITGEWSYFRRQIKEEEENRIREEYLQKKNRVKTKLTQKDNKQIEDALNKSIYSVADLNKMLGSDFGTIEEKLLDEYIRNKSKKESAYAQLVKTDFYDKKTIPAGDDVQRIQQYLDKVLSLTHIVRGLCADSQDPRTDFVFSDDVSSLEDDRVQIISCYNLIRNFVTKKREKTAKEKQIQLCFGRPAHFEQVWNNKQEGKFGNVDAALLEYAGKYYYMVPAAKNEAKLNFPVTDEPQMGECYNYLATKKAIGFAKAFAKFYIKSPEAMEGFEKTEEPFEISVGNDTMIISRKVYEDYEAKTFRESEEAKNKLIDCAKEFLSKNLSYCIYDWSVLKEANDYVNYGEFCNEVDSIAFRVINRYVSKKLVDDAVERGNLYMFEISSLDMYKDSSRMKNIMALRFNQIMNGMFTGDKSIIINNAPQIRYRPVVIEKKDVHPVGSRLVNKNTTDGRTIPGDVYLELCAYYNGKKDSLSPEASLYNEKVSVKDSDRAHIKDKHYTEEKFLITFSYTANKNVASATSGYQLNEMVRKEIRENGCNIMAVIRGIDNLLYYAVVDENGNRIEAGDLNVVGDTDFYEKLTILGKQRYTDQKNWKHENKVADLKDTYLGQVCRKIASIAVKNNAVIVIDKINESTKRKNAAFDNNMYRKFENALVNSLTDYYDIGIRGDEPGSVKNPLQLTVKEDNGFQNGIIFYQFDTFTKNICMRTGFVNLLNTFEIKTVASKVAFLKKLSDIYYDNDINEFVFEFTWRNIGCILKDEELPLYDGMDKIWKVRTHFTRYMRNAEKNKYVEIDGTEVLKELIRKNHPDMIGGKIDVDRLTSEEVKKVFEIFTLYTNGYIPRMDDAESGYMSPACDWNNFGTIRYDEMTALQLAKKSSLMIGKVKSGKDWKDMNVSRVEWLNHVLKADW

SEQ ID NO: 1175 - protein, 1259 aa, unidentified; identical to SEQ ID NO: 1172
  REGION 1..1259: note = Description of Unknown: uncultivated organism sequence
  REGION 1..1259: note = Category: MG61 effectors
  REGION 1..1259: note = Description: MG61-12 effector

SEQ ID NO: 1176 - protein, 1259 aa, unidentified
  REGION 1..1259: note = Description of Unknown: uncultivated organism sequence
  REGION 1..1259: note = Category: MG61 effectors
  REGION 1..1259: note = Description: MG61-13 effector
MDFTKFQKLNSIIKTCSFEMIPIGKTRETMEKHNVIEEDAERKSNAELTKEVSDSFIREFIADYKEDMDWKDLYDAYGEDRARFTDIMNQKAEKLAKRFSDSFNEYINTFLKANGINDKKSKWSDSGYVDVVLPLYVSIHPDFSNDKYERAVASLLHCSNSLFKKYTTSYARIIAGTKKGSFADRSMENFQTACANSVMFDLISRNLSSVGSHDAFKEVFADAPLNMNEYLSQKGISRYNEFVGDSFDESGQVIRYGVNHYINEWNQTHPDERMPKMHKLKKQILSIVEPSFRIRTINDETELFGTFDNIRTAEQRYAGMLESILENMNTADIYDKSGILVTSAERDSLANAITGEWSYFRRQIKEEEENRIREEYLQKKNRVKTKLTQKDNKQIEDALNKSIYSVADLNKMLGSDFGTIEEKLLDEYIRNKSKKESAYAQLVKTDFYDKKTIPAGDDVQRIQQYLDKVLSLTHIVRGLCADSQNPRTDFVFSDDVSSLEDDRVQIISCYNLIRNFVTKKREKTAKEKQIQLCFGRPAHFEQVWNNKQEGKFGNVDAALLEYAGKYYYMVPAAKNEAKLNFPVTDEPQMGECYNYLATKKAIGFAKAFAKFYIKSPEAMEGFEKTEEPFEISVGNDTMIISRKVYEDYEAKTFRESEEAKNKLIDCAKEFLSKNLSYCIYDWSVLKEANDYVNYGEFCNEVDSIAFRVINRYVSKKLVDDAVERGNLYMFEISSLDMYKDSSRMKNIMALRFNQIMNGMFTGDKSIIINNAPQIRYRPVVIEKKDVHPVGSRLVNKNTTDGRTIPGDVYLELCAYYNGKKDSLSPETSLYNEKVSVKDSDRAHIKDKHYTEEKFLITFSYTANKNVASATSGYQLNEMVRKEIRENGCNIMAVIRGIDNLLYYAVVDENGNRIEAGDLNVVGDTDFYEKLTILGKQRYTDQKNWKHENKVADLKDTYLGQVCRKIASIAVKNNAVIVIDKINESTKRKNAAFDNNMYRKFENALVNSLTDYYDIGIRGDEPGSVKNPLQLTVKEDNGFQNGIIFYQFDTFTKNICMRTGFVNLLNTFEIKTVASKVAFLKKLSGIYYDNDINEFVFEFTWRNIGCILKDEELPLYDGMDKIWKVRTHFTRYMRNAEKNKYVEIDGTEVLKELIRKNHPDMIGGKIDVDRLTSEEVKKVFEIFTLYTNGYIPRMDDAESGYMSPACDWNNFGTIRYDEMTALQLAKKSSLMIGKVKSGKDWKDMNVSRVEWLNHVLKADW

SEQ ID NO: 1177 - protein, 1259 aa, unidentified
  REGION 1..1259: note = Description of Unknown: uncultivated organism sequence
  REGION 1..1259: note = Category: MG61 effectors
  REGION 1..1259: note = Description: MG61-14 effector
MDFTKFQKLNSSIKTCSFEMIPIGKTRETMEKHNVIEEDAERKSNAELTKEVSDSFIREFIADYKEDMDWKDLYDAYGEDRARFTDIMNQKAEKLAKRFSDSFNEYINTFLKANGINDKKSKWSDSGYVDVVLPLYVSIHPDFSNDKYERAVASLLHCSNSLFKKYTTSYARIIAGTKKGSFADRSMENFQTACANSVMFDLISRNLSSVGSHDAFKEVFADAPLNMNEYLSQKGISRYNEFVGDSFDESGQVIRYGVNHYINEWNQTHPDERMPKMHKLKKQILSIVEPSFRIRTINDETELFGTFDNIRTAEQRYAGMLESILENMNTADIYDKSGILVTSAERDSLANAITGEWSYFRRQIKEEEENRIREEYLQKKNRVKTKLTQKDNKQIEDALNKSIYSVADLNKMLGSDFGTIEEKLLDEYIRNKSKKESAYAQLVKTDFYDKKTIPAGDDVQRIQQYLDKVLSLTHIVRGLCADSQDPRTDFVFSDDVSSLEDDRVQIISCYNLIRNFVTKKREKTAKEKQIQLCFGRPAHFEQVWNNKQEGKFGNVDAALLEYAGKYYYMVPAAKNEAKLNFPVTDEPQMGECYNYLATKKAIGFAKAFAKFYIKSPEAMEGFEKTEEPFEISVGNDTMIISRKVYEDYEAKTFRESEEAKNKLIDCAKEFLSKNLSYCIYDWSVLKEANDYVNYGEFCNEVDSIAFRVINRYVSKKLVDDAVERGNLYMFEISSLDMYKDSSRMKNIMALRFNQIMNGMFTGDKSIIINNAPQIRYRPVVIEKKDVHPVGSRLVNKNTTDGRTIPGDVYLELCAYYNGKKDSLSPEASLYNEKVSVKDSDRAHIKDKHYTEEKFLITFSYTANKNVASATSGYQLNEMVRKEIRENGCNIMAVIRGIDNLLYYAVVDENGNRIEAGDLNVVGDTDFYEKLTILGKQRYTDQKNWKHENKVADLKDTYLGQVCRKIASIAVKNNAVIVIDKINESTKRKNAAFDNNMYRKFENALVNSLTDYYDIGIRGDEPGSVKNPLQLTVKEDNGFQNGIIFYQFDTFTKNICMRTGFVNLLNTFEIKTVASKVAFLKKLSDIYYDNDINEFVFEFTWRNIGCILKDEELPLYDGMDKIWKVRTHFTRYMRNAEKNKYVEIDGTEVLKELIRKNHPDMIGGKIDVDRLTSEEVKKVFEIFTLYTNGYIPRMDDAESGYMSPACDWNNFGTIWYDEMTALQLAKKSSLMIGKVKSGKDWKDMNVSRVEWLNHVLKADW

SEQ ID NO: 1178 - protein, 848 aa, unidentified
  REGION 1..848: note = Description of Unknown: uncultivated organism sequence
  REGION 1..848: note = Category: MG61 effectors
  REGION 1..848: note = Description: MG61-15 effector
MLGSDFGTIEEKLLDEYIRNKSKKESAYAQLVKTDFYDKKTIPAGDDVQRIQQYLDKVLSLTHIVRGLCADSQDPRTDFVFSDDVSSLEDDRVQIISCYNLIRNFVTKKREKTAKEKQIQLCFGRPAHFEQVWNNKQEGKFGNVDAALLEYAGKYYYMVPAAKNEAKLNFPVTDEPQMGECYNYLATKKAIGFAKAFAKFYIKSPEAMEGFEKTEEPFEISVGNDTMIISRKVYEDYEAKTFRESEEAKNKLIDCAKEFLSKNLSYCIYDWSVLKEANDYVNYGEFCNEVDSIAFRVINRYVSKKLVDDAVERGNLYMFEISSLDMYKDSSRMKNIMALRFNQIMNGMFTGDKSIIINNAPQIRYRPVVIEKKDVHPVGSRLVNKNTTDGRTIPGDVYLELCAYYNGKKDSLSPEASLYNEKVSVKDSDRAHIKDKHYTEEKFLITFSYTANKNVASATSGYQLNEMVRKEIRENGCNIMAVIRGIDNLLYYAVVDENGNRIEAGDLNVVGDTDFYEKLTILGKQRYTDQKNWKHENKVADLKDTYLGQVCRKIASIAVKNNAVIVIDKINESTKRKNAAFDNNMYRKFENALVNSLTDYYDIGIRGDEPGSVKNPLQLTVKEDNGFQNGIIFYQFDTFTKNICMRTGFVNLLNTFEIKTVASKVAFLKKLSDIYYDNDINEFVFEFTWRNIGCILKDEELPLYDGMDKIWKVRTHFTRYMRNAEKNKYVEIDGTEVLKELIRKNHPDMIGGKIDVDRLTSEEVKKVFEIFTLYTNGYIPRMDDAESGYMSPACDWNNFGTIRYDEMTALQLAKKSSLMIGKVKSGKDWKDMNVSRVEWLNHVLKADW

SEQ ID NO: 1179 - protein, 1259 aa, unidentified; identical to SEQ ID NO: 1167
  REGION 1..1259: note = Description of Unknown: uncultivated organism sequence
  REGION 1..1259: note = Category: MG61 effectors
  REGION 1..1259: note = Description: MG61-16 effector

SEQ ID NO: 1180 - protein, 1259 aa, unidentified; identical to SEQ ID NO: 1172
  REGION 1..1259: note = Description of Unknown: uncultivated organism sequence
  REGION 1..1259: note = Category: MG61 effectors
  REGION 1..1259: note = Description: MG61-17 effector

SEQ ID NO: 1181 - protein, 519 aa, unidentified
  REGION 1..519: note = Description of Unknown: uncultivated organism sequence
  REGION 1..519: note = Category: MG61 effectors
  REGION 1..519: note = Description: MG61-16 effector
MYRTACFKLRVHPHDRRRLATALARWSAGMGEALDRARADQRALLRTLRPRGAGRSAPPGDGMGSDRPARFEVDSRALHARVLGYCRGLPRDLHSALAMALIVAVEGLLGSWLALYAEWLTSGKPAGRKPGFPTVAAGTARGARERWEAALDASRTVLTRAEEDRWRAAVTREARERRMPLYFGAAQSGVRPGHLAHCGLIRRADRKWFAALTLWPKGDPLGETPRRAGNRANRGPLANVRSREEYLPGRATSTMLVPIEMGTGPGRRRKRWERLFPGRGTPKSALLVERDGEYYLHVEFEYPRREPRPTSGAVLALLRGVHTLVAGVLLDARGRRLATTAIDGRDLMRTISALTRLRAIRQRKGRSLAGDRRAARVAEHVLYSAGHQIIDLACRHGAEIVLLEDPGRRRPTPLLRYKHFSRLAEILVQLTEEAGLPPARVRRIYGPSLTCTACGWAPGEPVRVEEAPAPACPGCGRDRELPFHAAELLALDTLRLRTGRKETRPTLPNYVKSVRRNVP

SEQ ID NO: 1182 - protein, 1259 aa, unidentified; identical to SEQ ID NO: 1167
  REGION 1..1259: note = Description of Unknown: uncultivated organism sequence
  REGION 1..1259: note = Category: MG61 effectors
  REGION 1..1259: note = Description: MG61-17 effector

SEQ ID NO: 1183 - protein, 369 aa, unidentified
  REGION 1..369: note = Description of Unknown: uncultivated organism sequence
  REGION 1..369: note = Category: MG61 effectors
  REGION 1..369: note = Description: MG61-18 effector
MAVIRGIDNLLYYAVVDENGNRIEAGDLNVVGDTDFYEKLTILGKQRYTDQKNWKHENKVADLKDTYLGQVCRKIASIAVKNNAVIVIDKINESTKRKNAAFDNNMYRKFENALVNSLTDYYDIGIRGDEPGSVKKPLQLTVKEDNGFQNGIIFYQFDTFTKNICMRTGFVNLLNTFEIKTVASKVAFLKKLSGIYYDNDINEFVFEFTWRNIGCILKDEELSLYDGMDKIWKVRTHFTRYMRNAEKNKYVEIDGTEVLKELIRKNHPDMIGGKIDVDRLTSEEVKKVFEIFTLYTNGYIPRMDDAESGYMSPACDWNNFGTIRYDEMTALQLAKKSSLMIGKVKSGKDWKDMNVSRVEWLNHVLKADW

SEQ ID NO: 1184 - protein, 350 aa, unidentified
  REGION 1..350: note = Description of Unknown: uncultivated organism sequence
  REGION 1..350: note = Category: MG61 effectors
  REGION 1..350: note = Description: MG61-19 effector
MSDSIVRCTTLSVASPVEGSWEALWRDLHACWAQTTAASNWLMTELAKADHQRLPGDAKLPPMPATYFYPKLTQLFPDLDTRTCASLERAVKRKYKAVLYQVLWQHAASLPTYRYPTPYPVHNQAWRPSWDQGNRPLVSLPLGRGAEKRWQLRLKGGPNFARQVALFRQFVEGAALKSEAKIYRRGNALLVGLVGRFPPPLLSERTRLMRVLTSSTCLWVVEIEGQEPRYWNHDDLRRLCISHRAYLQRIAEDSKYELRLPPGKLRHIREKRQERCQKHQRRIHTSLHQLTAQLVGLAERQKVARVIYTDHDKSWLPLFPWSELRRLLAYKLQGLGITFGGGDEDPNAHN

SEQ ID NO: 1185 - protein, 410 aa, unidentified
  REGION 1..410: note = Description of Unknown: uncultivated organism sequence
  REGION 1..410: note = Category: MG61 effectors
  REGION 1..410: note = Description: MG61-20 effector
MDFTKFQKLNSIIKTCSFEMIPIGKTRETMEKHNVIEEDAERKSNAELTKEVSDSFIREFIADYKEDMDWKDLYDAYGEDRARFTDIMNQKAEKLAKRFSDSFNEYINTFLKANGINDKKSKWSDSGYVDVVLPLYVSIHPDFSNDKYERAVASLLHCSNSLFKKYTTSYARIIAGTKKGSFADRSMENFQTACANSVMFDLISRNLSSVGSHDAFKEVFADAPLNMNEYLSQKGISRYNEFVGDSFDESGQVIRYGVNHYINEWNQTHPDERMPKMHKLKKQILSIVEPSFRIRTINDETELFGTFDNIRTAEQRYAGMLESILENMNTADIYDKSGILVTSAERDSLANAITGEWSYFRRQIKEEENRIREEYLQKKNRVKTKLTQKDNKQIEDALNKSIYETVSSFV

SEQ ID NO: 1186 - protein, 379 aa, unidentified
  REGION 1..379: note = Description of Unknown: uncultivated organism sequence
  REGION 1..379: note = Category: MG61 effectors
  REGION 1..379: note = Description: MG61-21 effector
MPEYLAISIPFSVHGESARLIWFTAWLSKLCAHRLLNDVKSNEVLINFSQTGFLGYARRRCYDLLPNRRYIDGITTLVHSTLKSTKRLRVDVKSLELKHWLLFQSEAEKEKKGNLNIRLLTLERAEVLVLNSNSESKRIIVELRTPKSYVKLLKTIMEKAWRNEIGYPARIVIKESNFYPGDVHLYCNLQVMVPYSVYVEVMKKHSKPLSNLVGGVDINVDRLNLTIVDRYGRLRDVKTFWFREVTARGYEKKPAWTKIHQAIHDMLSYAYHHGVSLLALESPEIIGYLRYYWVRNGDRGSRNYNYKVSIFRNRVIEAVSYKASLYAVDVAYVDPKGTTSSKEHDEVMKRYGLDRHSASAYLIALRGIEKHILTQKDTI

SEQ ID NO: 1187 - protein, 363 aa, unidentified
  REGION 1..363: note = Description of Unknown: uncultivated organism sequence
  REGION 1..363: note = Category: MG61 effectors
  REGION 1..363: note = Description: MG61-22 effector
MSYITIALPFNVGGEVAGRILSTAWLFKAATHRVLHLAKSSPALPGSDIGWKATFRKDAYAVIPNRRYADGAVVLVRGIYESCRELGVDFRGVELGDWLMFQQAEKEYPARNITLRPGGEVYVTTISYSGAVERVVLKPTVPKSYATLLEKILEERQEHAARVVIKGYGVRKGVVWISGEGQLTIPLTFYYRHMARYRANKGSLYGGVDVNVDRVNLAIIDNSGELRDTYTFWFREVVARGYPRRSARSVIGMRVHEMLEYAYHHGVKVLFLENPAVLGRLRLLWARSTERRSENYNWKVSAFRSSIIEMIALKAPLYGIEVAYVDPKGTSNSREHSEAMKKLRLDRHATSAYLIALRGVAKK

SEQ ID NO: 1188 - protein, 1262 aa, unidentified
  REGION 1..1262: note = Description of Unknown: uncultivated organism sequence
  REGION 1..1262: note = Category: MG61 effectors
  REGION 1..1262: note = Description: MG61-23 effector
MKYHKYTKLNSTIKSATFELVPVGKTRDFLELHDVIKEDSERKAKVVLVKEVSDTFIVEFLRNYNNAGICDWENLHKIYNSATCTEIRGCIEKEKEKIAKDLNSALNAYIESFLKYNDINCSDVGWNKKSYVEVALPLYAKSVPDFNTDEYEDALASMKESSSAMFKKCRATYERIINGTNHGSIADRVIENFETFLANKLLYEKILETATGFENDETFTNVSQFGKYLSQNGIDKYNSTIGDFYNSSGELIKRGVNSRITEWNQSNPDNKLPKLQKLKKQILVDREKMFTIETIENKSDFNKTLNTVLILDEKITIETTKLLTSILAKDMYNTEGVYVTRAGGSYIANGLTGSWDYFEAIKTDAITKTVKDKLLTDYFNAKGKVKTNLTKADEKEIEKATKDFSYTIAELDRMLAGTDYITVEEMLIKKLEELKSRKKESYHLMTTCAFWNNDNKPTQDENGVIQKYLDDVLAVVRFTKIFSIDVKLTNADTIFMEDVAGMDKDKHGINKTYNMIRNYLTKKTELDAKQRRVQLCFGRPTHFEQKWNLMHGDKGIFGNCDAGLLEKDGCYYYIVPASKNGEKLNIHVSDCEDEADSYNMLSTKKGMGFLKMLIKCTLKSKSAIAKYKETDEPFELPIGDETITISKKMAEDYANKKHSKSKEELIKVIDFAKEFIAKHPSFKRYDLSSLKESSAYDNLKQFSDEVDSLCFAVTRLYVSKEQIDDAVEKGNLYMFMITSQDMYKSADKKHNIYSIRFNAIMKSMFEAGNHIIVNNSPSIYYRPALIEAEDKHPAGSILVNKLTTEGKTIPGEIYLELCAFYNGKCDKLSPLASVYNEKVSVKESTFPHIKDKHYTEEKFSITLSYKMNTNVVGNTSVFTLNNLVQEDIRENGCNIMSVIRGMDNLLYYCIVDSGNKRIASGNLNTIGNADYYEKLCVLGTQRYIDAKNWKYEKKVAELKETYLRQICRKIIKIAIENNAVICIDKVSDLRKNKLSAFDNQVYKKFENTLITALANYYDTSIPNTEAGGSLNPLQLAVEGADTMQNGILFHVAETNTRNICMKTGFINLMSTFGISTVKAKMEYLKKVSRIYYDSKADDFVFEFTWRNLGCCLKKDELPLYNGLDKVWQLHTHLTRLKWNKEKSQYEEIDGTELIKAIRRSHSDMIGKDIEVDMLSSKEIQTLYDVFILYANGFMPKEFMEDTSSYDSPIVPWSSVGRIEYDEMTAYQLCRKASLTMEKIKKGLSSKELVVYRTEWLNYLLEN

SEQ ID NO: 1189 - protein, 1262 aa, unidentified
  REGION 1..1262: note = Description of Unknown: uncultivated organism sequence
  REGION 1..1262: note = Category: MG61 effectors
  REGION 1..1262: note = Description: MG61-24 effector
MKYRKYTKLNSTIKSATFELVPVGKTRDFLELHDVIKEDSERKAKVALVKEVSDAFIVEFLRNYNNAGICDWENLHKIYNSATRTEIRGCIEKEKEKIAKDLNSALNAYIESFLKYNDINCSDVGWNKKAYVEVALPLYAKSVPDFNTDEYEDALASMKASSSAMFKKCRATYERIINGTNRGSVADRVIENFETFLANKLLYEKILETATGFENDETFTNVSQFGKYLSQNGVDKYNSTIGDFYNSSGELIKRGINSRITEWNQSNPDNKLPKLQKLKKQILVDREKMFTIETIENKADFNKTLNTILILDEKITIETTKLLTSILAKDMYNTEGVYVTRAGGSYIANGLTGSWDYFEAIKTDAITKTVKDKLLTDYFNAKGKVKTNLTKADEKEIEKATKDFSYTIAELDRMLAGTDYTTVEEMLIKKLEKLKSRKNESYRLMTTCSFWNNDNKPTQDENGVIQKYLNDVLAVVRLTKIFSIDVKLANADTIFMEDVAGMDEDKHGVNKAYNMIRNYLTKKTELDAKQRRVQLCFGRPTHFEQKWNLMQEDKGIFGNCDAGLLEKDGCYYYIVPASKNGGKLNIHVSDFEDEVDSYNMLSTKKGMGFLKMLIKCTLKSKSAIAKYKETDEPFELPIGVETITISKKMAEDYANKKYSKSKEELIKVIDFAKEFIAKHPSFKRYDLSSLKESSAYDNLKQFSDEVDSLCFAITRLYVPKEQIDDAVEKGNLYMFMITSQDMYKSADKKRNVYSIRFNAIMKSMFEAGNHIIVNNSPSIYYRPALIEAEDKHPVGSILVNKLTTEGKTIPGEIYLELCAFYNGKCDKLSPLASVYNEKVSVKESTFPHIKDKHYTEEKFSITLSYKMNTNVVGNTSVFTLNNLVQEDIRENGCNIMSVIRGMDNLLYYCIVDSDNNRIASGNLNTIGNADYYEKLYVLSTQRYIDAKNWKYEKKVAELKETYLRQVCRKIIKIAIENNAVICIDKVSDLRKNKLSAFDNQVYKKFENTLINALANYYDTSLPNTEAGGSLNPLQLAVEGADTMQNGILFHVAETNTRNICMKTGFINLMSTFGISTVKAKMEYLKKVSRIYYDSKADDFVFEFTWRNLGCCLKKDELPLYNGVDKVWQLHTHLTRLKWNKEKSQYEEIDGTKLIKTIRRSHPDMIGKDIEVDMLSSKEIQTLYDIFILYANGFMPKEFAEDTSSYDSPIVPWSSVGRIEYDAMTAYQLCRKASLTMEKIKKGLSSKELVVYRTEWLNYLLEN

SEQ ID NO: 1190 - protein, 358 aa, unidentified
  REGION 1..358: note = Description of Unknown: uncultivated organism sequence
  REGION 1..358: note = Category: MG61 effectors
  REGION 1..358: note = Description: MG61-25 effector
MSQCQINSSVVDASALVEYATITGKLIPVSSEDYMKLARLAWSFRRAVQVAVRMIARGVEDSAVLKELRKTLNKAYADSAFKLAKAIVKGCIATGGNPRKAEIRKLFIVSDGESSRLGNRNIRLEDTGLVKVKYPYEGSWLVFRAQFEEEHTPLLRELVELAKQKRASYRAKIVFRDGKAYLHVSVPIELYLKHFKKGEAKGSLIAGFDLNSDRINLAIIDEYGRLVDTRTEWFPEVTSPGFPRGKAKALRLRALAKLLRYCYVHGVGAVVFENLFTVKRRRFTRSRSANRKMSKFAKRKLLQHAIVMSLKYGFKVLLVDPKGTTSSPEHAEIMKTHGLDRHTASAYLIAVRALGQNK

SEQ ID NO: 1191 - protein, 375 aa, unidentified
  REGION 1..375: note = Description of Unknown: uncultivated organism sequence
  REGION 1..375: note = Category: MG61 effectors
  REGION 1..375: note = Description: MG61-26 effector
MELPKYITLTIDFHVSGDYARNILSTAWLSKLVAHRVLRLIKENEVLADLSEYKFLKILRSKCYDILPNRRYVDGILKLVHSTLKSAKALEVNMKDIGLKQWLLFQSDGERGYARGNMNIRFIGTHRVRVLTLGYDKKTRYIELKVPTPKGWKKLIEVLVNRAFDGQIGYPARVVVKDYGIGKHGLHVHGEVQVMVPYSLYLDVMRRYDKPRGDKIAGVDVNVERLDAVVIDRHGNLLSYGTFWLKNATFMGVRRKRSWSLVGEKIHALLKWLYSQGVSVVGLENPEVIGYLRYYWIRNGERRESRWNWKVSMFRNSIIERITWKAPLYSIKPTYVNPKNTSKEGERIGRRLGLDRHLGSAYIMAKRTLKSLQRP

SEQ ID NO: 1192 - protein, 1258 aa, unidentified
  REGION 1..1258: note = Description of Unknown: uncultivated organism sequence
  REGION 1..1258: note = Category: MG61 effectors
  REGION 1..1258: note = Description: MG61-27 effector
MEFTKYTRSNKIVRSVIFEMSPIGNTRAAIKEHGVIEEDAVRKSNAVLIKEVSDNFIREFLNDDKLEKYDWVEWEDLCLLIDDKPAFDAKAEKMKESIATSISKSFDSYINRFMAANGKANGKYSWKSAGYIDEVIPMYILCHPDYQDEKYTLAAESLKHASSAMFKKYFVSYERILNGTKTGSIAYRVMENVLIFCTNSKMYKKFAAKISGADLFAKIADITVLEDLISQNGIDFYNEMIGDLYDKDGQLIRKGFNSRINEYNSTHPDDKIPYLKKMKKQILSYVEPFFTIDKIESKEDLDNILTSVRATEESLTENLKTLFSNLLSNDKFPLDRILLTSAARSTIANSLAGRWDYFENIIREKETDKLKADYFEKKNRILTKLTKKDQKKINDAVTSNISSIADLNQMLHNVSEETVEDFLIKSLNKQISLKESSYSVLNNSGFMKSDSKPAWDDNQKIQDYLDHVIAISRMLKYFYTDLMNEKVDPIFVEELQMFDDSKDKIVKSYNMIRNYCTTKTELTAKEKRIQLCFGRPVHFEQTWNNKQEGKFGNLDAALLEFDGLYYYIVPAAKNKRKLNFPVTDIPQEGVNYHYLSTKKSIKLSMALPKMTFKSPAAVKKYAETEEPFTINIGNSTMTVSKKMYDDYNLKTFSSSPDARIALIDYAKEFISKEFSFKCYDYSSLKPSEEYRSYGEFCNEVDSITFSTTSKYVNKDLVDNAVMDGDLYMFLITSADMYKDREKNKDITAIRFNTIMQSMFTGDTSIIINNSPTIYYRPQIIEAVDKHPVGSILVNKMTTDGRTIPGEIYLELCDFYNGKKDYLSAEAKAYNENVSVKESSFPHIKDAHYTREMFTISLSYTLNKGVSNEKLGYALNDEIRRDIVKEGCNVMSIIRGINNLLYYCIVDQNGNQLKAGSLNIVGGVDYYEKLTLLSTQRYIDSKNWKYEKKSAELKDTYLGQVCREIAKIAIANNAIIVIDKLIDSIKNKAASFDNQVYKKFENRLISTLGNYYDVTLPDNEPGGSSNPLQLTVPDNTSIQNGIIFFIIDSGTKNICQETGYVNLLNTYNVNTVTAKAKFLSKISKIYFDADLNEFVFEFSWKDIGSINLKEDEEIPLYLGMNKVWKVRTHITRYKKNKEKRSYEEIDGTEIMKAVMKNYPDMIGKDIDITKLSSKDIQAVYEVFTYYANGFIPRIGNEDSEFISPVSTWTSIGNVPYDEMSAYQLAKKSLLGINKIQFAEDSGRYQYTPVSKVEWYNSLL

SEQ ID NO: 1193 - protein, 1262 aa, unidentified
  REGION 1..1262: note = Description of Unknown: uncultivated organism sequence
  REGION 1..1262: note = Category: MG61 effectors
  REGION 1..1262: note = Description: MG61-28 effector
MKYHKYTKLNSTIKSATFELVPVGKTRDFLELHDVIKEDSERKAKVVLVKEVSDTFIVEFLRNYNNAGICDWENLHKIYNSATCTEIRGCIEKEKEKIAKDLNSALNAYIESFLKYNDINCSDVGWNKKSYVEVALPLYAKSVPDFNTDEYEDALASMKASSSAMFKKCRATYERIINGTNHGSIADRVIENFETFLANKLLYEKILETATGFENDETFTNVSQFGKYLSQNGIDKYNSTIGDFYNSSGELIKRGVNSRITEWNQSNPDNKLPKLQKLKKQILVDREKMFTIETIENKSDFNKTLNTVLILDEKITIETTKLLTSILAKDMYNTEGVYVTRAGGSYIANGLTGSWDYFEAIKTDAITKTVKDKLLTDYFNAKGKVKTNLTKADEKEIEKATKDFSYTIAELDRMLAGTDYITVEEMLIKKLEELKSRKKESYHLMTTYAFWNNDNKPTQDENGVIQKYLDDVLAVVRFTKIFSIDVKLTNADTIFMEDVAGMDKDKHGINKTYNMIRNYLTKKTELDAKQRRVQLCFGRPTHFEQKWNLMHGDKGIFGNCDAGLLEKDGCYYYIVPASKNGEKLNIHVSDCEDEADSYNMLSTKKGMGFLKMLIKCTLKSKSAIAKYKETDEPFELPIGDETITISKKMAEDYANKKYSKSKEELIKVIDFAKEFIAKHPSFKRYDLSSLKESSAYDNLKQFSDEVDSLCFAVTRLYVSKEQIDDAVEKGNLYMFMITSQDMYKSADKKHNIYSIRFNAIMKSMFEAGNHIIVNNSPSIYYRPALIEAEDKHPADSILVNKLTTEGKTIPGEIYLELCAFYNGKCDKLSPLASVYNEKVSVKESTFPHIKDKHYTEEKFSITLSYKMNTNVVGNTSVFTLNNLVQEDIRENGCNIMSVIRGMDNLLYYCIVDSGNKRIASGNLNTIGNADYYEKLCVLGTQRYIDAKNWKYEKKVAELKETYLRQICRKIIKIAIENNAVICIDKVSDLRKNKLSAFDNQVYKKFENTLITALANYYDTSIPNTEAGGSLNPLQLAVEGADTMQNGILFHVAETNTRNICMKTGFINLMSTFGISTVKAKMEYLKKVSRIYYDSKADDFVFEFTWRNLGCCLKKDELPLYNGLDKVWQLHTHLTRLKWNKEKSQYEEIDGTELIKAIRRSHSDMIGKDIEVDMLSSKEIQTLYDVFILYANGFMPKEFMEDTSSYDSPIVPWSSVGRIEYDEMTAYQLCRKASLTMEKIKKGLSSKELVVYRTEWLNYLLEN

SEQ ID NO: 1194 - protein, 1258 aa, unidentified
  REGION 1..1258: note = Description of Unknown: uncultivated organism sequence
  REGION 1..1258: note = Category: MG61 effectors
  REGION 1..1258: note = Description: MG61-29 effector
MEFTKYTRSNKIVRSVTFEMSPIGNTRAAIKEHGVIEEDAVRKSNAVLIKEVSDNFIREFLNDDKLEKYDWVEWENLCLLIDDKPAFDAKAEKMKESIAAALSKSFDSYINRFMAANGKANGKYSWKSAGYIDEVIPMYILCHPDYQDEKYTLAAESLKHASSAMFKKYFVSYERILNGTNAGSIAYRVMENVLIFCTNSKMYKKFAAKISGADLFAKIADITVLEDLISQNGIDFYNEMIGDLYDKDGQLIRKGFNSRINEYNSTHPDDKIPYLKKMKKQILSYVEPFFTIDKIESKEDLDNILTSVRATEESLTESLKTLFSNLLSNDKFSLDRILLTSAARSTIANSLAGRWDYFENVIREKETDKLKADYFEKKNRILTKLTKKDQKKINDAVTSNISSIADLNHMLHNISEETVEDFLIKSLNKQISLKESSYSVLNNCGFMKSDSKPAWDDNQKIQDYLDHVIAISRMLKYFYTDLMNEKVDPIFVEELQMLDGSKDKIVKSYNMIRNYCTTKTELTAKEKRIQLCFGRPVHFEQTWNNKQDGKFGNLDAALLEFDGLYYYIVPAAKNKRKLNFPVTDIPQEGVNYHYLSTKKNIKLSMALPKMTFKSPAAVKKYAETEEPFTINIGNSTMTVSKKMYDDYNLKTFSSSPDARIALIDYAKEFISKEFSFKCYDYSSLKPSEEYRSYGEFCNEVDSITFSTTSKYVNKDLVDNAVMDGDLYMFLITSANMYKDREKNKDITAIRFNTIMQSMFTGDTSIIINNSPIIYHRPQIIEAEDKHPVGSILVNKMTTDGRTIPGEIYLELCDFYNGKKDHLSAEAKVYNENVSVKESSFPHIKDAHYTREMFTISLSYTLNKGVSNEKLGYALNDEIRRDIVKEGCNVMSIIRGINNLLYYCIVDQNGNQLKAGSLNIVGGVDYYEKLTLLSTQRYIDSKNWKYEKKSAELKDTYLGQVCREIAKIAIANNAIIVIDKLIDSIKNKAASFDNQVYKKFENRLISTLGNYYDVTLPDNEPGGSSNPLQLTVPDNTSIQNGIIFFIIDSGTKNICQETGYVNLLNTYNVNTVTAKAKFLSKISKIYFDADLNEFVFEFSWKDIGSINLKEDEEIPLYLGMNKVWKVRTHITRYKKNKEKRSYEEIDGTEIMKAVMKNYPDMIGKDIDITKLSSKDIQAVYEVFTYYANGFIPRIGNEDSEFISPVSTWTSIGNVPYDEMSAYQLAKKSLLGINKIQFTEDSGRYQYTPVSKVEWYNSLL

SEQ ID NO: 1195 - protein, 363 aa, unidentified
  REGION 1..363: note = Description of Unknown: uncultivated organism sequence
  REGION 1..363: note = Category: MG61 effectors
  REGION 1..363: note = Description: MG61-30 effector
MSYITVSLSFNTNSDAAKRLLSTAWLFKIATHRVLDLARQTPVLPATDIGWKNMFRGVAYEAVPNRRYADGAITLIRSIYESCRVLGIDFRSVELGNWLMFQQSEMEYPVRNVTLREGYEFHITVIDYGGSTSRVIIKPTIPKGYRLLLDKILEERQEHTGRVVINGYGVRDNNVWVHGEVQLTIPIEFYYRHMVRYEQNNGRLFGGVDVNVDRINLTIVDEGGELRDVKTFWFEEASRKGVTRHRAWSVIGMAVHAMLDYAYHHGVKTLFLENPDILGRLKLMWIRNGDRRHENYNYRVATFRNSVIEMIVMKAPLYGINVEYVNPKGTTSSEDHDEVMKAYGLDKHTASAYLIVLKGLKQS

SEQ ID NO: 1196 - protein, 1262 aa, unidentified
  REGION 1..1262: note = Description of Unknown: uncultivated organism sequence
  REGION 1..1262: note = Category: MG61 effectors
  REGION 1..1262: note = Description: MG61-31 effector
MQYHKYTKLNSTIKSATFELVPVGKTRDFLELHDVIKEDSERKAKVVLVKEVSDTFIVEFLRNYNNAGICDWENLHKIYNSATCTEIRGCIEKEKEKIAKDLNSALNAYIESFLKYNDINCSDVGWNKKSYVEVALPLYAKSVPDFNTDEYEDALASMKASSSAMFKKCRATYERIINGTNHGSIADRVIENFETFLANKLLYEKILETATGFENDETFTNVSQFGKYLSQNGIDKYNSTIGDFYNSSGELIKRGVNSRITEWNQSNPDNKLPKLQKLKKQILVDREKMFTIETIENKSDFNKTLNTVLILDEKITIETTKLLTSILAKDMYNTEGVYVTRAGGSYIANGLTGSWDYFEAIKTDAITKTVKDKLLTDYFNAKGKVKTNLTKADEKEIEKATKDFSYTIAELDRMLAGTDYITVEEMLIKKLEELKSRKKESYHLMTTCAFWNNDNKPTQDENGVIQKYLDDVLAVVRFTKIFSIDVKLTNADTIFMEDVAGMDKDKHGINKTYNMIRNYLTKKTELDAKQRRVQLCFGRPTHFEQKWNLMHGDKGIFGNCDAGLLEKDGCYYYIVPASKNGEKLNIHVSDCEDEADSYNMLSTKKGMGFLKMLIKCTLKSKSAIAKYKETDEPFELPIGDETITISKKMAEDYANKKHSKSKEELIKVIDFAKEFIAKHPSFKRYDLSSLKESSAYDNLKQFSDEVDSLCFAVTRLYVSKEQIDDAVEKGNLYMFMITSQDMYKSADKKHNIYSIRFNAIMKSMFEAGNHIIVNNSPSIYYRPALIEAEDKHPAGSILVNKLTTEGKTIPGEIYLELCAFYNGKCDKLSPLASVYNEKVSVKESTFPHIKDKHYTEEKFSITLSYKMNTNVVGNTSVFTLNNLVQEDIRENGCNIMSVIRGMDNLLYYCIVDSGNKRIASGNLNTIGNADYYEKLCVLGTQRYIDAKNWKYEKKVAELKETYLRQICRKIIKIAIENNAVICIDKVSDLRKNKLSAFDNQVYKKFENTLITALANYYDTSIPNTEAGGSLNPLQLAVEGADTMQNGILFHVAETNTRNICMKTGFINLMSTFGISTVKAKMEYLKKVSRIYYDSKADDFVFEFTWRNLGCCLKKDELPLYNGLDKVWQLHTHLTRLKWNKEKSQYEEIDGTELIKAIRRSHSDMIGKDIEVDMLSSKEIQTLYDVFILYANGFMPKEFMEDTSSYDSPIVPWSSVGRIEYDEMTAYQLCRKASLTMEKIKKGLSSKELVVYRTEWLNYLLEN

SEQ ID NO: 1197 - protein, 1232 aa, unidentified
  REGION 1..1232: note = Description of Unknown: uncultivated organism sequence
  REGION 1..1232: note = Category: MG61 effectors
  REGION 1..1232: note = Description: MG61-32 effector
MDYAKFTKQGKLIKGIKLELVPQGNTRDAISEYKIVEADQQLADMVKEVVMAGNEFYKDFIKQIVGHMDGADWQAYGEAVENKATEQKTYDEAVKSISASIKNAILGTAELYGGKKTLFAKDFITIVLRKYVETAENFPYNRERILTCIDVLSDKNVLFKTPYVKWEHIIFGESKGSIAERMLSNFDIFYDNKNKYAALKEATAITDFDDFFTDYASYTRYVGQDGIELYNSAIRGIYSESGAKISEGINEYINKLKMKHPELHVNMLKKLQKQILSNSEPLFKVATIQNAEELKGIMNKVKVTEESVLSSAKELLVHMETSDLHDLYISGQRLYFVCQKIAKDGGILEELIFNNECSRVEKLTEKKKEEIRGAIVKHDYSFAYIDSLLSEYAEKTVKMVINEELQKLIATVVSSGASYDSITINPKWKAIPDKEITVIREYLESFVELNKFLKCLQVRDSDVYPDFKTYATLNVLVDELGALNKAYNMVRNFVTKKVNDKDGKTRLCFGRGALLERGWNRKNQAVDWLGNIDHMLLTKDGKYYYAVPAPVKRKTKIYISDTKPSDEVYEYMEISKQSSFLKTFARLFTSLGLKNIGDANDITMDLGNGSMTVTKEFLVKYKDGECKKNTDFMHKSIDIAKEFLTKHYSYATFNFSELKKTEDYTSFYEFANDVDKYTYAVKTKYIDAAIIDKAVEDKELLLFMLSSMDLYKSQEKCKDITALYTRYFFSEENRKKADIWLNANPAIYYRKPLIKFEKTHPAGSILVRKTYEDKDGITHIVPDNVYMSLYNYYNKNTPLNEEAMQYVDLVEHHVAVQDYVKDARYTREMFTINLSFTLNGNAGDAAQAYTINNMVKEEIKAKMPRMLTVVRGYRNLLEYCITDETGKVFESGNFNTIGEINFKEKLEDLDRARKADAQNWKYEKTVVNIKESYLGMVTSSIVKKAVAYNAIINVEQLSDAFKDKRSCMDNQVFKKFEEKLVSKLACYYDKAKAPTEPGGYLNPLQLASPNCLSNTQNGILFYVSPAYTNEVCPKSNFINLLDFSAAKTLKAKREFLRKMNEICYDAEHEAFHFSFCYDDMPIKLPVKEKKELNDKTNQEFGKHIWTVYINGVRTEYNKKERKLVELNGTEILGKECAKNNVMLTDHMDVDSMPNSVVNEMIHIFQKYSFGEVAQKDVYYVSPVSPQAEPICTPGELRLKNMSEKGYMILHNIVAGKEKFAVNKMEWLEEKLG

SEQ ID NO: 1198 - protein, 1262 aa, unidentified
  REGION 1..1262: note = Description of Unknown: uncultivated organism sequence
  REGION 1..1262: note = Category: MG61 effectors
  REGION 1..1262: note = Description: MG61-33 effector
MKYHKYTKLNSTIKSATFELVPVGKTRDFLELHDVIKEDSERKAKVVLVKEVSDTFIVEFLRNYNNAGICDWENLHKIYNSATCTEIRGCIEKEKEKIAKDLNSALNAYIESFLKYNDINCSDVGWNKKSYVEVALPLYAKSVPDFNTDEYEDALASMKASSSAMFKKCRATYERIINGTNHGSIADRVIENFETFLANKLLYEKILETATGFENDETFTNVSQFGKYLSQNGIDKYNSTIGDFYNSSGELIKRGVNSRITEWNQSNPDNKLPKLQKLKKQILVDREKMFTIETIENKSDFNKTLNTVLILDEKITIETTKLLTSILAKDMYNTEGVYVTRAGGSYIANGLTGSWDYFEAIKTDAITKTVKDKLLTDYFNAKGKVKTNLTKADEKEIEKATKDFSYTIAELDRMLAGTDYITVEEMLIKKLEELKSRKKESYHLMTTCAFWNNDNKPTQDENGVIQKYLDDVLAVVRFTKIFSIDVKLTNADTIFMEDVAGMDKDKHGINKTYNMIRNYLTKKTELDAKQRRVQLCFGRPTHFEQKWNLMHGDKGIFGNCDAGLLEKDGCYYYIVPASKNGEKLNIHVSDCEDEADSYNMLSTKKGMGFLKMLIKCTLKSKSAIAKYKETDEPFELPIGDETITISKKMAEDYANKKHSKSKEELIKVIDFAKEFIAKHPSFKRYDLSSLKESSAYDNLKQFSDEVDSLCFAVTRLYVSKEQIDDAVEKGNLYMFMITSQDMYKSADKKHNIYSIRFNAIMKSMFEAGNHIIVNNSPSIYYRPALIEAEDKHPAGSILVNKLTTEGKTIPGEIYLELCAFYNGKCDKLSPLASVYNEKVSVKESTFPHIKDKHYTEEKFSITLSYKMNTNVVGNTSVFTLNNLVQEDIRENGCNIMSVIRGMDNLLYYCIVDSGNKRIASGNLNTIGNADYYEKLCVLGTQRYIDAKNWKYEKKVAELKETYLRQICRKIIKIAIENNAVICIDKVSDLRKNKLSAFDNQVYKKFENTLITALANYYDTSIPNTEAGGSLNPLQLAVEGADTMQNGILFHVAETNTRNICMKTGFINLMSTFGISTVKAKMEYLKKVSRIYYDSKADDFVFEFTWRNLGCCLKKDELPLYNGLDKVWQLHTHLTRLKWNKEKSQYEEIDGTELIKAIRRSHSDMIGKDIEVDMLSSKEIQTLYDVFILYANGFMPKEFMEDTSSYDSPIVPWSSVGRIEYDEMTAYQLCRKASLTMEKIKKGLSSKELVVYRTEWLNYLLEN

SEQ ID NO: 1199 - protein, 1535 aa, unidentified
  REGION 1..1535: note = Description of Unknown: uncultivated organism sequence
  REGION 1..1535: note = Category: MG61 effectors
  REGION 1..1535: note = Description: MG61-35 effector
MEKKILGLDLGTNSIGWAVVNASFNMEDNRLKLENYMGIDDCGVRIFPEGVEPNTIGKGDREQSRNATRRDKRQMRRQFYRKRLRRIKLLELLVEQGMCPLDMELLKQWKNWDRKKKSEGRVFPETSEFLSWLHLNPYELRARALNEPLTFLELGRVFYHLIHRRGFLTSRKGKGNEDGTIFTKGKPDENILPVEETRKMMGNSTLGKTLYDIMVKPNEPFSINRNSDGKEIRVRGRYTVRDMYILEFERIWLAQAKFSPELNHRKVWVVRTRLLKGNIANKRNQKRLMLLEQKYGRDALTIDEGKHGIHKVTTRQQLDLKYYLAGDITILSEGDAISVQFKSNESVLFWQRPLRSQKSLLANCRFENELPVISANNQYLVKNCKIQTRSKKPCPLSHPEFERFRALQFVNNIKYGKDNRLTSEQREKVMAFINKNDASFTFDKIVKELKLNYEKFNYENDFKVTGNYTHKKVMTLFKPEIWAANSETIWHYFYFYDDNNMLTQRLSEKGFGQFADTDVKNIRLKDGYSNVSLKAIRNIMPFLEKGYTYDRAVILGGVRNAFGRRWEYFNAVQDQLEREIRSLLNGKHKEGAVIELIKDYLIDNNYGFVKNDPHFAHLYHHSQDVEQAEELSDFVPNVENLRNPIVQQGVNETRRLVNSLLKRYRKSDPNFQFARIHIEMGRELRNSRSQRQQMSDSIRENAQKNDEARERLAGFGLKPSRENVQKYLLAKEIELRAGRLVCPYTGRALGMNDVLGGRNLIQIEHIIPYSISLDDNFGNKTLCDAKFNQMKGEKTPYQFFCENQDPHLWGIRKYHNPMDGWEEISERAFRVLPFPKAKRFTSKSDFEAAGFIERQLNDTRYIARKTMEIMGHVCSDVRVMPGQLTAELRRLWGLNNVLQETQKVDFSGLSIQAEKAVPCYLFTDSDGKTISIVPKQSDYPETADYELVIGGKVVKGVFELRQAGFLMSAPEMPDGRYWVRLKVNSDISLLPVAADQPLPDVNHISFRGRVENRQFNNDNTGKVKTSEPDGTYFARFGIIRASFIAPERKNEPKAGKGQVLLYGTVNNGTFKCYIYTCPCDMPDGKYWILLDLDMTNVEFIRAFNERPTAGGNQLVIMASVTDGGLLSLDDDPRYVVPINADAGRYYATLDIEPISAELFPMDRAIPQFEKGQQLTEGTVWVDEHTGEIRFDPKKNRDDHRHHAIDAITIALTEQRFLQYMSTRNAQLKDKMRGKLNSTEKLPVPWMGFEDDVAKAANGILVSHKQNNKTLTKNRRGFSVRGQLHKESVFGKRKAPFAHEDGYHIRAKITELENNKHVAKVVDVTIRKLIEDHLKHQCGVDVANAKGYKIPKDAFFKNGEWQLFLPNKNGAPVPIKKVRICENIGNAMPLKDNVNQYVNPRNNHHVLIYKDANGELKEEVVMFWTVAERRLQGLPIYQLPEDGQSIVTTMEINDMFLVGLSPEDIMANWRNKALLSRCLYRVQKLSQMDFTFRHHLASTINDDDQGCRIASMKLWKEKNPIKVKLDETGQLTLVTQ

SEQ ID NO: 1200 - protein, 1264 aa, unidentified
  REGION 1..1264: note = Description of Unknown: uncultivated organism sequence
  REGION 1..1264: note = Category: MG61 effectors
  REGION 1..1264: note = Description: MG61-36 effector
MEDRYMDFTKFQKLNSIIKTCSFEMVPIGKTRETMEKHNVIEEDAERKSNAELTKEVSDSFIREFIADYKEDMDWKDLYDAYGEDRARFTDIMNQKAEKLAKRFSDSFNEYINTFLKANGINDKKSKWSDSGYVDVVLPLYVSIHPDFSNDKYERAVASLLHCSNSLFKKYTTSYARIIAGTKKGSFADRSMENFQTVCANSVMFDLISRNLSSVECHDAFKEVFADAPLNMNEYLSQKGISRYNEFVGDSFDENGQVIRYGVNHYINEWNQTHPDERMPKMHKLKKQILSIVEPSFRIRTINDETELFGTFDNIRTAEQRYAGMLESILENMNTADIYDKSGILVTSTERDSLANAITGEWSYFRRQIKEEEENRIREEYLQKKNRVKTKLTQKDNKQIEDALNKSIYSVADLNKMLGSDLGTIEEKLLDEYIRNKSKKESAYAQLVKTDFYDKKTIPAGDDVQRIQQYLDKVLGLTHIVRGLCADSQDPRTDFVFSDDVSSLEDDRVQIVSCYNLIRNFVTKKREKAAKEKQIQLCFGRPAHFEQVWNNKQEGKFGNVDAALLEYAGKYYYMVPAAKNEEKLNFPVTDEPQTGECYNYLATKKAIGFAKAFAKFYIKSPEAMEGYKKTDEPFEISVGNDTMLISKKVYEDYEAKIFRESEEAKNKLIDCAKEFLSKNLSYCIYDWSELKEAKNYVNYGEFCNEVDSIAFRVINRYVSKKLVDDAVESGNLYMFEISSLDMYKDSSRMKNIMALRFNQIMNGMFTGDKSIIINNAPQIRYRPVVIEKKDVHPVGSRLVNKNTTDGRTIPGDVYLELCAYYNGKKDSLSPEASLYNEKVSVKDSDRAHIKDKHYTEEKFLITFSYTANKNVASATSGYQLNEMVRKEIRENGCNIMAVIRGIDNLLYYAVVDENGNRIEAGDLNVVGDTDFYEKLTILGKQRYADQKNWKHENKVADLKDTYLGQVCRKIASIAVKNNAVIVIDKINERTKRKNAAFDNNMYRKFENALVNSLTDYYDIGIRGDEPGSVKNPLQLTVKEDNGFQNGIIFYQFDTFTKNICMETGFVNLLNTFEIKTVASKVAFLKKLSGIYYDNDINEFVFEFTWRNIGCILKDEELSLYDGMDKIWKVRTHFTRYMRNAEKNKYVEIDGTEVLKELIRKNHPDMIGGKIDVDRLTSEEVKKVFEIFTLYTNGYIPRMDDAESGYMSPACDWNNFGTIRYDEMTALQLAKKSSLMIGKVKSGKDWKDMNVSRVEWLNHVLKADW

SEQ ID NO: 1201 - protein, 1264 aa, unidentified
  REGION 1..1264: note = Description of Unknown: uncultivated organism sequence
  REGION 1..1264: note = Category: MG61 effectors
  REGION 1..1264: note = Description: MG61-37 effector
MEDRYMDFTKFQKLNSIIKTCSFEMIPIGKTRETMEKHNVIEEDAERKSNAELTKEVSDSFIREFIADYKEDMDWKDLYDAYGEDRARFTDIMNQKAEKLAKRFSDSFNEYINTFLKANGINDKKSKWSDSGYVDVVLPLYVSIHPDFSNDKYERAVASLLHCSNSLFKKYTTSYARIIAGTKKGSFADRSMENFQTACANSVMFDLISRNLSSVGSHDAFKEVFADAPLNMNEYLSQKGISRYNEFVGDSFDESGQVIRYGVNHYINEWNQTHPDERMPKMHKLKKQILSIVEPSFRIRTINDETELFGTFDNIRTAEQRYAGMLESILENMNTADIYDKSGILVTSAERDSLANAITGEWSYFRRQIKEEEENRIREEYLQKKNRVKTKLTQKDNKQIEDALNKSIYSVADLNKMLGSDFGTIEEKLLDEYIRNKSKKESAYAQLVKTDFYDKKTIPAGDDVQRIQQYLDKVLSLTHIVRGLCADSQDPRTDFVFSDDVSSLEDDRVQIISCYNLIRNFVTKKREKTAKEKQIQLCFGRPAHFEQVWNNKQEGKFGNVDAALLEYAGKYYYMVPAAKNEAKLNFPVTDEPQMGECYNYLATKKAIGFAKAFAKFYIKSPEAMEGFEKTEEPFEISVGNDTMIISRKVYEDYEAKTFRESEEAKNKLIDCAKEFLSKNLSYCIYDWSVLKEANDYVNYGEFCNEVDSIAFRVINRYVSKKLVDDAVERGNLYMFEISSLDMYKDSSRMKNIMALRFNQIMNGMFTGDKSIIINNAPQIRYRPVVIEKKDVHPVGSRLVNKNTTDGRTIPGDVYLELCAYYNGKKDSLSPEASLYNEKVSVKDSDRAHIKDKHYTEEKFLITFSYTANKNVASATSGYQLNEMVRKEIRENGCNIMAVIRGIDNLLYYAVVDENGNRIEAGDLNVVGDTDFYEKLTILGKQRYTDQKNWKHENKVADLKDTYLGQVCRKIASIAVKNNAVIVIDKINESTKRKNAAFDNNMYRKFENALVNSLTDYYDIGIRGDEPGSVKNPLQLTVKEDNGFQNGIIFYQFDTFTKNICMRTGFVNLLNTFEIKTVASKVAFLKKLSDIYYDNDINEFVFEFTWRNIGCILKDEELPLYDGMDKIWKVRTHFTRYMRNAEKNKYVEIDGTEVLKELIRKNHPDMIGGKIDVDRLTSEEVKKVFEIFTLYTNGYIPRMDDAESGYMSPACDWNNFGTIRYDEMTALQLAKKTSLMIGKVKSGKDWKDMNVSRVEWLNHVLKADW

SEQ ID NO: 1202 - protein, 1264 aa, unidentified
  REGION 1..1264: note = Description of Unknown: uncultivated organism sequence
  REGION 1..1264: note = Category: MG61 effectors
  REGION 1..1264: note = Description: MG61-38 effector
MEDRYMDFTKFQKLNSIIKTCSFEMIPIGKTRETMEKHNVIEEDAERKSNAELTKEVSDSFIREFIADYKEDMDWKDLYDAYGEDRARFTDIMNQKAEKLAKRFSDSFNEYINTFLKANGIKDKKSKWSDSGYVDVVLPLYVSIHPDFSNDKYERAVASLLHCSNSLFKKYTTSYARIIAGTKKGSFADRSMENFQTACANSVMFDLISINLSNVGSHDAFKEVFADAPLNMNEYLSQKGISRYNEFVGDSFDESGQVIRYGVNHYINEWNQTHPDERMPKMHKLKKQILSIVEPSFRIRTINDETELFGTFDNIRTAEQRYAGMLESILENMNTADIYDKSGILVTSAERDSLANAITGEWSYFRRQIKEEEENRIREEYLQKKNRVKTKLTQKDNKQIEDALNKSIYSVADLNKMLGSDFGTIEEKLLDEYIRNKSKKESAYAQLVKTDFYDKKTIPAGDDVQRIQQYLDKVLGLTHIVRGLCADSQDPRTDFVFSDDVSSLEDDRVQIISCYNLIRNFVTKKREKTAKEKQIQLCFGRPAHFEQVWNNKQEGKFGNVDAALLEYAGKYYYMVPAAKNEAKLNFPVTDEPQRGECYNYLATKKAIGFAKAFAKFYIKSPEAMEGFEKTEEPFEISVGNDTMIISRKVYEDYEAKTFRESEEAKNKLIDCAKEFLSKNLSYCIYDWSGLKETKDYVNYGEFCNEVDSIAFRVINRYVSKKLVDDAVERGNLYMFEISSLDMYKDSSRMKNIMALRFNQIMNGMFTGDKSIIINNAPQIRYRPVVIEKKDVHPVGSRLVNKNTTDGRTIPGDVYLELCAYYNGKKDSLSPEASLYNEKVSVKDSDRAHIKDKHYTEEKFLITFSYTANKNVASATSGYQLNEMVRKEIRENGCNIMAVIRGIDNLLYYAVVDENGNRIEAGDLNVVGDTDFYEKLTILGKQRYTDQKNWKHENKVADLKDTYLGQVCRKIASIAVKNNAVIVIDKINERTKRKNAAFDNNMYRKFENALVNSLTDYYDIGIRGDEPGSVKNPLQLTVKEDNGFQNGIIFYQFDTFTKNICMRTGFVNLLNTFEIKTVASKVAFLKKLSGIYYDNDINEFVFEFTWRNIGCILKDEELSLYDGMDKIWKVRTHFTRYMRNAEKNKYVEIDGTEVLKELIRKNHPDMIGGKIDVDRLTSEEVKKVFEIFTLYTNGYIPRMDDAESGYMSPACDWNNFGTIRYDEMTALQLAKKSSLMIGKVKSGKDWKDMNVSRVEWLNHVLKADW

SEQ ID NO: 1203 - protein, 1264 aa, unidentified
  REGION 1..1264: note = Description of Unknown: uncultivated organism sequence
  REGION 1..1264: note = Category: MG61 effectors
  REGION 1..1264: note = Description: MG61-39 effector
MEDRYMDFTKFQKLNSIIKTCSFEMIPIGKTRETMEKHNVIEEDAERKSNAELTKEVSDSFIREFIADYKEDMDWKDLYDAYGEDRARFTDIMNQKAEKLAKRFSDSFNEYINTFLKANGINDKKSKWSDSGYVDVVLPLYVSIHPDFSNDKYERAVASLLHCSNSLFKKYTTSYARIIAGTKKGSFADRSMENFQTACANSVMFDLISRNLSSVGSHDAFKEVFADAPLNMNEYLSQKGISRYNELVGDSFDESGQVIRYGVNHYINEWNQTHPDERMPKMHKLKKQILSIVEPSFRIRTINDETELFGTFDNIRTAEQRYAGMLESILENMNTADIYDKSGILVTSAERDSLANAITGEWSYFRRQIKEEEENRIREEYLQKKNRVKTKLTQKDNKQIEDALNKSIYSVADLNKMLGSDFGTIEEKLLDEYIRNKSKKESAYAQLVKTDFYDKKTIPAGDDVQRIQQYLDKVLSLTHIVRGLCADSQDPRTDFVFSDDVSSLEDDRVQIISCYNLIRNFVTKKREKTAKEKQIQLCFGRPAHFEQVWNNKQEGKFGNVDAALLEYAGKYYYMVPAAKNEAKLNFPVTDEPQMGECYNYLATKKAIGFAKAFAKFYIKSPEAMEGFEKTEEPFEISVGNDTMIISRKVYEDYEAKTFRESEEAKNKLIDCAKEFLSKNLSYCIYDLSVLKEANDYVNYGEFCNEVDSIAFRVINRYVSKKLVDDAVERGNLYMFEISSLDMYKDSSRMKNIMALRFNQIMNAMFTGDKSIIINNAPQIRYRPVVIEKKDVHPVGSRLVNKNTTDGRTIPGDVYLELCAYYNGKKDSLSPEASLYNEKVSVKDSDRAHIKDKHYTEEKFLITFSYTANKNVASATSGYQLNEMVRKEIRENGCNIMAVIRGIDNLLYYAVVDENGNRIEAGDLNVVGDTDFYEKLTILGKQRYTDQKNWKHENKVADLKDTYLGQVCRKIASIAVKNNAVIVIDKINESTKRKNAAFDNNMYRKFENALVNSLTDYYDIGIRGDEPGSVKNPLQLTVKEDNGFQNGIIFYQFDTFTKNICMRTGFVNLLNTFEIKTVASKVAFLKKLSGIYYDNDINEFVFEFTWRNIGCILKDEELPLYDGMDKIWKVRTHFTRYMRNAEKNKYVEIDGTEVLKELIRKNHPDMIGGKIDVDRLTSEEVKKVFEIFTLYTNGYIPRMDDAESGYMSPACDWNNFGTIRYDEMTALQLAKKSSLMIGKVKSGKDWKDMNVSRVEWLNHVLKADW

SEQ ID NO: 1204 - protein, 1253 aa, unidentified
  REGION 1..1253: note = Description of Unknown: uncultivated organism sequence
  REGION 1..1253: note = Category: MG61 effectors
  REGION 1..1253: note = Description: MG61-40 effector
MELNKFCRLNQSIKTCSLELVPIGRTRETIEKHNVIEEDSKRKENAVLAKEVSDSFIREFIADYKGDFDWSELVACFGKHEEYAGIKEKMEEKIAREFSDAFNGYISKFLKANGVGKADNKTKWSDASYIDVVLPLYASLHPDYDNPKYKEAIASICHCSSTIFKRYITAYEKIINGTKKGSFAERVMDNFQIICTNRLMCEIVFSKIKKADDFRLFLDAPESMNEYLSQKGIDQYNETIGDSFSEKGEILRYGLNHYINEWNQKNPDSRMPKLQKLKKQILSVAEPAFRIDVIDNEKELQETIKNIRAAEVRYSGKLKDILENLNYTNTYIHDGVLVKAAGRENLAKMITGEWNFFREQIREREERRIRDEYLQKKNRIKTKLTKKDEKQIEDTVSKGMYSLVDLNKMLGEEKANIESKLLDEYVKNRSEREKHYTVVANADFMSKESLPTSDEIKIIQNYLDKVIQMTHIIRCLDADAQNEKVDLVFLDDAAELEDDKTLIVTGYNLIRSFLTKKREKTAKEKAVQLCFGRPAHFEQKWNNKQAGKFGNVDAALLEENGKFYYIVPAAKNESKLNFPVTDEPQAGRCYNYLSTQKAIGFAKAFAKFTIKSPEAMSGYAKSEEPFEISVGNQKMTVSKKMYDSYEAKTFRDSEEEKIKLIDYAKEFLQKHGSYNTYDWSELRESKDYVNYGEFCSEVDSIAFRVVNRYISKDLVDDAVLRGDLYMFEITSQDMYKDKNRMKNIMALRFHAIMEGMKTGNKSIIINNAPQIRYRPQIIEAEDKHPAGSKLVNKKTTDGKTIPGDIYLELCDFYNGRKSSLSPEASLYNERVSVKVSDREHIKDKHYTAEKFLITLSYTMNKNVASNTSVYKLNEMIRNEIKENGCNIMSVIRGIDNLLYYAVIDENGNKIEAGDLNVVGDTDFNEMLSVVGTQRYIDQKNWKYEKKVAELKDTYLGQACRKIASIAVKNNAVIVIDKINENTKRKNAAFDNNVYRKFEDALVNTLSNYYDRSIKADEPGGISNPLQLCVNEDNNFQNGILFYTYDAFTKNICMDTGFINLLNTFNVKTVAAKLGFLKKMDGIYYDSDRQEFVFEFAWGKLGSVLKEEEAALYTGLDKSWKVRTHLTRYKRDRESGKYKEVDGTEILKKLIKEKHPDMIGEKINVDKLTSNEVQTVYEIFTLYVNGFIPRMDGESSEYMSPVSDWNSMSNIAYDEMTALQLARKGSLTIGRIKNGFEGKDINISRVDWLNEILR

SEQ ID NO: 1205 - protein, 1264 aa, unidentified
  REGION 1..1264: note = Description of Unknown: uncultivated organism sequence
  REGION 1..1264: note = Category: MG61 effectors
  REGION 1..1264: note = Description: MG61-41 effector
MEDIYMDFTKFQKLNSIIKTCSFEMIPIGKTRETMEKHNVIEEDAERKSNAELTKEVSDSFIREFIADYKEDMDWKDLYDAYGEDRARFTDIMNQKAEKLAKRFSDSFNEYINTFLKANGIKDKKSKWSDSGYVDVVLPLYVSIHPDFSSDKYERAVASLLHCSNSLFKKYTTSYARIIAGTKKGSFADRSMENFQTVCANSVMFDLISRNLSSVECHDTFKEVFADAPLNMNEYLSQKGISRYNEFVGDSFDESGQVIRYGVNHYINEWNQTHPDERMPKMHKLKKQILSIVEPSFRIRTINDETELFGTFDNIRTAEQRYAGMLESILENMNTADIYDKSGILVTSAERDSLANAITGEWSYFRRQIKEEEENRIREEYLQKKNRVKTKLTQKDNKQIEDALNKSIYSVADLNKMLGSDFGTIEEKLLDEYIRNKSKKESAYAQLVKTDFYDKKTIPAGDDVQRIQQYLDKVLSLTHIVRGLCADSQDPRTDFVFSDDVSSLEDDRVQIVTCYNLIRNFVTKKREKTAKEKQIQLCFGRPAHFEQVWNNKQEGKFGNVDAALLEYAGKYYYMVPAAKNEAKLNFPVTDEPQRGECYNYLATKKAIGFAKAFAKFYIKSPEAMEGFEKTEEPFEISVGNDTMIISRKVYEDYEAKTFRESEEAKNKLIDCAKEFLSKNLSYCIYDWSVLKEANDYVNYGEFCNEVDSIAFRVINRYVSKKLVDDAVERGNLYMFEISSLDMYKDSSRMKNIMALRFNQIMNGMFTGDKSIIINNAPQIRYRPVVIEKKDVHPVGSRLVNKNTTDGRTIPGDVYLELCAYYNGKKDSLSPEASLYNEKVSVKDSDRAHIKDKHYTEEKFLITFSYTANKNVASATSGYQLNEMVRKEIRENGCNIMAVIRGIDNLLYYAVVDENGNRIEAGDLNVVGDTDFYEKLTILGKQRYTDQKNWKHENKVADLKDTYLGQVCRKIASIAVKNNAVIVIDKINESTKRKNAAFDNNMYRKFENALVNSLTDYYDIGIRGDEPGSVKNPLQLTVKEDNGFQNGIIFYQFDTFTKNICMRTGFVNLLNTFEIKTVASKVAFLKKLSGIYYDNDINEFVFEFTWRNIGCILKDEELSLYDGMDKIWKVRTHFTRYMRNAEKNKYVEIDGTEVLKELIRKNHPDMIGGKIDVDRLTSEEVKKVFEIFTLYTNGYIPRMDDAESGYMSPACDWNNFGTIRYDEMTALQLAKKSSLMIGKVKSGKDWKDMNVSRVEWLNHVLKADW

SEQ ID NO: 1206 - protein, 371 aa, unidentified
  REGION 1..371: note = Description of Unknown: uncultivated organism sequence
  REGION 1..371: note = Category: MG61 effectors
  REGION 1..371: note = Description: MG61-42 effector
MSYITLCLPFNTNDSKAEKLFSTAWLFKTASHRMLTLAKQFPVLPATDIGWKNTFRKVIYEVISNRRYADGVIVLIRGVYESCRQLGIDFKDAELGDWLMFQQAEKEYPVRNITLRQGYEFHITTINYNGKPERITIKPTIPKNYKLLLEKIIEDKQKHTARIVVKDHGVRKDKLWVQGEVQLTIPLKFYYKYMVRFKRNYGRLYGGVDVNTDRINLAIVDKHGRLRDVKTFWFEDVSRKGYPRRRARVLIGMAVHEMLKYAYHHGVKTLFLENPDVLGKLKLLWIRNGRRLYKNYNWKVMTFRSSIVEIITIKAPLYAIKVDYVSPRGTTTSKQHDKLMRKYGLDRHTTSAYIIALKGMKRCTSIQNTTI

SEQ ID NO: 1207 - protein, 362 aa, unidentified
  REGION 1..362: note = Description of Unknown: uncultivated organism sequence
  REGION 1..362: note = Category: MG61 effectors
  REGION 1..362: note = Description: MG61-43 effector
MSPLYTIKLSFNEFGEKAKLLLSTAWLFKIACHKVLNKSKVLYENLVPSKIAWIKMFKDDAYSVIPNKRYSYGVVYLVYGVWESARKLGVDYRMVELSDWLMFQHYEREVSGNVIRVHGDGSALVTVYGYNGLKDRILIKAKPNKGQAQLLKAAVEENEKYMPKVVIRDYGVRDNTIYVRGEIHISLDYGFYAKHAQRFSEPKGNLIGGVDVNVDRINLAIVDEMGRLRDVKTFWFRETTARGYPRKRAWSIIGMRIHEMLKYAYHHGVKTIALENPDALGTLRLLWIRSGERRHENYNYKVALFRTSIIERIAMKALLYGMEVKYVDPKGTTSSREHNWIARAHGLDKHASSATLIALRSI

SEQ ID NO: 1208 - protein, 365 aa, unidentified
  REGION 1..365: note = Description of Unknown: uncultivated organism sequence
  REGION 1..365: note = Category: MG61 effectors
  REGION 1..365: note = Description: MG61-44 effector
MTYITLAFPFNVCCDVAKRFLSTAWLFKIAIHRLLSVAKQSPILPGTDIGWKNTFRRVAYEIIPNRRYADGVVTLVRSIYESCRQLGIDFKSVELSNWLMFQQSELEYPAKNITLKPSYEFHVTTVDYSKNTYRDVVKPIVPKSYKPLLEEILEERQKYTGRVVVKNYGIRKGNLWIRGEVQITVPIDFYYKHMVRCREPKGSLIGGIDVNVDRLNLAVIDERGNLRDSKTFWFSEATTRGFSRRSARSIIGAKIREMLSYAYHHSVKTLFLENPGVLGKLRLLWVKNGDRKHESYNYKVSVFRSSVTEMIAVKAPLYGIEAKYVDPKGTTSSKEHGEVAERCGLDRHVASAYLIALRGLRHQRI

SEQ ID NO: 1209 - protein, 374 aa, unidentified
  REGION 1..374: note = Description of Unknown: uncultivated organism sequence
  REGION 1..374: note = Category: MG61 effectors
  REGION 1..374: note = Description: MG61-45 effector
MKQINYITLRLPFHVTGEEARLIYWIAWLCKLCAHRLLNYVKENLLLADLSQYDFIKLGRKLCYDIIPNRRYVDGISTIVQASLQSAKALGADISKLELKPWLLFQSEAEPWARGNLNIQFKNYDVTKVLVFDNDKSSRKITIKPVIPKGYIKLVKTLVDKALKREVGYPARVYIRDYGDKLEYLYGELQVMVKYDFYIEVMKKYDKPLGNNIAGVDVNVDRLNLVVINRSGDIVWKYTTRFPHVTSRGFPRKRAWSIIGEKIHEILRNTYSHGASVIAVENPEIIGYLRYYWIRNGKRKTKNYNYKVSIFRNSMIERIIWKAPLYGLKVIPINPKGTTRSKDHEYVMRKYGLDRHVASAYLIALKARRNLQRP

SEQ ID NO: 1210 - protein, 372 aa, unidentified
  REGION 1..372: note = Description of Unknown: uncultivated organism sequence
  REGION 1..372: note = Category: MG61 effectors
  REGION 1..372: note = Description: MG61-46 effector
MYSQKLGKDIVITPNNSPITHVTIVGKLIISQPEDRMKLTRLAWSFKRVVEFMVREIISNRGVQEAVKRHHNVLPNYVYLESAYKHAKLIVEGCKRNNGNPRHVHVRKLFVISRGNRFDKGNRNIKLVPKGKFFEVHIKYPWGNSWLVCKAVFGEKYVPLLKELVILTERRVESYEAKIVFRRKRIELHVSIPLQLYLKYFSKTKPKGYGLLAGFDLNSDRINMVVIDENGRIITLRTEWFPEVTLHGYSRHKAKNTRLKALKKLLLHARRIGVDYVVFENLLTVKKNRRKRKLRSPHANRKKGKFAKKQLIIHGILMSLKLGLTPILINPKGTTHSKDHGEAMKRRGLDKHMASAYIIAYRDLKIIRNNEK

SEQ ID NO: 1211 - protein, 365 aa, unidentified
  REGION 1..365: note = Description of Unknown: uncultivated organism sequence
  REGION 1..365: note = Category: MG61 effectors
  REGION 1..365: note = Description: MG61-47 effector
MSYITLTLPFNISDSEAWRLLSTAWLFKIASHRMLSLAKQFPILPATDIGWKNTFRKIIYEVIPNRRYTDGVIVLVRGIYESCRQLGVNFKDVELGDWLMSQQAEKEYPVRNITLKQGYEFWITTVDYNGNSERIVIKPSIPKNYKLLLDRILEEKQKHTARVVIKDYGVRKNKLWIHGEIQLTIPLDFYHKYMTRYRRNYGKLYGGVDVNTDRINLAIVDEQGSLRDTYTFWFREVTARGYSRRKARSVIGMRVHEMLKYAYHHGVKTLFLENPEVLGKLKLLWIRNGKRLHKNYNWKVATFRSRILEMIAMKAPLYSIKVGYVDPKGTTNSKEHDEVMRKHRLDRHTASAYIIALRGLNHKFI

SEQ ID NO: 1212 - protein, 363 aa, unidentified
  REGION 1..363: note = Description of Unknown: uncultivated organism sequence
  REGION 1..363: note = Category: MG61 effectors
  REGION 1..363: note = Description: MG61-48 effector
MSVPRLSSVEELISHVTVIGKVIPETINDYMKLVRLAWSFKRVVDLMIREVINNAFMKDATKKLYQILPNYIYLESAYKHAKLIVEGCKFNNGNPKHVHVKKLFIVSRGNKYDKGNRNVKLIPDKGFFKALIKYPWDGSWIECRVLFGEKYIPLLKELLELTSKKKEGYGTRIVFRKSRIELHVSVPLHLYLKHFSAPRREGYGLVAGLDLNSDRANMVIIDSTARIVTMRTAWFPEVTLHGFPRDKARDVRLKKLRELLVFARRIGVDYIVFEDLFAVKKRSKVSSPSGNRKIVRFAKRQLLQHGLLMSLKLGLTPILVDPKGTTHSREHEEVMKKRGLDKHMASAYIIAYKGLKVIRNHEK

SEQ ID NO: 1213 - protein, 336 aa, unidentified
  REGION 1..336: note = Description of Unknown: uncultivated organism sequence
  REGION 1..336: note = Category: MG61 effectors
  REGION 1..336: note = Description: MG61-49 effector
MSYVTLVLPFNACCDEARKLLSTAWLFKVATHRMLSIAKQISALPATDIGWKSAFRKAVYEVIPNRRYTDGVITLVRSIYESCRQLGVDFKSVELGNWLMFQQSESEYPVRNITLKHGHEFHVTTISYNGSANRVIVKPTIPKNYRALLDKIIEEKQEHTARVVVKGFGVRKSVLWVHGEVHLTIPIEFYYGHVARYRKNGGRLYGGVDVNVDRINLTIVDEDGRLRDRKTFWFREVTARGCPRRRAWSAIGTRVHEMLSYAYHHGVKTIALENPNTLGALKLMWAKSGEKRHENYNYKVSIFRCKVVEMIAMKAPLYDIEVRCIDPRGDDPFKRT

SEQ ID NO: 1214 - protein, 376 aa, unidentified
  REGION 1..376: note = Description of Unknown: uncultivated organism sequence
  REGION 1..376: note = Category: MG61 effectors
  REGION 1..376: note = Description: MG61-50 effector
MSKSVAEYITLRLPFHVTGVDAKLIYWTAWLCKLCAHRLLEAIKLNPSLAYLSQYDFIKVGRRLCYDIIPNRRYVDGISTLIHASLQSAKALKVDITKLEPKHWLLFQSEAEPWAKGNLNIQFVDYDKVKVLVFDRDKSSRRIIIEPVIPKGYIRLVKALVDKALKKEIGYPARIYITDYGERLEHLYGEIQVMVKYNFYLEVMKRYDKPLGDNIAGVDVNVDRLNLVVINRDGDIVWKHTVRFPQITSRGCPRKRAWSIIGEAIHSILRNAYSHGASVVAVENPEVLGYLRYYWIKNGDRGTKNYNYRISIFRNSIIERIVWKAPLYGLHVVTVNPKGTTHSKDHEYVMRRYGLDRHTASAYLIALKTRRNLQRP

SEQ ID NO: 1215 - protein, 361 aa, unidentified
  REGION 1..361: note = Description of Unknown: uncultivated organism sequence
  REGION 1..361: note = Category: MG61 effectors
  REGION 1..361: note = Description: MG61-51 effector
MSTLRLSNVEELVPHVTVIGKLLPETPGDYMKLVRLAWSFRRAVELMIREVVNGTSMKDATKKVYYLLPNYVYLESAYKHAKLIIEGCRFNNGNPRHIHVRKLFIISRGNKYDKGNRNVEIIPSTKFFQVLIKYPWDGSWIECRAFFGEKYIPLLRELLELANQKREGYGARIVFREGRIELHISAPLFLYLKHFSLPERRGYGLLAGLDLNSDRINMVVIDSNGRIVAMKTAWFPELTLHGFPREKARDTRLKKLKELLSYARRIGVDYVAFENLFVMKKRGKVSSPSGNRKITRFAKKQLLQHGLLMTLKLGLSPILVDPKGTSHSREHKEVMKEKGLDRHMASAYIIAYRGLKAIRNH

SEQ ID NO: 1216 - protein, 355 aa, unidentified
  REGION 1..355: note = Description of Unknown: uncultivated organism sequence
  REGION 1..355: note = Category: MG61 effectors
  REGION 1..355: note = Description: MG61-52 effector
MSQFQISSTDASKLVTHVTIVGRLIPETDEDFVKLARLAHDFRKAVLYATRMIVKGIDANSILRELRSMLNKAYGDSAYKVAKAIVEGCKYSGGNPKHIKIRKLFIVSEGEASRLGNRNIRLESVDVVKIKYPYDSSWLTFKALFGEEYLQLVAELVELAKQKGVSYGARVVFRDGRIYLHLSVPLELYLKHFKKGEAREELIAGFDLNSDRVNMVIVDRFGRIRDVKTQWFTEVTSHGFPRNKAKTKRLEALAKLLRYAYHHNIGTVVFENLLAIKKRRYTSNSTANRKITRFAKRELLQHALVMAMKYGFKVKLVDPSGTTHSREHDEVMKRYGLDKHVASACLIALKELKQP

SEQ ID NO: 1217 - protein, 363 aa, unidentified
  REGION 1..363: note = Description of Unknown: uncultivated organism sequence
  REGION 1..363: note = Category: MG61 effectors
  REGION 1..363: note = Description: MG61-53 effector
MTYITLVFPFNVCCDVAERLLSTAWLFKIATHRLLNVVKHFPVLPATDIGWKNTFREIAYEIIPNRRYADGVVTLVRSIYESCRQFRIDLKSVELSNWLMFQQSELEHPARNITLKPGYEFHITTVDYNKNTYRDVVEPIIPKSYKPLLDKMLEERQKYTGRVAVKSYGIRKYNLWVRGEIQITIPTDFYYNHMTRYRKSKGSLIGGIDVNVDRLNLAIIDEKGNLRDCKTFWFSEAVARGFSRRSARSIIGAKIREMLSYAYHHNVKILFLENPEVLSKLKLLWVRNGDRKHENYNYKVSVFRSSVIEMIALKAPLYGIEAKYVNPKGTTNSEEHDEAMKRYGIDRHTASAYLIALRGLRNQ

SEQ ID NO: 1218 - protein, 374 aa, unidentified
  REGION 1..374: note = Description of Unknown: uncultivated organism sequence
  REGION 1..374: note = Category: MG61 effectors
  REGION 1..374: note = Description: MG61-54 effector
MNIVEYVTLRLPFHVAGEEARLVYWTAWLCKLCAHRLLSTVRQNPLLADLSQYDFIKIGRKLCYSIIPNRRYIDGISTLIHASLQSAKALGVEVTKLELKPWLIFQSEAEPWAKGNLNIQFTDYDKVRVLVFDRDKTSRKITIKPVIPEGYAKLVKALVDKALRKEIGYPARIYVRDYGDGLNHLYGELQIMVRYGFYLEVMKRYDKPLGSNIAGVDVNVDRINLVVINRAGDIVWKYTARFPEVMSRGCLRKKAWSIIGEAIHSVLKNAYSHGTSVIAVENPEIMGHLRYYWIRNGDRRTKNYNYKVSVFRNTVIERISWKAPLYGLHVIHINPRGTTHSEDHDYIMKRYGLDRHTASAYLIALKARRVLRRP

SEQ ID NO: 1219 - protein, 365 aa, unidentified
  REGION 1..365: note = Description of Unknown: uncultivated organism sequence
  REGION 1..365: note = Category: MG61 effectors
  REGION 1..365: note = Description: MG61-55 effector
MTYITLTFPFNVCCDVAKRFLSTAWLFKIATHRLLSIAKQSPVLPGTDIGWKSAFRGIAYEVIPNRRCADGVVTLVRSIYESCRQLRIDFKSVELSDWLMFQQSELEYPARNITLKPGYEFHITTVDYTKNTHRDVVKPTIPKSYKLLLDKMLEERQEYTGRVAIKSYGVEGGDLLVQGEVQITIPIDFYYKHVTRARANKGRLYSGVDVNVDRLNLAIVDGSGSLKDTHTLWFREVTARGFSKKSAGSIIGVKIREMLSYAYNHGVKTLFLENPDVLGKLKLLWVRSGDRMHENYNYRISVFRSSVIEMIALKAPLYGIEVKYVDPKGTTSSREHDEIVKRYGLDRHTASAYLIALRGLRHQRI

SEQ ID NO: 1220 - protein, 373 aa, unidentified
  REGION 1..373: note = Description of Unknown: uncultivated organism sequence
  REGION 1..373: note = Category: MG61 effectors
  REGION 1..373: note = Description: MG61-56 effector
MKVPRYITIRLPFHVDGNVASGIISTAWLSKVVAHRVLRIVKDNPLYLQLSETRFLKNLRNACYDVLPNRRYVDGVLKLVYSTLRSVQALGIDIRQIELKQWLLFQSDGEPQARGNLNIRLVEPYRVRILTFDYNKASEYVEFDVVLPKGWRKLVEELVERANRKEVGYPARIYVSDYGVGKNGLHVAGEVQIMAPCRLYQEVMKRYDTPRGDLVAGIDVNVERLDVAVVSPSGKLKLVKTFWLDGAVHMGVRRERAWSIIGEVIHKMLKWLYHSGVSTIVLENPEIIGYLRYYWIRNGERRGRKWNWKVSMFRSSIIERISWKAPLYAMEVRYVDPKGTTHSQDHDALMRRYGLDRHTASAYLIALKGLDRT

SEQ ID NO: 1221 - protein, 364 aa, unidentified
  REGION 1..364: note = Description of Unknown: uncultivated organism sequence
  REGION 1..364: note = Category: MG61 effectors
  REGION 1..364: note = Description: MG61-57 effector
MLHYQTNEVINAKTLISHVTIIGKLIPQTPNDFMKLVRLSYDFRKAVLYATRMISKGIKANEFLKELRGMLNKGYGDSAYKVAKSIVEGCRFNGGNPQHIKVEKLFIASEGETSRIGNRNVRLEATDRVKIKYPYDRTWLFFKVQFGKNYLPLVQEIVKLAKEKKTSYGAIIVFRDSRIYLHLSIPIDLYLKYFSKGSANGSLTAGFDLNADRINMVVVDGFGRIRDAKTEWFPEVTSHGFPRSKAKIKRLEALARLLDYAYHHNVGVVVFENLFIIKRRKFTKNSSANRKISRFTKKELLQYGIIMAMKYGFKVLLVNPKGTTHSKEHDEVMRKYGLDRHTASAYIIALRGMESHNLIRKAII

SEQ ID NO: 1222 - protein, 371 aa, unidentified
  REGION 1..371: note = Description of Unknown: uncultivated organism sequence
  REGION 1..371: note = Category: MG61 effectors
  REGION 1..371: note = Description: MG61-58 effector
MSYITLCLPFNVDGIEARKLLSIAWLFKIASHKMLSIAKQSPILPATDIGWKNTFRKTVYEVIPNRRYTDGVIVLIRGIYESCRQLGVNFKGVELGDWLMFQQAEKEYPVRNITLKQGHKFHITTIDYNGNPERITIKPTIPKNYKLLLEEIIEEKQKHTARVVVKDYGIRDSKLWVRGEIQLTIPLDFYYKHMTRYRRNYGRLYGGVDVNTDRINLAIVDKYGRLRDVKTLWYEDAPRKGYPRRKARVLISMAVHEMLKYAYYHGVKILSLENPNALGKLKLLWIKNGKRLHRNYNWKVMTFRSNIIEMVAMKAPLYSIKIEYVNPKGTTTSKEHDEVMWKYSLDRHTASAYLIALKGIERHTMIQKAII

SEQ ID NO: 1223 - protein, 349 aa, unidentified
  REGION 1..349: note = Description of Unknown: uncultivated organism sequence
  REGION 1..349: note = Category: MG61 effectors
  REGION 1..349: note = Description: MG61-59 effector
MRLVRLARDFRRAVLYATRMISKGIKVNDILKELRGMLNKAYGDSAYKVAKAIVEGCRFNGGEPQHVKIRRLFIVSEGEASRLGNRNVRIESTDLARIKYPYDKSWILLKVRFGKKYLPLIRELIELIKQRKVSFGARILFRDGKIYLHLSVPINLYLKYFSKGRAGGCLIAGFDLNSDRVNMVIIDRYGKIRDIKTGWFPEVTSHGYPRSKARAKRLEALAKLLRYAYHHNVGTVVFENLLTIKQRRCTGNPTANRKITKFAKRELLQYGIVMSMKYGFKTLLINPKGTTHSSEHNYIMRKHGLDKHTASAYLIALKGIESHMMIQKAVIYRFCPYTTTYTHSLVRSL

SEQ ID NO: 1224 - protein, 365 aa, unidentified
  REGION 1..365: note = Description of Unknown: uncultivated organism sequence
  REGION 1..365: note = Category: MG61 effectors
  REGION 1..365: note = Description: MG61-60 effector
MKYITLVMPFNVDGTKAKRLLSTAWLFKIASHRMLSLAKQFPILPTTDIGWKNAFRKIIYEIIPNRRYTDGVIVLVRSIYESCRQLGIDFKEVELGDWLMFQQVEKEYPVRNITLKQNYGFRIITIDYKYNTEKITVKPTISNNYRLILDKILEEKQKHTARIVVKDYGARREKVWIHGEIQLIVPLNFYYKYMTRYRKNYGKFYGGVDVNTDRINLVIVDKKGSLRDAYTFWFREITSRGFPRKKARTIIGMKIHEMLKYAYHHGVKILFLENPVILGKLKLLWIKNGMRLSKNYNWKVMTFRSSVTKIITMKAPLYNIRTKYVNPKGTTHSKEHDNIMKKYRLDKHMASAYLIALKGLDYGSV

SEQ ID NO: 1225 - protein, 373 aa, unidentified
  REGION 1..373: note = Description of Unknown: uncultivated organism sequence
  REGION 1..373: note = Category: MG61 effectors
  REGION 1..373: note = Description: MG61-61 effector
MNETYLTLRLPFNLCCDEARLLLSTARLFRHTALHLHSLILKENPRITSLIALKRMYRRRLQEILPNRRYVDGAITLVYSIYESAQALGVSFSDIEFKSWLLFQQSEKEHPCRNITLQKDYSFRITTINYQGVGKRISLKPTIPKNYKQTLGKIIGEKQPYVARIVLKGFGERKNMLWVHGEIHLSIPYRFYLEHFKRYKRNYGKLLGGVDVNVDRINLAIIDRYGRLRDVKTFWFEEASWKGCPRQRAWSIIGIAVHNMLRYAYHHGVKVLFLENPETLGYLKTLWIKKGERRSNNYNYRVQFFRNRIVERITMKTPLYSINIEYVNPKGTTHSREHDEVMRRYGLDRHTASAYLIALRGIEKHTIIQKAII

SEQ ID NO: 1226 - protein, 371 aa, unidentified
  REGION 1..371: note = Description of Unknown: uncultivated organism sequence
  REGION 1..371: note = Category: MG61 effectors
  REGION 1..371: note = Description: MG61-62 effector
MSYVTVTASFNASGDCAKLLLSTAWLFKIATHRVLAYAKSTPTLPGSKIGWKNTFRSVAYEVIPNRRYADSACTLVMGIYESVRRLGIDFREVELGDWLMFQQSEKEFPPRNITLKSEDEAWVTAFGYDGESRRLRLRISASGSFRRLLEAILREKQPYNPRITLKSWNVRGGELYVRGELQVSVPIDFYYRHLARCKTNSGRLYGGVDVNSDRINLAVVDGSGILRDARTIWFREVTARGYPRHRARTVIGMGVHEMLRYAYHHGVKTLFLEDPKVLGRLRLLWIRDGKRLHKNYNWRVSTFRVSIIEAIAVKAPLYSIRVEYIDPKGTTRSEEHDELMRRYGLDRHMASAYLIALRGMERYTTIQKATV

SEQ ID NO: 1227 - protein, 367 aa, unidentified
  REGION 1..367: note = Description of Unknown: uncultivated organism sequence
  REGION 1..367: note = Category: MG61 effectors
  REGION 1..367: note = Description: MG61-63 effector
MVYGLSYVTITAGFNARGEDAKLLLSTAWLFKIATHRVLGLAKSMPLLPASKISWKNTFREVAYEVIPNRRYADGVVVLVMGIYESCRQQGVDFREVELSNWLMFQQSEKEYPPRSITLKSVDEVWVTVLSYNGESSRIKLRVTTSGVFRKLIEMLLKEKQEYNPRVYIKTWNTRSGELYLRGELQIAVPLDFYYKHMVRRRENRGRLYAGVDVNVDRLNLAIVDERGELRDTKTFWFEEASRKGVSRRRARSILGMVVHEMLRYAYHHGVRTLFLENPEILGKLKLLWVRSGDRRGGNYNWRVNIFRSEVVEMIAVKAPLYAIDVKYVAPRGTTNSREHSEIMKKYRLDRHTSSAYLIALKGLKQT

SEQ ID NO: 1228 - protein, 361 aa, unidentified
  REGION 1..361: note = Description of Unknown: uncultivated organism sequence
  REGION 1..361: note = Category: MG61 effectors
  REGION 1..361: note = Description: MG61-64 effector
MNYITIQLPFNMNGKVAGELLSTAWLFRIAVHRVLTIAKQQEALPRSRIGWERAFHRIAYGATLQSDYADGAVVLVMGVYKSCRRLGIDFRRVELSDWLMFQPSKLSRKVGSIALKPNYEFHVTTVGYDGSYDRVVVRPGVSGAFRLVLDSVLDYGVEYMGRIVVRDYGVRGGQLWVRGGAHLTIPLLAYYKVMTRYLKNNGSLQGGVDVNVDRINLAIIDENGELRDTRTFWYREVASRGFPRGRAWSIIGMRIHELLNYARNNGVSVLYLENPGVIGRLRLMWVRNGDRGHENYNYKVSAFRSTIIEEIAMKAPLYSISVGYVNPRGTTSSKAHDELMRRYGLDRHTASAYLIALMGTR

SEQ ID NO: 1229 - protein, 373 aa, unidentified
  REGION 1..373: note = Description of Unknown: uncultivated organism sequence
  REGION 1..373: note = Category: MG61 effectors
  REGION 1..373: note = Description: MG61-65 effector
MPRYVTIGLDFHVDGEDAKAILSTAWLSKLVAHRVLNLVKENELLAGLSEYMFLKVMRRKCYSILPNRRYVDGMLKLIHSIIKSAKALGVDIESIELKQWLLFQSDGERGYARGNMNIKLIDTHHARVLTLDYTGKTRYEELKLTTPKGWNKLVESLIERASRGEIGYPVRLVIRDYGIGKHGLHVHGEVQVMAPYTLYLEVMRRYEEPRGKNIAGIDVNVGRLDAVVVDEHGNLLSYRTFWIKNATFMGVRRRRSRSLIGEQIHALLKWLYSQGVSIIGLENPEVIGYLRYYWVRSGERRGNMWNWKISMFRNSIIERLTWKAPLYSMKTIYVNPRNTSKEGKRIGKKLGLDRHLGSAYIIARRTLKNLQRP

SEQ ID NO: 1230 - protein, 376 aa, unidentified
  REGION 1..376: note = Description of Unknown: uncultivated organism sequence
  REGION 1..376: note = Category: MG61 effectors
  REGION 1..376: note = Description: MG61-66 effector
MNKSEVEYITLRLPFHAIGEYARLVYWTAWLCKLCAHRLLDMVKQNPLLANLSQYNFIKIGRKLCYDIIPNRRYIDGISTLIHASLQSAKALKVDIAKLELKPWLLFQSEAEPWAKGNLNIQFTSYNTVRVLVFEKDKSTRKITIKPVIPKGYTRLVQTLVDKALRKQIGYPARVYITDYGDKVEHLYGEIQVMVKHDFYLEVMKRYEKPLGNNIAGVDVNADRLNLVVINRNGDIVWRYTARFPQATSRGYPRKSAWSVIGEAIHSILNNAYSHGASVIAVENPEIIGYLRYYWVRNGERRTKNYNYKVTIFRNSIIEKIIWKSPLYGLQVVTVNPKGTTHSEDHEYVMRRYGLDKHTASAYLIALRARRNLHRP

SEQ ID NO: 1231 - protein, 375 aa, unidentified
  REGION 1..375: note = Description of Unknown: uncultivated organism sequence
  REGION 1..375: note = Category: MG61 effectors
  REGION 1..375: note = Description: MG61-67 effector
MGLPRYVTVALDFHVDGKEAEAVLSTAWLSKLVAHRVLNLVKKNELLVDLSEYRFLESLRSKCYNILPNRRYVDGVLKLVHSTLKSAKALGVDIKNIELKQWLLFQSDGERGYARGNMNIRLLDPNTVRVLTIGYSKEAKYVELKVSTPKGWRRLIETLVGRALNGQVGYPARVVVKDYGVGKNGLHVHGEVQAMVPYKLYLEVMRRYSRPRGSNIAGIDVNVERLDAVTIDVCGNILSYKTFWIKNATYMGIKRKRAWSLIGEQIHALLKWLYSQGTSIIGLENPEVIGYLRYYWIRNGERKGGKWNWKVSMFRSSIIERITWKTLLYSMKTTYINPRNTSKEGEKIGKKLGLDRHLGSAYIIAKRTLKRLQRP

SEQ ID NO: 1232 - protein, 360 aa, unidentified
  REGION 1..360: note = Description of Unknown: uncultivated organism sequence
  REGION 1..360: note = Category: MG61 effectors
  REGION 1..360: note = Description: MG61-68 effector
MSQYQTSSSVTGASTLIEYVTIAGKLIPISNEDYVKLARLAWSFRRAVQVATRMVVKGMDSNDVLKELRRMLNKAYADSAFKLAKAIVKGCITNGGNTLHVEIRKLFIISEGESDRCGNRNVRLEDTALVKVRYPYDGSWIILRAEFGEEYLSLLRELVELARQKRASYNAGIAFRDGGIYIRISVPIQLYLKHFKKGDALGELVAGFDVNSDRVNLAIIDKYGRLVDVRAEWFPEATSPGFPREKARELRVRALAKLLRYCYTHGVGTVVFENLYDVRKRRFTKSKTANRKISRFAKRELLHYAIVMSLKYGFKVLLADPKGTTSSAEHGRFMMKHGLDRHTASAYLIALRGLAHQIIK

SEQ ID NO: 1233 - protein, 373 aa, unidentified
  REGION 1..373: note = Description of Unknown: uncultivated organism sequence
  REGION 1..373: note = Category: MG61 effectors
  REGION 1..373: note = Description: MG61-69 effector
MNETYLTLRLPFNACDVEAGMLLSTAHLFRQVVLHLHNLILKENPRITSLIALKRMYRKRLQEILPNRRYVDGAITLVYSIYESAQALGVPFTDIEFKDWLLFQQSEKEYPCRNVTLQRDYSFRITTINYQGESKKILLKPTISRSYRQVLDKIIEEEQPYVARIVLRGFGERKGILWVHGEIHLSIPYKFYLENYRRYERNYGKLFGGVDVNVDRVNLAIVDRYGRLRDIKTFWFEEASWKGCPRQRAWSIIGMAIHDMLRYAYHHRVKVLFLENPETLGYLKTLWIKKGERRSNNYNYRVQIFRNRIIERITMKAPLYAINIEYVDPKGTTLSKEHDEVMRKYGLDRHTASAYIIALRGIERNTMIQKATV

SEQ ID NO: 1234 - protein, 363 aa, unidentified
  REGION 1..363: note = Description of Unknown: uncultivated organism sequence
  REGION 1..363: note = Category: MG61 effectors
  REGION 1..363: note = Description: MG61-70 effector
MSFITLRFPFNANGGVARELLSTAWWFKVATHRVLSLAKRQQVLPGTKIGWINTFRGIAYGIVPNRRYADGVVTLVMGVYESCRALGVDFRSVELSGRLMFQQSELEYPNRSITLKPNHEFHITAIRFNGLIGRVVIKPTIPKIYKALLDATITEHVGYMGRVVIDGVGVRNNQLWVHGEIHMTVPLDIYYEHMARHKKNSGKLFGGVDVNTDRVNLAIVDENGELIDHKTFWFSEVIARGFPKHSAWSLIGMRIHELLNYAYHHGVKTLFLENPEVLGRLKLVWIKRGDRGRENYNHKVATFRSSIIERIAIKAPLYSIRLGYVNPRGTTNSIEHDELMRKYGLDRHTTSAHLIALRGLKHQ

SEQ ID NO: 1235 - protein, 363 aa, unidentified
  REGION 1..363: note = Description of Unknown: uncultivated organism sequence
  REGION 1..363: note = Category: MG61 effectors
  REGION 1..363: note = Description: MG61-71 effector
MTYITLVFPFNVCCDVAERLLSTAWLFKIATHRLLNVVKHFPVLPATDIGWKNTFREIAYEIIPNRRYADGVVTLVRSIYESCRQFRIDLKSVELSNWLMFQQSELEYPARNITLKSGLEFHITTVDYNKNTYRDVVEPIIPKSYEPLLDKMLEERQKYTGRVAVKSYGIRKYNLWVRGEIQITIPTDFYYNHMTRYRESKGSLIGGIDVNVDRLNLAIIDEKGNLRDCKTFWFSEAVARGFSRRNTRSIIGAKIREMLSYAYHHNVKILFLENPEVLSKLKLLWVRNSDRKHENYNYKVSVFRSSVIEMIALKAPLYGIEAKYVNPKGTTNSEEHDEAMKRYGIDRHTASAYLIALRGLRNQ

SEQ ID NO: 1236 - protein, 379 aa, unidentified
  REGION 1..379: note = Description of Unknown: uncultivated organism sequence
  REGION 1..379: note = Category: MG61 effectors
  REGION 1..379: note = Description: MG61-72 effector
MVKQVSSPRYITVSLDFHSDVGQAKVLLSTAWLSKVVAHRVLALVKENPVLSDLSEYSFLKVLRSKCYDLLPNRRYVDGVLKLIYSTLKSGKALGVDIGNIELKQWLLFQSDAERGYAKGNMNIRLSDLHHVRVLTVDYSGNTRYVELEVSTPKGWGKLVENLIDKASRGVVGYPARVVVEDYGIGKSGLHVHGKVQVMVPYDLYLDVMKKYNKPRGNNIAGVDVNVERLDAVVIDEHGNLISYKTFWLKNATFMGVKRKRAWSLIGEQVHALLKWLYSQGVSVIGLENPEIIGYLKYYWIRSGERKGNKWNWKVSMFRNSIIERISWKSALYSLKVVYVNPRNTSREGEKVGEKLGLDKHLGSAYTIAKRALKNLQKP

SEQ ID NO: 1237 - protein, 393 aa, unidentified
  REGION 1..393: note = Description of Unknown: uncultivated organism sequence
  REGION 1..393: note = Category: MG61 effectors
  REGION 1..393: note = Description: MG61-73 effector
MQDQPLYTVKLTFNVNGEKAKKILSTARLFKMACHRVLRKSKELRNTLIPSKVAWIKMFKNHAYELIPNKRYSYGAVYLIYGIWESARKLNVDYNNIELSDWLLFQHYEREVNGNVIRVYEDDSALITVYYYGGSKDRILVKAKPNKCQVELLRKIIESGEKYMPKLIIRDYGVRNAKLYVRGEIHVAVSYDFYLKYMKRCNEPKGGLIGGVDVNSDRINLAIIDEDGKLRDKKTFWFTEVTARGYPRSRAWSIIGMKVHKLLKYAYHHGVLSIALENPEVIGRLRLAWIRNGKRLHENYNWKVSTFRNRIIEMIAMKAPLYSIKTIYVDPKGTTHSKEHNKVMKKYGLDRHTASAYMMAQKYLEVIRNHLKHQHLGNSLHPLLKLLQQLILS

SEQ ID NO: 1238 - protein, 374 aa, unidentified
  REGION 1..374: note = Description of Unknown: uncultivated organism sequence
  REGION 1..374: note = Category: MG61 effectors
  REGION 1..374: note = Description: MG61-74 effector
MKQIEYITLRLPFHVTGGNAKLIYWTAWLCKICAHRLLNIIKENPLLADLSQYDFIKFSRRLCYDIIPNRRYIDGISTLLHASLQSAKALKVDITKLELKPWLLFQSEAEPWAKGNLNIQFIDYNKVRVLVFDKDKSSRKITMKPVIPKGYAKLTRSLVEKALRKEIGYPARIYITDYGGGLEHLYGEIQVMVKYDFYLEAMKRYDKPPGNNIAGIDVNVDRLNLVVINRSGDIVWRYTARFPQVTSRGYKRKRAWSIIGERIHEILRNAYSHGASVIAVENPEIIGYLRYYWIRNGERKTKNYNYKVSIFRNSIIERIMWKAALYGLQVITVNPKGTTHSNNHEYVMRKCGLDEHTASAYLIALRARRNLQRP

SEQ ID NO: 1239 - protein, 381 aa, unidentified
  REGION 1..381: note = Description of Unknown: uncultivated organism sequence
  REGION 1..381: note = Category: MG61 effectors
  REGION 1..381: note = Description: MG61-75 effector
MSLPEYLTVSVPFTAKDEDAKFIWITAWLSKLCAHRLLDDVKSNDVLIDLSQANFLKYARKRCYDILPNRRYVDGVATLIHSTLKSARKLGVNIKSIELKQWLMFQSEAEKEKKGNLNIRLVSIDKAEVLVFDHRKEPRKIVVELKTPKGYEKTLKTLIEKALSKEIGYPARVVIKEYNFYPNNLHLYCSLQVMIPYNLYLKTMRKYDKPLGSHVAGVDVNVDRLNLAIVDRYGRLRDVRTFWFREITSRGYKKKPAWTKIHQAIHDMLDYAYHHGVSVIALENPEVIGYLRYYWIRNGDRKSKNYNYKKSIFRNKIIETVTCKAPLYSLKTIYVNPRGTTHSKEHDEIMKRYGLDRHTASAYLIALRGIERHTMIQKATV

SEQ ID NO: 1240 - protein, 342 aa, unidentified
  REGION 1..342: note = Description of Unknown: uncultivated organism sequence
  REGION 1..342: note = Category: MG61 effectors
  REGION 1..342: note = Description: MG61-76 effector
MVAHRVLRIVRENPLYLQLSEARFLKNLRSACYDILPNKRYVDGVLKLVYSTLRSVQALKIDVKQIELKQWLLFQSDGEPYARGNLNIRLLEPWRVRVLTFGYDHSSEYVELEVVVPKGWRKLIEVLIEKASRKEVGYPARIYISDYGMGKNGLHIAGELQVMVPYRLYCEVMKRFDSPLSDLVAGIDVNVERLDVAVVSPNGKLKLVKTFWLDGAIHMGVRKKRAWSIIGEIIHKMLRWLYHSGVSTIYLENPEIIGYLRYYWVRNGERKGRKWNWKVSMFRNSIIERITWKAPLYALNVKYVDPRGTTRSREHDEIMKKFGLDRHLASAYLIALKGLELP

SEQ ID NO: 1241 - protein, 363 aa, unidentified
  REGION 1..363: note = Description of Unknown: uncultivated organism sequence
  REGION 1..363: note = Category: MG61 effectors
  REGION 1..363: note = Description: MG61-77 effector
MSYVTVTAGFNASSGEAELLLSTAWLFKLATHRVLSYAKPMPALPASKIAWKNTFRRIAYEVISNRRYADSATVLVMGIYESCRQLGVDFREVELGDWLMFQQSEKEYPPRNITLKYIDEAWVTVLGYDGRRERIKLKISVSGAFRRLLEAILGEKQPYNPRIVLKSWNTRGGKLYVKGELHLAIPLDFYYRHMKRFEGNYGKLYGGVDVNADRVNLAIVDERGRLRDSYTFWFREATARGYPKRRARSVIGMRVHEMLRYAYHHGVKTLFIENSDVLGKLKLLWIRNGRRLHKNYNWKVSIFRSSIIEMIALKSPLYSIRVGYVNPGGTTHSKEHDEIMRKYRLDRHTASAYLIALKGLKQP

SEQ ID NO: 1242 - protein, 365 aa, unidentified
  REGION 1..365: note = Description of Unknown: uncultivated organism sequence
  REGION 1..365: note = Category: MG61 effectors
  REGION 1..365: note = Description: MG61-78 effector
MDYITIKLPFNANDGVAGELLSTAWLFKTVAHRVLAVAKQMQVLPGTKVGWVNMFRQIAYGIIPNRRYADSAVTLVMGVYESCRSLGVDFRSVELSNWLMFQQSELEYPNRNITLKPNYEFHVTTIRYNGTTSRVVVKPTIPRNHKELLDAILTEHIKYMGRVVVRDYGVRGSQLWVHGEIQVTVPMDVYYEHMARHRRNAGKLIGGADVNTDRINLAIIDEDGELIDHKTFWFSETSRKGFSRHSAWSIIGMRIHELLDYAYRHGVKTLFLENPEILGRLKLMWAKSGDRGHENYNHKVMTFRSSIIEKIAMKAPLYGIEVKYVNPRGTTNSTEHDETMKKHGLDRHTASAYLTALRGLKHQQK

SEQ ID NO: 1243 - protein, 371 aa, unidentified
  REGION 1..371: note = Description of Unknown: uncultivated organism sequence
  REGION 1..371: note = Category: MG61 effectors
  REGION 1..371: note = Description: MG61-79 effector
MSYITLCLPFNIESSEAERLFSTAWLFKIASHRMLSLTKQFPILPATDIGWKNTFRKIIYEVIPNRRYTDGVIVLVRGVYESCRQLGVDFKEVELGDWLMFQQAEKEYPVRNITLKQGYEFYVTTIDYNGSSERIVIKPTIPKNYKLLLDRILEYRQKHTARVVIKDFGIRKDKLWIHGEAQLTIPLDFYYKYTVRFKRNYGKLYGGVDVNTDRINLTIVDKYGRLRDTKTFWFEDVSRKGYSKRKARVLIGMAVHEMLKYAYHHGVKTLFLENPEVLGKLKLLWIRNGRRLYKNYNWKVTTFRSSIVEMIAIKAPLYAIKVDYVSPRGTTNSKEHDKLMRKYSLDKHTVSAYLIALKGIKRYTMIQKATD

SEQ ID NO: 1244 - protein, 363 aa, unidentified
  REGION 1..363: note = Description of Unknown: uncultivated organism sequence
  REGION 1..363: note = Category: MG61 effectors
  REGION 1..363: note = Description: MG61-80 effector
MSSLKLSNVDKLMPHVTIIGKLVPGTSDDYMKLVRLAWSFRRAVELMIREVMNGASMKDVTKKLYQILPNYIYLESAYKHAKLIVEGCKFNNGVPGHIHIRKLFIVSRGNKYDKGNRNVKIIPNTKFFRVLIKYPWDSSWIECRALFDEKYIPLLRELLELAYQRKEGYSARIVFREGRIELHISEPLYLYLKHFSLPKRRGYGLVAGLDLNSDRINMVVIDSDGRIAAMKTAWFPELTLHGFPREKARDTRLKKLKELLSYARRIGVDYVAFENLFVVKKRSKVSSPSGNRKITRFAKKQILQHGLLMTLKLCLTPVLVDPKGTTHSREHKEVMKKRGLDRHMASAYLIAIKGLKVIRNHEK

SEQ ID NO: 1245 - protein, 381 aa, unidentified
  REGION 1..381: note = Description of Unknown: uncultivated organism sequence
  REGION 1..381: note = Category: MG61 effectors
  REGION 1..381: note = Description: MG61-81 effector
MSLPEYITIDIPFTATGEEAKLIWCTAWFSKLCAHRLLSDVKRNEVVIDLSQISFLKYARKRCYDILPNRRYIDGVATLIHSTLRSARKLGVNIKSIELRQWLLFQSEAEKEKKGNLNIRLTTINKAELLVINHKKEPKKIVIDLRIPKGYRKTLETLIKKALNREIGYPARVVIKEYNFYPNNLHLYCSLQVMIPYNLYLETMRRYDKPLGDHIAGIDVNVDRLNLAIVDKYGRLKDVKTFWFREITNRGYRRKPAWTKVHQAIHDMLDYAYNHGVSLVALENPKVIGYLRYYWIKNGDRKSRNYNYRKSIFRNKIIEAVTYKAPLYSLKTIYVNPRGTTKSREHDKVMRRYGLDRHTASAYLIALRGIKRHTMIQKAIT

SEQ ID NO: 1246 - protein, 312 aa, unidentified
  REGION 1..312: note = Description of Unknown: uncultivated organism sequence
  REGION 1..312: note = Category: MG61 effectors
  REGION 1..312: note = Description: MG61-82 effector
MVENPLYTIKLSFNASGDRAKKILSTAWLFKLACHRVLSRSKELLNALIPSKIAWVKMFYSNARDLIPNKRYAYGAVYLVYGIWESSRRLKVDYRCVELSDWLMFQHYDREVDGNVIKVLEDGSALVTTYSYDSSKDRVLVKTKPNKGYGELLKLVVESKEKYMPRVVVRGYNIRNGKPYVSGEIQVTIGYDFYLKHMTRYREPKGGLIGGVDVNTDRINLAVIDEKGNLRDCKTFWFSEAVTRGYPRRKAWSVIGMKIHEMLKYAYNRGVSIIALENPEVLSYLKLAWIRNGDRIHENYNYKKTIFRNSIT

SEQ ID NO: 1247 - protein, 371 aa, unidentified
  REGION 1..371: note = Description of Unknown: uncultivated organism sequence
  REGION 1..371: note = Category: MG61 effectors
  REGION 1..371: note = Description: MG61-83 effector
MSYITITAGFNASDNEAKMLLSTAWLFKLATHRVFSYAKATPILPASKVGWKNMFRKVAYKIIPNRRYADSIVILVMGIYESCRRLGIDFQVVELGYWLIFQQSEKEYPPRSITLKSVNEAWVTVFDYHGDTNRLRFRVSTSKKYKELLKALLAERQPYNPRIVLKQQNVRGGKLYVKGELHVSIPLDFYYRHMVRFKGSGGSLCGGVDVNADRINLAIVDRYGRLRDVRTFWFEEVSRKGCPGRRARAITGMRVHEMLKYAYHHGVKTLFLENPNDLGKLRLLWIRSGKRLHRNYNWKVSVFRSSVIEAIAVKAPLYSIRVIYVNPRGTTCSREHDKIMRIHGLDRHSASAYLIALKGIKRHTMIQKDII

SEQ ID NO: 1248 - protein, 363 aa, unidentified
  REGION 1..363: note = Description of Unknown: uncultivated organism sequence
  REGION 1..363: note = Category: MG61 effectors
  REGION 1..363: note = Description: MG61-84 effector
MSYVTLSLPFNIGGAEARRLLSTAWLFKIAAHRMLDMAKQTAALPATDIGWKNTFRKTVYGVIPNRRYTDGVIALVRGIYESCRRLGVDFRTVDLGDWLMFQQVEKEFPARNITLKRGYESWVTTIGYGGDSERVAIRPSVPKSYRLLLDRILEERQRYTARVAIRDYGVRKNMLWIRGEVQLTIPIDFYYRHMARFRKNYGRLYGGVDVNADRINLAIVDESGRLRDSYTFWFREVTARGYPRRRARSVIGMRIHEMLRYAYHHGVKTLFLENPDVLGKLKMMWIRNGRRLHRNYNWKVATFRSSVIEMIAMKAPLYAIRVRYVDPRGTTHSEKHDKIMKKHGLDRHTASAYLIALKGLELP

SEQ ID NO: 1249 - protein, 365 aa, unidentified
  REGION 1..365: note = Description of Unknown: uncultivated organism sequence
  REGION 1..365: note = Category: MG61 effectors
  REGION 1..365: note = Description: MG61-85 effector
MNYVTLVLPFNAGGDTTKRLLSTAWLFKTAVHRVLDVAKQSPVLPGTDIGWKSAFRSLAYSVIPNRRYADGAVTLVRSIYESCRQLGVDFKSVELSDRLMFQQSELEYPARNITLKPGYEVHVTTISYDRESYRDVIKLVAPKNYSTLLSKIIEERQEYSGRVVVKGYGVRDNTLWVRGEVQITIPVDFYYKHAARYREPKGDLVGGVDVNADRINLVVVDEKGNLRDYKTFWFEKTTARGYSRRRTWSVIGMRIHEMLEYAYRHGVSTIVLENPEVLSKLKLLWIRRGDRRHENYNYKVSIFRSSIIEMVALKAPLYGLEVEYVNPRGTTNSVEHDMLMKEHGLDKHTASAYLIALRALAHQST

SEQ ID NO: 1250 - protein, 358 aa, unidentified
  REGION 1..358: note = Description of Unknown: uncultivated organism sequence
  REGION 1..358: note = Category: MG61 effectors
  REGION 1..358: note = Description: MG61-86 effector
MYVSQYQTSDIVDASGLVTHVTIIGKLVPLTSVDYMKLVRLAHDFRRAVQVATRMIARGVSVNDILREVRSMLNKAYGDSAYRVAKAIVEGCRFHNCDPRRIEVMKLFIVSVGDASRLGNRNVRLESTDTVRIKYPYDGSWLTFRACFGEEYLPLVRELVELARQRKISYGARVVFRGGRVYLHLSIPTWLYLRHFSRGVARGSLIAGFDLNSDRVNMVIIDGFGRIRDMRTEWFPEVTSHGYPRSKARARRLEALARLLRYAYHHGVGTVVFENLLVIKRRRYTRSGTANRKITRFAKRELLQHGVIIAMKYGFKVLLVDPKGTTNSREHDEVMRKYGLDRHMASAYLIATKALKQQ

SEQ ID NO: 1251 - protein, 376 aa, unidentified
  REGION 1..376: note = Description of Unknown: uncultivated organism sequence
  REGION 1..376: note = Category: MG61 effectors
  REGION 1..376: note = Description: MG61-87 effector
MSKSVAEYITLRLPFHVTGVDAKLIYWTAWLCKLCAHGLLEAIKLNPSLAYLSQYDFIKVGRRLCYDIIPNRRYVDGISTLIHASLQSAKALKVDITKLEPKHWLLFQSEAEPWAKGNLNIQFVDYDKVKVLVFDRDKSSRRIIIEPVIPKGYIRLVKALVDKALKKEIGYPARIYITDYGERLEHLYGEIQVMVKYNFYLEVMKRYDKPLGDNIAGVDVNVDRLNLVVINRDGDIVWKHTVRFPQITSRGCPRKRAWSIIGEAIHSILRNAYSHGASVVAVENPEVLGYLRYYWIKNGDRGTKNYNYRISIFRNSIIERIVWKAPLYGLHVVTVNPKGTTHSKDHEYVMRRYGLDRHTASAYLIALKTRRNLQRP

SEQ ID NO: 1252 - protein, 364 aa, unidentified
  REGION 1..364: note = Description of Unknown: uncultivated organism sequence
  REGION 1..364: note = Category: MG61 effectors
  REGION 1..364: note = Description: MG61-88 effector
MNEQPLYTVKLTFNTSGKKARMLLSTAWLFRIACHRVLSRSKQLKNMLVSSKIAWIKIFKNYAYEVIPNKRYSYGAVYLVYGIWESARELGVDYSSVELSDWLMFQHYEREVDGNVIRALEGGSTLITVYGYDGSKDRILVRAKPNKGQIELLGKVVKLKEKYMPKVVILDYGVRNNKLYVRGEIHITISYDFYLKHARRYDESKGNLIGGVDVNTDRINLAIVDRDGRLKDVKTFWFPEVTARGYPRRRAWSVIGEKVHELLKYAYHHGVSTIVLENPEVIGRLRLAWIKNGERLHRNYNWKVSVFRNKIIKMIAMKAPIYGLCVSYVNPKNTTHSKEHDDIMTKYGLDRHTASAYIIALKSI

SEQ ID NO: 1253 - protein, 363 aa, unidentified
  REGION 1..363: note = Description of Unknown: uncultivated organism sequence
  REGION 1..363: note = Category: MG61 effectors
  REGION 1..363: note = Description: MG61-89 effector
MSYITIRLPFNVNGGVAGELLSTAWLFRIAAHRVLGITKQMQVLPGNKIGWVSMFRKVAYGVIPNERYADGVITLVMSIYESCRALDVDFRGVELSDWLMFQQSSLEYPSRNITLKPNHEFHITTIRYDGSIGRIVVRPTIPRNYKGLLDVVLAGRVRYMGRVVVRDYGVRNSRLWVHGEIHMTVPLDIYYEHMVRHKKNSGKLIGGIDVNTDRLNLAIIDERGDLRDYKTFWFSETSRKGFSRRRAWSIIGMRIHEMLDYAYHHGVKTLFLENPEVLGRLKLMWIRNGNRGHENYNHKVAIFRSSIIERIALKAPLYGIETKYVNPRGTTNSVEHDELMRKHGLDRHTTSAHLIALRGLKHQ

SEQ ID NO: 1254 - protein, 356 aa, unidentified
  REGION 1..356: note = Description of Unknown: uncultivated organism sequence
  REGION 1..356: note = Category: MG61 effectors
  REGION 1..356: note = Description: MG61-90 effector
MELPESVTIVGRIEFPDKKSYLELGKLCYLFKKNLQKAVKMYARGIRRDIIIKVVTKELNLGYADTIYKLARFIVEGCMFNNGEPFKIRIRKVFLASRGFSSNKGNRNIRLISTSEVLVRTPDRKWIKLYVKFGKKYLPLVKELVDLALKKKISYFARIVFRDGKAYLHISIPIQLYLKHFRLGLARGKLIAGFDINSDRINMVVIDENGCIRDVKNKHFPEVVSHGFPSNKARYLRLNAIAELLDYAHHHGVKYICFENLDVIKKKKFTKNKKANRKISKFAKREILTHAVIRALRYGFRILFVNPKGSSKEARKIHKKLGLDIHTASAYIIAIRGLKILKENESVENNEKIKLW

SEQ ID NO: 1255 - protein, 370 aa, unidentified
  REGION 1..370: note = Description of Unknown: uncultivated organism sequence
  REGION 1..370: note = Category: MG61 effectors
  REGION 1..370: note = Description: MG61-91 effector
MSYVTLVLPFNAGGDVAKRLLSTAWFFKIAVHRVFGAAKQSPALPGTDIGWKSTFRSLAYNVIPNRRYADGAVVLVRGIYESCRQLGVDFKSVELSDWLMFQQSELEYPARNITLKPGYEVHVTTISYDRESYRDAIKPSIPKRLAALLSKILEERQEYTSRVVVKGYGVRGNTLWVHGEVQITIPVDFCYKYMARYKEHKGSLIGGVDVNVDRINLAIVDEEGNLRDHKTLWFAEAVARGYPRRRARSIIGMRVHEMLEYAYHHGVSTIALENPEVLGRLKLLWVWVKRGDRKHENYNYKKSVFKSSVIEMITLKAPLYGIKVKYVNPRGTTNSTEHDKFMKEHGLDRHTASAYLIALRGLAHQIKQMK

SEQ ID NO: 1256 - protein, 371 aa, unidentified
  REGION 1..371: note = Description of Unknown: uncultivated organism sequence
  REGION 1..371: note = Category: MG61 effectors
  REGION 1..371: note = Description: MG61-92 effector
MSYMTLTLPFNVGGVEARKLLSTAWLFKTATHRMLYLARQSPILPATDIGWKNTFRKTIYEAIPNRRYVDGVITIVRGIYESCRQLGVGFKEVELGDWLMFQQSEKEYPVRNITLKDDYSFHITTIGYRGEKDRIIIKPSIPKNYRLLLDRILEEKEKHTARVVVKDYGVRKNKIWVHGEIQLTIPIDFYYMHMSRYKRNYGRLYGGVDVNVDRINLAIVDRYGRLRDVKTFWFEEASRKGYPRRRARSIIGMRIHEMLRYAYHHGVKTVFLENPNVLGRLKLFWINNGKRLHRNYNWKVSIFRSRIIEIIGMKTPLYATKTEYIGPRGTTKSKEHDEITRRYGLDRHSASAYIIALRGIKRPDLIQKATI

SEQ ID NO: 1257 - protein, 377 aa, unidentified
  REGION 1..377: note = Description of Unknown: uncultivated organism sequence
  REGION 1..377: note = Category: MG61 effectors
  REGION 1..377: note = Description: MG61-93 effector
MAGEVREPEVTHVTVTGRITPLNSEDHVKLCYLAYRFRKNLVRAVKMYARGVDKQVIVKEITRELNLGYADTIYKMAKLIVEGARGNGSKPLKIKVRKLFIASRGFSANKGNRNIRLESTNTLYVNIPREGWVKFKVSFGEKYIPLVKELIELAKSRKYSYGARIVFRNGRIYLHLSVPVELYLKYFGKGEARGSLIAGFDLNSDRVNMVIVDKSGVIRDARTEWFPEVTSHGFPRNRAKVARLQALSKLIEYAYHHGVGVAVFEDLDRIKRRRFTCSPVANRKMSWFPKRKLLGHGVVMALKHGFNVYLVDPSYTSVVGGYLSRELGLDKHTASAYMLTAKYLGLDLKSLKVTQITRKPKTKQHTDSPRLLYLAVI

SEQ ID NO: 1258 - protein, 373 aa, unidentified
  REGION 1..373: note = Description of Unknown: uncultivated organism sequence
  REGION 1..373: note = Category: MG61 effectors
  REGION 1..373: note = Description: MG61-94 effector
MNETYLTLRLPFNACDVEAGMLLSTARLFRQVVLHLHNLFLKENLRITSLIALKRMYRKRLQEILPNRRYVDGAITLVYSIYESAQALGVPFSDIEFKNWLLFQQSEKEYPCRNVTLQRDYSFRVTTISYQGESKRTSLKPTVPKNYKQILDKIIEKKQPYVARIVLRGFGERKNMLWIHGEIHLSIPYKFYLEHFSKFKRNYGKHFGGVDVNVDRINLAIVDKYGRLRNVKTFWFEEASWKGCPRQRAWSIIGMAIHNMLRYAYYHGVNTLFLENPKVLGYLKILWIRKGKRKNRNYNYRVQIFRSSVAEKIAMKAPLYTINIEYIDPKGTTHSKEHDEIMRRYGLDKHTVSAYLIALRGIERRIMIQKAIV

SEQ ID NO: 1259 - protein, 365 aa, unidentified
  REGION 1..365: note = Description of Unknown: uncultivated organism sequence
  REGION 1..365: note = Category: MG61 effectors
  REGION 1..365: note = Description: MG61-95 effector
MAGEIREPKLTHVTVVGRVIPLDSESYMHLVLLAYKFRKVLIKATKMYAKGINRITIVKEVTKELNLRYADTIYKLAKLIVEGAKCNNSNPLKVKIRKLFIASRGFTVNKGNRNIRLLSSNELEINILWKGWIRFKVLFGRKYIPLVNELVKKALAKKLSYTAKIAFKNGNVYLHVSVPIELYLKYFSKGKAEGKLIAGFDLNSDRINMVIVDKYGIIRDVKTEWFPEVTSHGFPRNKAHTLRLQALAKLLDYAYHCSVEVVVFEDLERIKKRRFTMSRTANRKITRFPKRKLLKHAVVMAMKYGFKVHLVNPANTSKLGEKIGEKLGLDKHTASAYILTLKYLGVANLISCNPSSQRNQTTINY

SEQ ID NO: 1260 - protein, 387 aa, unidentified
  REGION 1..387: note = Description of Unknown: uncultivated organism sequence
  REGION 1..387: note = Category: MG61 effectors
  REGION 1..387: note = Description: MG61-96 effector
MLSRYISLLGYTPMKLIEYITLRLPFHVINEEARLIYLTAWLCKLCAHRLLNYVKENPLLANLSQYDFIKLGRKLCYDIIPNRRYVDGITTIVQASLQSAKALGADITKLELKPWLLFQSEAEPWAKGNLNIQFTSYNTVRVLVFEKDKSTRKITIKPVISKVYAKLIHALIDRALRKEIGYPARIYITNYGHKLEHLYGEIQIMVKYDFYLEVMRRYEKSLGNNIAGIDVNVDRLNLTVINRDGDIVWKYTVKFPQITSRGYRRKRAWSIIGEAIHSILKNAYSHGASILAVENPKIIGYLRYYWIRNGERGTKNYNYKVAIFRNSIIERIIWKAPLYGLQVATVNPKGTTHSEDHEYVMRRYGLDRHTASAYLIALKARRNLQRP

SEQ ID NO: 1261 - protein, 355 aa, unidentified
  REGION 1..355: note = Description of Unknown: uncultivated organism sequence
  REGION 1..355: note = Category: MG61 effectors
  REGION 1..355: note = Description: MG61-97 effector
MSRCQTSSIIDASSIVNYVTIIGRIYSASSEDYMHLVRLARDFRRAVQVATRMIARGLEENSVLRELRRMLNKAYADSAYKAAKTMVEGCIFNGGNPLHIEVKKPFIVSEGESSRLGNRNVRLEDTCLVKVKYPHDGSWITLRAEFGEKHLPLLRELVDLAKQKKLSYTARIVFKEGDIYLHISIPIQLYLKYFKEGEARGQLIAGFDLNSDRVNLVIIDEHGEIVDARTAWFPETTSHGFPREKAKALRLNALARLLKYCYRHGVSIVVFEDLLSVKRKRFTRSRTANRKITRFAKKQLIQHGVVMALKYGFKVLLVDPKGSTNSREHDELMRKYRLDRHTASAYLIALRGLKH

SEQ ID NO: 1262 - protein, 376 aa, unidentified
  REGION 1..376: note = Description of Unknown: uncultivated organism sequence
  REGION 1..376: note = Category: MG61 effectors
  REGION 1..376: note = Description: MG61-98 effector
MSYVTVVLPFNATGDVAGRLLSTTWLFRIATHRVLSLAKSTPALPGSDIGWKSVFRREAYSVIPNRRYADGVVALVRGIYESCRALGVSFRDAELGDWLMFQQSEREYPARNITLKAGYEFHVTVVGYDGSTGRVTVEPTVPKSYRVLLDGVLREKPKYCARVMVKGFGERKSDLWLNGEIHLTLPLELYHRCMAKDTPATGSNVAGVDVNVDRLNVAIVDTSGRLRDTTTFWFREVTSRGYPRRRARCVIGMSVHRMLKYLASHGVGMVVLENPEVIGYLRYCWVRSGERGSRNYNYKVAVFRSSIIEMIALKATLYGLKSVYVDPRGTSSSQEHRFVMEKHGLDRHTASAYLIALKHLQDEKIMNNRKAHEQHK

SEQ ID NO: 1263 - protein, 372 aa, unidentified
  REGION 1..372: note = Description of Unknown: uncultivated organism sequence
  REGION 1..372: note = Category: MG61 effectors
  REGION 1..372: note = Description: MG61-99 effector
MNYITITTGFNASDEEARLLLSTAWLFKIATHRVLSYAKSMPLLPTSKIAWKNTFRGVTYEVIPNRRYADSATILVMVVYESCRQLGVSFRDVELGDWLMFQQSEKEYPARNITIKNIDEAWVTVLGYGDRSRRIKLGIKSSKKACRKLIEAMLREKQEYNPRVYIRSWNVRGGKLFVRGELQVAIPIDFYYKHMVRFRENRGRLYGGVDVNIDRINLAIVDEGGRLRDVKTFWFEEASRKRCSRHRARSAIGMAIHSMLGYAYHHGVKTLFLENPDVLGKLKLLWIRGGKRKHENYNWKVMIFRSSVIEMIAMKVPLYTINVAYVDPKGTTHSEEHSEFMRRYGLDKHLASAYLIALRGIKRFNLIQKATE

SEQ ID NO: 1264 - protein, 363 aa, unidentified
  REGION 1..363: note = Description of Unknown: uncultivated organism sequence
  REGION 1..363: note = Category: MG61 effectors
  REGION 1..363: note = Description: MG61-100 effector
MSTLRLSSVEELIPHVTVIGKLLPETPEDYMKLVRLAWSFRKAVELMIREVVNGASMKDATKKLYQMLPNYIYLESAYKHAKFIVEGCKFNNGNPRHIHVKKLFIISRGNKYDKGNRNIKMIPSTKFFQVFIKYPWDSSWIKCRAFFGERYISLLRELLELANQKKEGYGTRIVLREGRIELHVSVPLFLYLKHFSLPERRGYGLVAGLDLNSDRINMVIIDPSGRIVAMKTAWFPEVTLHGFPRDKARDIRLKKLKELLSYARRIGVDYIVFENLFEVKKRSRVRSPSGNRKITRFAKKQLLQHGLLMSLKLGLTPILVDPKGTTHSQEHEEVMKKRGLDRHMASAYIIACKGLKVIKNHEK

SEQ ID NO: 1265 - protein, 379 aa, unidentified
  REGION 1..379: note = Description of Unknown: uncultivated organism sequence
  REGION 1..379: note = Category: MG61 effectors
  REGION 1..379: note = Description: MG61-101 effector
MSAVEYATVRLPFHATGDNARLIYWTAWLCKLCAHKLLDKVKENPQLADLSQYYFIKIGKELCYDIIPNRRYVYGISILIHASLQSAKALRVDITKLELKPWLLFQSEAEPLAKGNLNIQFTDHDRVKVLVFDKDGASKKITIKPVIPKSYAKLIKTLVDRAHRKEIGYPARVYIMNYGDGLEHLYGEVQVMVKYNFYLEVMKKYDKPLGNNIAGVDVNVDRLNLVVINRDGDIVWKYTARFPQVTARGYPRKKAWSVIGEAIHAVLRNAYSHGASVIAVENPEIMGYLKYYWIRSGDRRSRNYNYKVSIFRNSVIERIIWKASLYGLKAVPVSPKGTTHSEDHDYLMRKYGLDCHTTSAYLIALKARRNLRTSFSARL

SEQ ID NO: 1266 - protein, 363 aa, unidentified
  REGION 1..363: note = Description of Unknown: uncultivated organism sequence
  REGION 1..363: note = Category: MG61 effectors
  REGION 1..363: note = Description: MG61-102 effector
MTYITIALPFNVCCNVAKRFLSTAWLFKIATHRLLSIAKQSPVLPGTDIGWKSTFRRIAYEVIPNRRYADGVVVLVRSIYESCRQLKVDFKSVELSDWLMFQQSELEYPARNITLKPGYEFHVTTIDYHKNTYRDVVKLTVPKSYRLLLDKVLKERQVYAGRTVIKSYGTEGGNLWVQGEVQTTIPIDFYYKHMPRVRANNGKLYAGVDVNVDRVNLAIVDGEGRLRDTYTFWFEEASRKGCKRRRARSIIGMGVHEMLKYAYSHGVKVLFLENPEVLGKLKLLWVRSNDRRHENYNYKVSVFRSSIIEMIALKAPLYSIEVKYIDPRGTTSSREHDEIMKKHRLDRHVASAYLITLKGLKHQ

SEQ ID NO: 1267 - protein, 361 aa, unidentified
  REGION 1..361: note = Description of Unknown: uncultivated organism sequence
  REGION 1..361: note = Category: MG61 effectors
  REGION 1..361: note = Description: MG61-103 effector
MLQSQTSNVVDAFTVVNYVTITGKLHPVSGEDYMRLVRLAWDFKNAVRITTRMIAKGVRRNNILKELRGMLNKAYADSAYKLAKAMVEGCLFNGCNPLHIEVRKPFIISEGESSRLGNRNVRLEDTNIVKVKYPYDGSWITLRAEFGERYLPLLRELVELARQRKVSYGARIVFREGNIYLHLSIPIELYLKYFKRGEAKGGLVAGFDLNSDRVNLVIIDRYGRIVDTRTAWFTEVNSHGFSRNRTRALRLRALAKLLKYCYTHNVGVVVFENLLLIKRRRYTRSKTGNRKITLFAKRQLIQYGVVMALKYGFKTLFTNPRGTTNSKEHGEIMKKLGLDRHTASAYLIALRGLETLNENYK

SEQ ID NO: 1268 - protein, 388 aa, unidentified
  REGION 1..388: note = Description of Unknown: uncultivated organism sequence
  REGION 1..388: note = Category: MG61 effectors
  REGION 1..388: note = Description: MG61-104 effector
MNPTPKIIADKETIEQFMYITINGRLTPKSNEDYMKLCLLAYRFRQAVKHGINLVLRGVQQKEAYKELAKLLPSSIYGETAYKYAKLLVESAKEQVDDEIVVNKITIMRKWIASRGGVSWRGNLNVRLTSPDTAEILVFNHRKESRKITVNLRTPKRYKKLLERLIEKASNREVGYPARVVIKEYNFYQGNLHLYCGLQVVVPYYLYLETMRRYDKPLGNHVGGVDVNVDRINLAIVDKYGRLRDTRTFWFRETISRGYKKRRAWTKIYQAIHELLQYAYHHGTSTIALENPKIIGYLRYYWIRDGDRKTKNYNYKKSIFRNKIIDTITCKAPLYSLKTIYVNPKGTTHSKAHGEVMKRYGLDRHTASAYLIALKAIKRHATTQKAII

SEQ ID NO: 1269 - protein, 364 aa, unidentified
  REGION 1..364: note = Description of Unknown: uncultivated organism sequence
  REGION 1..364: note = Category: MG61 effectors
  REGION 1..364: note = Description: MG61-105 effector
MNGQPLYTVKLSFNISSEKAKKILSTVWLFKIACHRILSKSKEIKDMLVSSKVAWIKMFKNHAYEIIPNKRYSYGVVYLVYGIWESARRLRINYDDVELSDWLFIQHYEREVNGNVIRVYEDGSVLVTTYGYDGSKDRILVKAKPNKGQAELLNSIVESKEKYMPKLIIRDYGVRDDKLYVRGEVHISISYDFYLKHVKRYNEPKGSLIGGVDVNTDRINLAIIDEDGKLRDVKTFWFREVTARGYPRRRAWSIIGMRVHELLKYAYHHGVSTIVLENPEVIGRMRLAWIRNGKRLHRNYNWRVTIFRNRIIEMITMKAPIYGLRVNYVNPKGTTHSREHDDIMMRYGLDRHTASAYLIALKSI

SEQ ID NO: 1270 - protein, 373 aa, unidentified
  REGION 1..373: note = Description of Unknown: uncultivated organism sequence
  REGION 1..373: note = Category: MG61 effectors
  REGION 1..373: note = Description: MG61-106 effector
MNETYLTLRLPFNACDAEARMLLSTARLFRHVVLHLHSLILGENPRITSLIALKKMYRRRLQEILPNRRYVDGAITLVYSIYESAQALGVPFNDIEFKNWLLFQQAEKEYPCRNVTLQRDYSFRITTISYQGESRRIPLKPTISRSYRRVLGKIIEERQPYVARVVLRGYGERGNVLWVHGEIHLSIPYKFYLEHFKRYRGNHGALYGGVDVNVDRANLAVVDRYGRLRDVRTFWFEEASWKGCPRQRAWSIIGMAIHDMLRYAYHHGVKVLFLENPETLGYLKTLWVRKGERRSNNYNYRVQVFRNRVVERIALKASLYSIGVKYVDPRGTTRSEEHDELMRRHGLDRHTASAYLIALRGMERYTTIQKATV

SEQ ID NO: 1271 - protein, 356 aa, unidentified
  REGION 1..356: note = Description of Unknown: uncultivated organism sequence
  REGION 1..356: note = Category: MG61 effectors
  REGION 1..356: note = Description: MG61-107 effector
MAREVREPEITHVTITGRILPLDNDSYMELILLAYRFRKALIRAIKMYAKGLDRNTIVKEITKELNLGYADTIYKLAKLIAEGAKHNGSNPLRVRIGKLFIVSRGFSSNKGNRNIRLLSTNELQVNIPWKGLLRFKVAFGERYISLVSELVKKALSRKLSYTAKIVFRNGMVYLHVSVPIKLYLKHFSKGRAKGSLVAGFDLNSDRINMVIVDKLGIIRDVKTEWFPEVTSHGFPRNKAHTLRLQSLAKLLNYAYHHGVGVVLFEDLDRIKKRRYTRSRTANRKITRFPKRKLLEHSIVTALKNGFKVYLVNPAYTSKLGEKLGTELGLDKHIASAYVLVLKYLGVSEIPLSISSS

SEQ ID NO: 1272 - protein, 286 aa, unidentified
  REGION 1..286: note = Description of Unknown: uncultivated organism sequence
  REGION 1..286: note = Category: MG61 effectors
  REGION 1..286: note = Description: MG61-108 effector
MAREVRKPEITHVTITGRVIPLNNDSYMELVLLAYRFRRTLIKAIKMTTKGLGKNTIVKEVTKELNLGYADTIYKLAKLIVEGAKSNGSNPLRVKLRRLFIASGGFTANKGNRNIRLLSSSELQVNIPWKGWVKFKVVSGKRCIPLVNELVEKALSKKLSYTAKIVFRNGKVYLHISIPIELYLKYFSKGRAKGKLIAGFDLNSDRVNMVVVNRQGIIRGTKTEWFPEVTSHGFPRNKANTIRLQALAKLLDYAYHHGVGVALFEDLDRIKKRRYTRSKTANRKIT

SEQ ID NO: 1273 - protein, 374 aa, unidentified
  REGION 1..374: note = Description of Unknown: uncultivated organism sequence
  REGION 1..374: note = Category: MG61 effectors
  REGION 1..374: note = Description: MG61-109 effector
MKKVKYITLRLPFHITGVYARLVYWTAWLCKLCAHRLLYHVKQNPLLADLSQYDFIKLGRKLCYDIIPNRRYVDGISTIIHASLQSAKVLGVDVAKLELKPWLLFQSEAEPWAKGNLNIQFTSYNTVRVLVFEKDKSTRKITIKPVIPKGYARLIRTLVDKALRKQIGYPTRIYITDYGDKLEHLYGEIQVMVKYDFYLEVMKRYEKPLGNNIAGVDVNVDRLNLVVINRNGDIVWRYTARFPQASSRGYPRKSAWSVIGEAIHSNLNNAYSHGASVIAVENPKIIGYLRYYWIKNGNRKSENYNYKVTIFRSSIIERIIWKAPLYGLQVVTINPRGTTHSEDHEYVMRRYGLDKHTASAYLIALRARRNLQRP

SEQ ID NO: 1274 - protein, 363 aa, unidentified
  REGION 1..363: note = Description of Unknown: uncultivated organism sequence
  REGION 1..363: note = Category: MG61 effectors
  REGION 1..363: note = Description: MG61-110 effector
MSYITMCLSFNVSDNVARRLISTAWLFKTASHRMLSIAKQTSALPTTDIGWKDAFRKVIYEVMPNRSYVDGVIVLVRGIYESCRQLGVNFKEVELGNWLMFQQTEKEYPVRNITLKRGYEFYITTLDYDGNSERIVIKPTTLKNYKLLLDKILEESQKHTARVVVKDYGIRKGKLWVHGEIQLTIPLNFYYKYMTRYKRNYGKLYGGVDVNSDRINLAIVDKEGNLRDTYTFWFREVTARSYPRRKARTIIGMRIHEMLKYAYHHGVKTLFLENSEVLGRLKLMWMRNGKRLNRNYNWRVTTFRSSIIEMIAMKASLYAIRVMYVNPKGTTSSEKHDGIMRKYRLDKHTASAYLITLKGLDLL

SEQ ID NO: 1275 - protein, 366 aa, unidentified
  REGION 1..366: note = Description of Unknown: uncultivated organism sequence
  REGION 1..366: note = Category: MG61 effectors
  REGION 1..366: note = Description: MG61-111 effector
MSYVTITAGFNAFGENAKLLLSTAWLFKLASHRVLSYAKSMPILPASKIGWKNMFRKVAYDVIPNRRYADSTIVLVMGVYESCRQLGVNFKDVELGDWLMFQQSEKEYPPRNITLRDVSEAWVTVFGYDGESRRISLKVSTSGIFRKLLEAVLREKQPYNPRIVLRTWNVRGGKLYVRGELHVSIPIDFYYRHMTRFKRNNGRLYGGVDVNTDRINLAIVDRYGRLRDAKTFWFEDTARKGYPRRKARALIGMAVHEMLRYAYHHGVKTLFLENPEVLGKLRLLWIRNGKRLHRNHNWKVAVFRSSIIEMVAMKAPLYSINTEYIDPKGTTHSKEHDEVMRKHGLDRHTTSAYLIALKGIKRYRMI

SEQ ID NO: 1276 - protein, 355 aa, unidentified
  REGION 1..355: note = Description of Unknown: uncultivated organism sequence
  REGION 1..355: note = Category: MG61 effectors
  REGION 1..355: note = Description: MG61-112 effector
MSRYQTSSIVDASSIVNYVTIIGRVYPVSSEDYMRLVRLAWDFRRAVQVTTRMIARGLEENSVLRELRRVLNKAYADSAYKAAKAMVEGCVFNDGNSLNIEVKKPFIVSEGESSRLGNRNVRLEDTCLVKVKYPYNGSWITLQAEFGEKYLSLLRELVDLAKQKKLSYTARIVFREGDIYLHLSILIQLYLKYFKEREARGRLIAGFDLNSDRVNLVIIDEHGEIVDVRTAWFPEATSHGFPREKAKVLRLDALARLLKYCHRHGVSVVVFENLLSVKRKRFTRSKKANRKINRFAKKQLIQHGVVMALKYGLRALLVDPKGTTNSREHGELMKKYGLDRHTASAYLIALRGLRH

SEQ ID NO: 1277 - protein, 356 aa, unidentified
  REGION 1..356: note = Description of Unknown: uncultivated organism sequence
  REGION 1..356: note = Category: MG61 effectors
  REGION 1..356: note = Description: MG61-113 effector
MSQSRTSSVVDATTLIEYATIVGRLIPASGEDHMKLARLAWEFRRAVQVATKMIAKGEEANIILKELRKILNKAYADSAFKQAKAIVKGCLATGGDPRRIEVTKLFIISEGETSRNGNRNVRLEDTSLVKVKYPYDGSWIQLEAKFGEKYLPLLRELVELAKQRKVSYNARIVFRRGRIYIHVSVPIYLYLKHFEKGEARGELIAGFDLNSDRINLAIIDRYGGLVDAKTAWFTEVVSHGFPRNKAKALRLRALAKLLKYCYTHGVGIVVFENLYVVKKHRYTKSRNGNRRISKFAKRELLEHAIVMSLKYGFKVLLVDPKGTTNSKEHDEAMKRHGLDRHTASAYLIALRGLNPS

SEQ ID NO: 1278 - protein, 374 aa, unidentified
  REGION 1..374: note = Description of Unknown: uncultivated organism sequence
  REGION 1..374: note = Category: MG61 effectors
  REGION 1..374: note = Description: MG61-114 effector
MDRVEYITLRLPFHATGEDARLVYWTAWLCKQCAHRLLERVRQNPLLADLSQYDFIKIGRKLCYDIVPNRRYIDGISTLIHASLQSAKALKIDITKLELKPWLLFQSEAEPWAKGNLNIQFTKDKTARILVFDRDKSSRKIIVKPLISKCYTKLVHALIGKAFRKEIGYPARVYVKDYGDRLEHLYGEVQVMVKYDFYLEVMRRYDNPLGNNIGGIDVNVDRINLVVINRDGDIVWKYTARFPQVTSRGYPRKRVWSIIGEAIHRVLENAYSHGASVIAVENPRVIGYLRYYWIRNGERKNKNYNYKVAIFRNNIIERIMWKTPLYGLQAIPVSPRGTTHSETHEYVMRRYGLDKHTASAYLIALKARRNLQRP

SEQ ID NO: 1279 - protein, 376 aa, unidentified
  REGION 1..376: note = Description of Unknown: uncultivated organism sequence
  REGION 1..376: note = Category: MG61 effectors
  REGION 1..376: note = Description: MG61-115 effector
MDLDYVTISLPFHATGDVAKSIYWTAWLSKACAHRVLEHVKANLVLAKLSEYDFIKFTRELCYSLLPNRRYVDGVATLVYSSLQSVRKLKVDVSRVELKPWLLFQSEGEPWAKGNLNIQFTDYETVKVLVFKASGGSERVVVKPVVSKRYNRLLKELVDRAMRKEIGYPARVYIRSYSGDLEHLYGELQINVKHSLYLEIMKRFDKPLGSNVAGIDVNTDRLNLVVVNKDGEVVWMHTVRFPQILARGFPRKRAWSIIGEKIHEVLKHAYHHGASAVALENPGVIGYLRYYWVRNGERGGRNYNYKVAVFRSSIIERILWKAPLYGLKIVYVDPKGTTSSREHAETMKKHRLNKHTASAYLIASRALNILERPTKT

SEQ ID NO: 1280 - protein, 373 aa, unidentified
  REGION 1..373: note = Description of Unknown: uncultivated organism sequence
  REGION 1..373: note = Category: MG61 effectors
  REGION 1..373: note = Description: MG61-116 effector
MTKAYLSMRLPFNACHDGARLLLSTARLFRHCVLYLHQLILSERPHVVSSIALKRMYRHRLQRILPNRRYVDGAIILMYSIYESAQALGVSLNDIEFKSWLMLQQSEKEYPCRSITLQHDHSFEVTTISYQGESRRIVLRPTVPKHYGRVLDKILEEGQPYVARVVLKGYGERRGVLWTHGEIHLLIPYGFYLEHFTRYRENHGKLYGGVDVNVDRINLAIIDGYGRLRDAKTLWFEEAARRACSRRRAWSIISMAIHDMLKYAYHHGVKRLFLESPEVLGRLKTLWMKKGERGNENYNHRVQIFRSRIVERVALKAPLYAIDAEYVNPRGTTHFEEHDEAMRRYGLDRHAASAYLIALRGIERYATTQKAIV

SEQ ID NO: 1281 - protein, 379 aa, unidentified
  REGION 1..379: note = Description of Unknown: uncultivated organism sequence
  REGION 1..379: note = Category: MG61 effectors
  REGION 1..379: note = Description: MG61-117 effector
MGYTPMKLVEYITLRLPFHVINEEARLIYWTAWLCKLCAHRLLNYVKENPLLANLSQYDFIKLGRKLCYDIIPNRRYVDGISTIVQASLQSAKALGADISKLELKPWLLFQSEAEPWAKGNLNIQFTSYNTVRVLIFEKDKSTRKITIKLVIPKVYAKLIHALMDRALKKEIGYPARIYITNYGHKLEHLYGEIQIMVKYDFYLEVMRRYEKSLGNNIAGIDVNVDRLNLVVINRSGDIIWKHTVRFPQITSRGCRRKRAWSIIGEAIHKTLKNAYSHGASVIAVENPEVIGYLRYYWIKNGDRRSRNYNYKVSIFRNNIIERIIWKAPLYGLQATTVNPKGTTHSEDREYVMRRYGLDRHTASAYLIALKARRNLQRP

SEQ ID NO: 1282 - protein, 375 aa, unidentified
  REGION 1..375: note = Description of Unknown: uncultivated organism sequence
  REGION 1..375: note = Category: MG61 effectors
  REGION 1..375: note = Description: MG61-118 effector
MSYMTLCLSFNVDSIKAKQLLSTAWLFKTASHRMLSLAKQFPVLPASDIGWKNTFRKIIYEIIPNRRCTDGVIVLVRGIYESCRQLGIDFKEVELGDWLMFQQAEKEYPVRNITLRQDNEFHVTTIDYNGSVERIVIKPTIPKNYKLLLDKILEDKQKHTARIVVKDYGVRKNTLWVRGEIQLTIPLNFYCKYMVRFKKNYGRLYGGVDVNADRINLAIVDSEGKLRDTYTFRFPEVTARGYLRHRARTVIGMKIHEMLKYAYYHGVKKLFLENPEELDKLRLLWIRNGRRLHRNYNWKVSVFRSRVIEMIAMKSSLYSIGVKYVNPKGTSNSKEHSEIMKRFRLDKHTASAYLTALRGLNQQFISFNYQNIFRP

SEQ ID NO: 1283 - protein, 323 aa, unidentified
  REGION 1..323: note = Description of Unknown: uncultivated organism sequence
  REGION 1..323: note = Category: MG61 effectors
  REGION 1..323: note = Description: MG61-119 effector
MRLVRLAWDFRRAVQVVTRMIARGLEENSVLRELRRKLNKAYVDSAYKVAKTMVEGCIFNGGNPLNIEVKKLFIISEGESSRLGNRNVRLEDTCLVKVKYPHDGSWITLRAEFGERYLPLLRELVDLARQKKVSYTARVVFKGSNIYLHLSIPIQLYLKYFKKGEARGKLVAGFDLNSDRVNLVIIDEHGEIVDVRTAWFPEATSHGFPREKAKVLRLNALARLLEYCYRHGVSVVVFENLLLIKRRRFTRGKTANRKITQFAKKQLIQYGVVMALKYGFRVLLVDPKGATNSREHGEVTKRYRLDRHTASAYLIALRGLRHQ

SEQ ID NO: 1284 - protein, 371 aa, unidentified
  REGION 1..371: note = Description of Unknown: uncultivated organism sequence
  REGION 1..371: note = Category: MG61 effectors
  REGION 1..371: note = Description: MG61-120 effector
MTYITLCLPFNISDNEAGRMLSTAWLFKIASHKMLSLAKQFPILPATDIGWKNVFRKIIYEIIPNRRYTDGIIVLVRGIYEFCRQLGIDFKEVELGDWLMFQQTEKEYPVRNITLKQGYKFHVTTIDYNGNSERITVKPTIPKNYKLLLDKILEEKQKHTARVVIKDYGVRKNKLWVHGEIQLTIPLNFYYKYMVRYRRNYGRLYGGADVNVDRINLAIIDKYGRLRDVKTFWFEDVARRGYPRRKARILIGMAVHEMLRYAYHHGVKIMFLENPEVLGKLKLLWIRNGRRLHRNYNWKITVFRSSVIETISIKAPLYSINTEYIDPRGTTHSKEHDIVMKRYGLDRHTASAYLIALRGIEKYTKIQKAII

SEQ ID NO: 1285 - protein, 364 aa, unidentified
  REGION 1..364: note = Description of Unknown: uncultivated organism sequence
  REGION 1..364: note = Category: MG61 effectors
  REGION 1..364: note = Description: MG61-121 effector
MDGTPLYTLKLSFNVSGGKARRILSTTWLFKLACHRVLGRSKELQKSLIPSKIAWVRMFYGDARSFIPNKRYAFGAVYLVYGVWESSRKLGLDYGDVELSNWLMFQHYEREVDGNVIRIYDDGSTLITTYDYDGSKERILVKAKPNRGHVDILKLIVESREKYMPRVVVRGYNVRNGEFYVRGEIHVSVSYDFYLKHATRYREPRGSLVGGVDVNVDRINLAIVDKRGELRDYKTFWFPEVTARGYPERRAWSVIGMRVHEMLEYAYHHGVSTIALENPSVLGYLKLAWIRGNDRGHENYDYKKSIFRNSIIERIAIKTPLYGFNVKLVEPQGTTSSREHDEVMRRYGLDKHTASAYIIALRSI

SEQ ID NO: 1286 - protein, 357 aa, unidentified
  REGION 1..357: note = Description of Unknown: uncultivated organism sequence
  REGION 1..357: note = Category: MG61 effectors
  REGION 1..357: note = Description: MG61-122 effector
MDVPKYVTVCGRVIFDNNETYLELGKLCYLFRKNLQKAVKMYAKGLSKNIIVKTITKEMNLGYADTIYKLAKFIVKGCRANGGNPLRIRIKRMFLVSRGFSSNKGNRNIRLVSTREVLVRTLDKRWLKLGVKFGKKYLTLIEELVKLALQKRASYSARIIFRNGKAYLSVSVPIQLYLKYFKLGKAKGKLIAGLDINSDRINMVIIDDDGNIRDVKNEHFHEVTSQGFPRNKAKYIRLNAIARLLDYAYHHGVRYVCFENLDVIKKKKFTKSKKANRKITKFAKRQILSHAVIRAMRYGFKILFVNPKNSTKEAKKIHRKLGFDVHTASAYIIALRGLKILKNNGNFQNILTTQTSE

SEQ ID NO: 1287 - protein, 358 aa, unidentified
  REGION 1..358: note = Description of Unknown: uncultivated organism sequence
  REGION 1..358: note = Category: MG61 effectors
  REGION 1..358: note = Description: MG61-123 effector
MLRYQTSSAVDASSIVNYVAIVGRVYPASNEDYMRLVVLAWDFRRAVQVATRMIARGLEENSVLRELRRVLNKAYADSAFKVAKAMVEGCLFNGGNPLRIEVRRLFIASEGESSRLGNRNVRLEDTHLVKVRYPHDGSWITLRAEFGERYLPLLRELVDLARQKKLSYKAIVVFREGGIYLHLSVPIQLYLKYLKKGEARGQFIAGFDLNSDRVDLVIIDEHGRIVDTRTAWFPEATSHGFPREKAKVLRLNALARLLECCYRHGVGTVVFENLLLVKRRRFTGDRTGNRKIARFAKRQLIQHGVVMALKYGFRVLLVDPRGTSGSKEHDEIMKRFGLDKHVASAYLIALRGLRYQQI

SEQ ID NO: 1288 - protein, 373 aa, unidentified
  REGION 1..373: note = Description of Unknown: uncultivated organism sequence
  REGION 1..373: note = Category: MG61 effectors
  REGION 1..373: note = Description: MG61-124 effector
MSETYLTMRLPFNTCGYEAGLLLSTARLFRFTVLKLHSIILDENPRITSLIALKRMYRRRLQEILPNRRYVDGAITLLYSVYESAQALGVPFNNIEFRDWLMFQQGEKEYPCRNITLQHDHTFRVTTISYQGESNRITLKPTIPRSYEEVLNSILEKKHPYVARIVLRGFGERKNMLWVHGEIHLSIPYKFYLENFRKHKRNYGKLLGGVDVNVDRINLAIVDRYGKLRDTKTFWFEEASWKGCPRQRAWSVIGMAIHDMFKYAYHHGVKTFYLENPETLGYLKTLWIKKGERRNNNYNYRVQIFRNRIVERIAMKAPLYAINIEYVDPRGTTHSKELDEMMRKYGLDKHTASAYMIALRGIERHKMIQKAIN

SEQ ID NO: 1289 - protein, 375 aa, unidentified
  REGION 1..375: note = Description of Unknown: uncultivated organism sequence
  REGION 1..375: note = Category: MG61 effectors
  REGION 1..375: note = Description: MG61-125 effector
MELPKYITVSLDFHADGGYARSILSTAWLSKLVAHRVLKLVKESKTLANFSEYMFLKMLRSECYDTLPNRRYVDGILKLVYSTLKSAKALKINIRDIEMKQWLLFQSDGERGYARGNMNIRLIDTHHVRVLTVGYDKKTSYIELKLTVPKRWKKFIEVLINRAFTGQVGYPARVVVKDYGVGKYGLHVHGEVQVMVPYSLYLEVMKRYDKPRGSNTAGVDVNVERLDAVVIDRYGNLLSHRTFWLKNATFMGVRRKRSWSLIGEQIHTLLKWLYSQGVSVIGLENPEIIGYLRYYWIRNGERRGNKWNWKVSMFRNSIIEGIMWKAPLYSMKTVYVNPKNTSREGERIGKKQGLDRHLGSAYIIAKRALKNLQRP

SEQ ID NO: 1290 - protein, 382 aa, unidentified
  REGION 1..382: note = Description of Unknown: uncultivated organism sequence
  REGION 1..382: note = Category: MG61 effectors
  REGION 1..382: note = Description: MG61-126 effector
MSYITIVLPFNVVGDPSKRLLSTTWLFKIASHRLLNLVKQSPVLPVTDIGWKRTFRGVVYDVIPYRRYVDGVITLIMGIYESCRQLGVDFRDVELSDWLMFQQAEMEYPVRGITFKDGYEFHITTIGYDGESERVIVKPTIPRVYKLLLDKILEEKQRHTARVVIKDYGVREGKLWVHGEVQLTLPMDFYYKHMVRYVRNYGDLYGGVDVNSDRINLVIVDVEGRLRDTYTFWFREITTRGYPKRRARSVIGMRVHEMLRYAYHNGVKTLFLENPDILGKLRLLWVRNGRRLHENYNWKVATFRSSVIEMIAMKTPLYDIGVKFVNPRGTTHSKEHEEAMRRYRLDRHAASAYTIALKGLKNLDQNSYPHSFKDETFKCKRL

SEQ ID NO: 1291 - protein, 359 aa, unidentified
  REGION 1..359: note = Description of Unknown: uncultivated organism sequence
  REGION 1..359: note = Category: MG61 effectors
  REGION 1..359: note = Description: MG61-127 effector
MSQYQTSSTVVDASTLVEYATITGRLIPASSEDYMKLTRLAWSFKRAVQVATRMIAKGVDSNDVLKELRKMLNKAYADSAFKIAKAIVRGCITNGGDPLHVEVRKLFIVSEGESSRLGNRNVRFEDTNLVKVKYPYDGSWTQFRAKFGEKYLPLLRELVKLAKQKKASYNAKIVFRNTKIYLHLSVPIQLYLKYFKRGDALGEFIAGFDLNSDRVNLVIIDKYERIVDVKTEWFPEVTSPGFSREKARALRLRALAKLLKYCYTHGVGAVVFENLLDVKKRRFAKSKTANRKISRFAKRELLHYVIVMSLKYGFKVLLADPKGTTSSAEHGRFMMKHGLDRHTASAYLVALRGLTHQIT

SEQ ID NO: 1292 - protein, 364 aa, unidentified
  REGION 1..364: note = Description of Unknown: uncultivated organism sequence
  REGION 1..364: note = Category: MG61 effectors
  REGION 1..364: note = Description: MG61-128 effector
MFENPLYTIKLSFNASGDSAGKVLSTAWLFKLACHRVLSRSKELLNALIPSKIAWVKMFYNDARDLIPNKRYAYGAIYLVYGIWEGARELGIDYRSVELSGWLMFQHYDREVDGNVIRILEDGSALVTTYSYDGSKDRVLIKSKPNRGHGELLKLVVESKEKYMPRVVVRGYNVRSGKLYVSGEIHVTIDYSFYLKHAARYGEPKGSLIGGVDVNSDRINLAIVDEKGNLRDCKTFWFPEAVARGYPRRRAWSVIGMKIHEMLRYAYSHGVATIALENPEALGYLKLAWVRNGDRKHENYNYKKSVFRNSIIERVAMKAPLYGLNTKFVDPKGTTSSREHDEIMKRFGLDRHIASAYMIASRSI

SEQ ID NO: 1293 - protein, 360 aa, unidentified
  REGION 1..360: note = Description of Unknown: uncultivated organism sequence
  REGION 1..360: note = Category: MG61 effectors
  REGION 1..360: note = Description: MG61-129 effector
MSYITIQLPFNVSGKMAGELLSTAWLFRMAVHRVLDTARQQALPRSRIGWERAFHKVAYDVIPQSDYADGAVVLVMGAYKSCRVLGLDFKSVELSDWLLFQPSKLTRKVGSIALKPNYEFHVTTIGYDGSYDRVVLRPVVSGALGLILDSVLDYGVEYMGRIVVRDYGVRDGKLWVRGGVHLTVPLLAYYKIMARYLENNGGLQGGVDVNVDRINLAIIGEDGELIDHKTFWYREVTSRGFPRGRAWSIIGMRIHELLNYARNNGVRVLYLENPGIIGKLRLMWVRNGNRGHENYNYRVAVFRSTIVEKIAMKAPLYSISVGYVNPRGTSSSKAHDELMRKHGLDRHTASAYLIALMGTR

SEQ ID NO: 1294 - protein, 380 aa, unidentified
  REGION 1..380: note = Description of Unknown: uncultivated organism sequence
  REGION 1..380: note = Category: MG61 effectors
  REGION 1..380: note = Description: MG61-130 effector
MSYITICLPFNVSGDVARRLFSTAWLFKAASHRMLDLAKHFPILPATDIGWKNTFRKIIYEIIPNRRYTDGVIVLVRGIYESCRQLGVAFKDVELGDWLMFQQVEKEYPVRNITLKQGYEFHITTVDYNGNSDRVVIKPSIPKNYKLLLDGVLEEKQKHIARVVIKDYGVRKNRLWIHGEIQLTIPLDFYYKHMTRYRVINGKLYGGVDVNVDRINLAIVDSEGKLRDTYTFWFREITARSYPRRRARTVIGMKVHEMLNYAYHHGVKTLFLERPDVLGRLRLLWIRNGRRLHRNYNWKVATFRSSIIEMITMKASLYSIKVDYVDPRGTTSSKEHDEIMKKYRLDRHTASAYLIALKGLNPKDPHIGFCPTATARSRSP

SEQ ID NO: 1295 - protein, 363 aa, unidentified
  REGION 1..363: note = Description of Unknown: uncultivated organism sequence
  REGION 1..363: note = Category: MG61 effectors
  REGION 1..363: note = Description: MG61-131 effector
MLQYRISDVIATRLVTYTTIIGKLIPTSPENHMKLVRLAYDFRRAVLYATRMIGKDMKTNDILKELRNMLNKAYGDSAYKVAKAIVEGCRFNGGEPRHIKIKRLFIVSEGEASRFGNRNVRLETTDIVKVRYPYDKSWIILRTCFGRKYLSLVREVSELAKQRRISYGARIVFKDGRIYLHLSIPINLYLKYFSKGKAHGELVVGFDINSDRMNMVIIDRYGKIRDIKTKWFSEVTSHGYPKSKAKARRLEALAKLLKYTYHHNVGIVVFENLFTIKKREYSRNPTANRKITRFAKKELLRYGILMAMKYGFKVLLVNPRGTTRSKEHDEVMKKLGLDRHVASAYLIALRGIRRYTMIQKAMI

SEQ ID NO: 1296 - protein, 368 aa, unidentified
  REGION 1..368: note = Description of Unknown: uncultivated organism sequence
  REGION 1..368: note = Category: MG61 effectors
  REGION 1..368: note = Description: MG61-132 effector
MGYVTVSLSFNVGGDAAKGLLSTAWLFKVATHRVLDLVRQSPVLPATDIGWKNTFRSVAYEVVPNRRYADGVVVLVRGIYESCRQLGVDFRSVELGNWLMFQQSEIEYPVRNITLREGYEFYVTTINYLGKSDRVVIKPTIPRDYKPLLDKVIEERVEHTGRVVIKDYGVRRGMLWIHGEVQVTLPLDFYYRHMIRYRQNDGRLYGGVDVNTDRINLAIVSENGELRDVRTYWFREVTARGYPRRRAWSVIGMRVHEMLRYAYHHGVKTLFLEKPDILGRLKLMWIRNGRRLHENYNYKIAVFRSSVIEVIAMKAPLYSIEAKYVNPKGTTNSREHDEAMRKYGLDKHTASAYLIALKALKQPKKSQP

SEQ ID NO: 1297 - protein, 365 aa, unidentified
  REGION 1..365: note = Description of Unknown: uncultivated organism sequence
  REGION 1..365: note = Category: MG61 effectors
  REGION 1..365: note = Description: MG61-133 effector
MSYVTLRLPFNVNGDMAKELLSTAWWFKTAAHRVLSLAKQMQFLPGTKIGWVSMFRSITYEIIPNRRYADGAVTLVMGIYESCRALGVDFRSVELGDWLMFQQSGLEYPAKSITLRPGYEFHVTTIKYDGLISRVVVKPTVSEDYRELIDAIYRERIKYMGRVVIRDYGARNNQLWVHGEIHITVPLDIYYEHMAKHRRNSGRLFGGVDVNTDRINLAIVDESGDLRDYKTFWFSETTARGFPKHKAWSIIGMRIHELLNYAYNHGVKTLFLENPEVLGRLRLMWVWNGGRNHENYNYKVMIFRSTIIEKIALKAPLYSIRVNYVNPRGTTNSKEHEEAMRRYRLDRHTTSAYLIALKGLTHQQK

SEQ ID NO: 1298 - protein, 363 aa, unidentified
  REGION 1..363: note = Description of Unknown: uncultivated organism sequence
  REGION 1..363: note = Category: MG61 effectors
  REGION 1..363: note = Description: MG61-134 effector
MSYVTITVSFNVSDEPAELILSTAWLFKIATHRVLEYAKNTPTLPASKIGWKNMFRSIAYDIISNRRYADSAVILVMGIYESCRQLGVNFKSVELSDWLMFQQSEKEYPPRNITIKSPEEAWVTIYSYDGRSERITLRISTSGAYKELLEAILEEKQPYNPRIVVKSWNVREGRLYVRGELQVSIPIDFYYKHMARYREPKSNLTGGVDVNVDRVNLAIIDEKGNLRDTYTFWFREVTARGYPRKRAWSVIGMRIHEMLRYAYHHGVSILALEDPDVLGRLRLMWIRNSRRLHEDYNWKVATFRSRVIEMIALKAPLYSIRVVYVDPKGTTSSKKHDEAMKEHRLDKHTASAYLIALKGLKQP

SEQ ID NO: 1299 - protein, 366 aa, unidentified
  REGION 1..366: note = Description of Unknown: uncultivated organism sequence
  REGION 1..366: note = Category: MG61 effectors
  REGION 1..366: note = Description: MG61-135 effector
MSYITLTLPFNICDGEARRLLSTAWLFKIASHKMLSIAKQFPALPATDIGWRNTFRKIIYEVIPNRRYTDGVIVLVRGIYESCRQLGVDFKDVELGDWLMFQQAEKEYPVRNITLKQDYEFWITTVDYNGNPERIVIKPSIPKNYKLLLDKILEEKQKHTARVVIKDYGVRKNKLWIHGEIQLTIPSDFYYKYMTRYKRNNGKLYAGVDVNADRLNLAIVDRYGRLRDVKTLWFENACRKGYPRRKARVLIGMAVHHMFHYAYHHGVKTLFLENPEVLGKLRLLWIRNGKKLHKNYNWKVSIFRTSIIEMITMKAPLYSIRISHVDPKGTTSSKEHDDVMGEYGLDRHAASAYLIALKGIERHKMI

SEQ ID NO: 1300 - protein, 363 aa, unidentified
  REGION 1..363: note = Description of Unknown: uncultivated organism sequence
  REGION 1..363: note = Category: MG61 effectors
  REGION 1..363: note = Description: MG61-136 effector
MTYVTLAFPFNVCCDVAKRLLSTAWLFKTATHRLLSIAKQLPALPGTDIGWKSAFREVVYEVIPNRRYADGVVVLIRGIYESCRQLKVDFKSVELSDWLMFQQSELEHPARNITLKPGYEFHITTVDYNRNTYRDVVKPTMPESYKLLLNKVLEERQKYAGRVVVKDYGVRKNALRVRGEVQITIPIDFYYRHMTRVKANKGKLCGGVDVNVDRINLAIVDDSGELRDVYTFWFREVTARGFPKRSARSIIGMRIHEMLSYAYHQGVKTLFLENPEVLGKLKLLWVRSGDRGHENYNYRVSVFRSSVIEMVALKAPLYGIEVRYVDPKGTTSSRKHDEITEKHRLDRHTASAYLIALKGLKQP

SEQ ID NO: 1301 - protein, 363 aa, unidentified
  REGION 1..363: note = Description of Unknown: uncultivated organism sequence
  REGION 1..363: note = Category: MG61 effectors
  REGION 1..363: note = Description: MG61-137 effector
MTYITLVFPFNVCCDVAKRFLSTAWLFKIATHRLLNVVKHFPVLPATDIGWKNTFRGIAYEIIPNRRYADGVVTLIRSIYESCRQLRIDFKSVELSNWLMFQQSELEYPARNITLRSGYEFHITTVDYNKNTYRDVVKPIIPKNYKPLLDKMLEERHKYTGRVVVKSYGIRKGNLWVRGEIQITIPTDFYYKHMTRCGESKGSLIGGIDVNVDRLNLAIIDEKGNLRDCKTFWFSEATTREFSRRSARSIIGAKIREMLSYAYHHNVKTLFLESPEVLGKLKLLWVRNGDRKHENYNYKKAVFRSSVIEMIELKTPLYGIEAKYVDPKGTTNSEEHDEAMKRYGLDRHTASAYLIALRGLRNQ

SEQ ID NO: 1302 - protein, 363 aa, unidentified
  REGION 1..363: note = Description of Unknown: uncultivated organism sequence
  REGION 1..363: note = Category: MG61 effectors
  REGION 1..363: note = Description: MG61-138 effector
MSYVTVTAGFNASGKPAELILSTAWLFKIATRRVLEYAKSTPTPPASKISWKNAFRSVAYDVIPNRRYADSTVVLVMGIYESCRQLGVDFREVELGDWLMFQQSEKEYPPRNITIKSPEEAWVTVYSYDGWSERIALKISTSGAYKELLETILGERQPYNPRIVVKSWNAREGRLYVRGELQVSIPIDFYYKHMARYRENRGRLYGGVDVNTDRVNLAIVDEHGDLRDTYTFWFRGVVARGYPGKRAWTVISMRIHEMLKYAYHHGVKTLYLEDPGVLGGLRLMWIRSGRRLHEGYNWKVATFRSRVIEIIALKAPLYSIRVVYVDPKGTTNSKAHGEAMKKHRLDKHTASAYLIALKGLKQP

SEQ ID NO: 1303 - protein, 373 aa, unidentified
  REGION 1..373: note = Description of Unknown: uncultivated organism sequence
  REGION 1..373: note = Category: MG61 effectors
  REGION 1..373: note = Description: MG61-139 effector
MSIRRLARNIILENDYPLITHVTVIGKLIPNNSQDYMKLVRLAWSFRKAVEQMAREIVNGASMKDATKKLYNALPNYVYLESAYKHAKLIVEGSRFNNGNPRHIHVRKFFIVSRGNKYDYGNRNIRLVPSEKYFEVQVKYPWDGSWIKARTFFGRRYIPLLNELMELCRRRLEGYGARIVFKDGRMELHLSIPLYLYLKYFSYPKCKGYELVAGLDLNSDRINMVVIDGDKRIVAMRAAWFPEVTLPGFPRNKARDIRLKKLKELLVFARRIGVDYVVFENLFAVKKSSRVSSPSGNRKITRFAKRQLLQHGLLMAMKQGLTPILVDPRGTTHSHEHEEVMNRRGLDRHMASAYIIACKGLKIIKTHEKYHKT

SEQ ID NO: 1304 - protein, 376 aa, unidentified
  REGION 1..376: note = Description of Unknown: uncultivated organism sequence
  REGION 1..376: note = Category: MG61 effectors
  REGION 1..376: note = Description: MG61-140 effector
MKLPKYITSSLDFHVDDDYAKNILATAWLSKLVAHRVLGLVKENPLLADLLEYRFLKMLRGKCYNILPNRRYVDGVLKLIHSTLKSAKALKVSIEDIELKQWLLFQSDGERGYARGNMNIRFIDTCHVRVLTLNYDRRTRYVELEVTTPKGWRKLIEVLVDRASRGVIGYPARVIIKDYGMGKNGLHVHGEVQVMIPYSLYLEVMRRNTTPKGGNIGGIDINVERLDAVVIDEYGNILSYRTFWIKNATFMGVRKKRAWSLIGEQIHALLKWLYSQGVHVIGLENPEIIGYLRYYWIRNGERRETKWNWKLSMFRNSIVERITWKAPLYSMKAIYIDPRNTSKEGEKIGEKLGLGRHLGSAYIIARRVLKTVLQRP

SEQ ID NO: 1305 - protein, 292 aa, unidentified
  REGION 1..292: note = Description of Unknown: uncultivated organism sequence
  REGION 1..292: note = Category: MG61 effectors
  REGION 1..292: note = Description: MG61-141 effector
MNLSDGWGIDFREVELGDWLMFQQSEKEFPPRNITLKSEDEAWVTAFGYDGESRRLRLRISASGSFRRLLEAILREKQPYNPRITLKSWNVRGGKLYGRGELQVSVPTDFYYRHLARYKTNSGRLYGGVDVNSDRINLAVVDGSGILRDAHTIWFREVTARGYLRHRARTVIGMGVHEMLSYAYHHGVKTLFLENPKVLGRLRLLWIRNGKRLHKNYNWRVSTFRASIIEAIAVKAPLYSIRVEYIDPKGTTRSKEHDELMRRYGLDRHMASAYLIALRGMERYTTIQKATV

SEQ ID NO: 1306 - protein, 363 aa, unidentified
  REGION 1..363: note = Description of Unknown: uncultivated organism sequence
  REGION 1..363: note = Category: MG61 effectors
  REGION 1..363: note = Description: MG61-142 effector
MTYVTLTFSFNVCCVVAERVLSTAWLFKIATHRLLSIAKQAPILPGTDIGWKNTFRGIVYEVIPNRRYADGVVAFVRGVYESCRQLGADFRVVELSDWLMFQQSELEYPAKNITLKPGYEFHITTIDYNENSYRDVVKPVVPKSYRLLLDKVLEGRQRYMGRVVLKSYGIRKDDLWVRGEVQITIPIDFYYKHMARARASNGMFYGGVDVNTDRINLAIIDKEENLRDCKTFWFSEVIARGFLRRSARSIMGAKIHEMLRYAYSHGVSTIALENPDVLGKLKLLWVRSGDRKHENYNYRVSIFRSSVIEMIALKAPLYGIEVKYVDPKGTTNSREHDDAMMKYRLDRHTASAYLIALRGLRHQ

SEQ ID NO: 1307 - protein, 365 aa, unidentified
  REGION 1..365: note = Description of Unknown: uncultivated organism sequence
  REGION 1..365: note = Category: MG61 effectors
  REGION 1..365: note = Description: MG61-143 effector
MSYVTLRFPFNVNGGVAGELLSTAWWFKVATHRVLSLAKQQQVLPGTPVGWRGMFRGVAYRVVPNARYADGVVTLVMSIYESCRELGIDFRSVELSDWLVFQQSWLEYPAKSITLKPGYEFHVTTIRYNGSTSRVVIRPTVPENYKGLLDVVLAGRVEYMGRVVVRDYGVRNNQLWVRGEVQITVPLDLYYRHMARHKRNAGRLFGGVDVNADRINLAIIDDGGVLKDYKTFWFSEVAVRGFPRYKAWRIIGMRVHELLNYAYHHGVKTLFLENPEVLGRLRLMWIRAGDRKHENYNHKVSIFRSSIIERITMKAPLYSIEVKYVSPSGTTNSVEHDELMRRYGLDRHTASAYLIALRGLTHQQK

SEQ ID NO: 1308 - protein, 356 aa, unidentified
  REGION 1..356: note = Description of Unknown: uncultivated organism sequence
  REGION 1..356: note = Category: MG61 effectors
  REGION 1..356: note = Description: MG61-144 effector
MSRCQTSSIIDASSIVNYVTIIGRIYSASSEDYMHLVRLARDFRRAVQVATRMIARGLEENSVLRELRRMLNKAYADSAYKAAKTMVEGCIFNGGNPLHIEVKKPFIVSEGESSRLGNRNVRLEDTCLVKVKYPHDGSWITLRAEFGEKHLPLLRELVDLAKQKKLSYTARIVFKEGDIYLHISIPIQLYLKYFKEGEARGQLIAGFDLNSDRVNLVIIDEHGEIVDARTAWFPETTSHGFPREKAKALRLNALARLLKYCYRHGVSVVVFEDLLSVKRKRFTRSRTANRKITRFAKKQLIQHGVVTALKYGFKALLVDPKGSTNSREHDELMKKFGLDRHTASAYLIALRGLRNQ

SEQ ID NO: 1309 - protein, 323 aa, unidentified
  REGION 1..323: note = Description of Unknown: uncultivated organism sequence
  REGION 1..323: note = Category: MG61 effectors
  REGION 1..323: note = Description: MG61-145 effector
MFRREAYSVIPSRRYADGVVALVRGIYESCRALGVSFRDAELGDWLMFQQSEREYPARNITLKAGYEFHVTVVGYDGSTGRVTVEPTVPKSYRVLLDGVLREKPKYCARVMVKGFGERKSDLWLNGEIHLTLPLELYHRCMAKDTPATGSNVAGVDVNVDRLNVAIVDTSGRLRDTTTFWFREVTSRGYPRRRARCVIGMSVHRMLKYLASHGVGMVVLENPEVIGYLRYCWVRSGERGSRNYNYKVAVFRSSIIEMIALKATLYGLKSVYVDPRGTSSSQEHRFVMEKHGLDRHTASAYLIALKHLQDEKIMNNRKAHEQHK

SEQ ID NO: 1310 - protein, 374 aa, unidentified
  REGION 1..374: note = Description of Unknown: uncultivated organism sequence
  REGION 1..374: note = Category: MG61 effectors
  REGION 1..374: note = Description: MG61-146 effector
MSGVEYVTLRLPFHATGEDARLIYWTAWVCKLCAHRLLETVKHNLLLADLSQYDFIKLGRKLCYDILPNRRYVDGISTLIHASLQSAKALKVDISKLELRPWLLFQSEAEPWAKGNLNIQFTSYDTVKVLVFDKDKSSTKITLEPVIPKGYSRLVRVLVDKALRKEVGYPARLYVTDYGDSLEHLYGEIQVMVKYDLYLEVMKRHEKPPGENIAGIDVNIDRINLVVIDRNGDIVWKYTARFPQVTARGFKRKSAWSIIGEAIHGVLKNAYSHGASVVAVENPGVIGYLRYYWIRNGDRKTRNYNYRVSIFRNSIIERIMWKAPLYSLHVVTVKPRGTTSSKEHEYVVKQHGLDRHTASAYLIALRARRNLQRH

SEQ ID NO: 1311 - protein, 327 aa, unidentified
  REGION 1..327: note = Description of Unknown: uncultivated organism sequence
  REGION 1..327: note = Category: MG61 effectors
  REGION 1..327: note = Description: MG61-147 effector
MGSSRPPSGKLREQGSPHPPDRRYVDGAITLTYSIYESAQALGVSFNDIEFKSWLLFQQSEKEHPCRNITLRNDYSFRITTINYRGEGKRISLKPTIPKNYKRILGKIIEGKRPYVARVVLKGFGERKNALWIHGEVHLSVSYRFYLGHFKEFKRNYGKHFGGVDVNVDRINLAIVDKYGRLRDVKAFWFEEASWKGCPRQRAWSVIGVAIHEMLKYAYRHGVKTLFLENPEVLGYLKTLWVRKGERRSNNYNYRVQIFRNGIVERITVKAPLYSIGVEYVNPKGTTNSGEHEEIMREYGLDRHSASAYLIALRGIKSHNLIRKATI

SEQ ID NO: 1312 - protein, 305 aa, unidentified
  REGION 1..305: note = Description of Unknown: uncultivated organism sequence
  REGION 1..305: note = Category: MG61 effectors
  REGION 1..305: note = Description: MG61-148 effector
MESRHLSTPLQSAKALKVDVSRLELRQWLLFQSEAEPWAKGNLNIRFVDYSRVGVLVFDRDKSSKKIIVEPVISKGYAKLVKALVDKALRKEIGYPARIYITDYGERLKHLYGELQVMVKYKLYLEVMRRCDEPLGNNIAGVDVNADRLNLVVINRDGEIVWKYTARFPQVIARGCPGKRAWSIIGEAIHSVLRNAYSHGAFVVAVENPKIVGYLRCYWIKSGDRGHESYNYKKSIFRSSLIERIALKAPLYGLSVKFVNPKGTTSSKEYDKAMKRYGLDRHAASAYLIALKARKTYKNLERPTS

SEQ ID NO: 1313 - protein, 365 aa, unidentified
  REGION 1..365: note = Description of Unknown: uncultivated organism sequence
  REGION 1..365: note = Category: MG61 effectors
  REGION 1..365: note = Description: MG61-149 effector
MNYITITAGFNASGEKAKLLLSTAWLFKIASHRVLSNAKSMPILPIFKIGWKNTFRRTAYEFIPNRRYADSVVVLVMGIYESCRQLGIDFKKVELSNWLMFQQSEKEYPPRNITLKDINEVWITVFKYNRESKRISLKISTSRDFRKLLEAILREKQPYNPRIILKSWNTRDGKLYVRGELQISIPIDFHYKHMTRYRKNYGRLYGGVDVNCDRINLAIVDGEGNLRDTYTFWFREVTARGYPRRRARTIIGMKVHEMLKYAYHHGVKTLFLENPNVLGKLRIIWIRNGRRLHRNYNWRVSVFRNSIIEMIALKAPLYSIKTKYVDPRGTTHSREHDMVMKKYRLDKHTASAYLIALKGLNHKFI

SEQ ID NO: 1314 - protein, 361 aa, unidentified
  REGION 1..361: note = Description of Unknown: uncultivated organism sequence
  REGION 1..361: note = Category: MG61 effectors
  REGION 1..361: note = Description: MG61-150 effector
MSLFRMSDVVDASTVVDYVTIIGKLHPVSSEDYMRLVRLAWDFKNAVRITTRMIAKGVDKNSILRELRGMLNKAYADSAYKVARAIVEGCLFNGCNPLHIEVRRPFIVSEGESSRLGNRNVRLENTGLVKVKYPYDGSWITLRTEFGQKYLPLLRELVDLARQREVSYGARIVFRGGSIYLHLSIPIKLYLKHFRKGEAEGGFVGGFDLNSDRVNLVIIDEHGRIVDTRTAWFTETTSHGFPRNRARALRLRALAKLLKYCYTHNVGVVVFENLPLIKRRRFTRSRVGNRKITRFAKRQLIQYGIVMALKYGFKTLLTNPRGTTNSKEHEELMRRYGLDRHTASAYLTALRGLKALNENHK

SEQ ID NO: 1315 - protein, 365 aa, unidentified
  REGION 1..365: note = Description of Unknown: uncultivated organism sequence
  REGION 1..365: note = Category: MG61 effectors
  REGION 1..365: note = Description: MG61-151 effector
MSYTTICLPFNVDGEEARGLLGTAWLFKIASHRMLSFAKQFPVLPATDIGWKNTFRKTIYEIIPNRRYTDGVIVLVRGIYESCRQLRVNFREVELGDWLMFQQVEKEYPVRNITLKQRCEFRISTVDFNGNSERIVIKPSIPKSYKFLLDRILEEKQKHTARVVIKDYGIRKSKLWIHGEIQLTIPLNFYHKYMIKYRRNYGKLYGGVDVNTDRINLAIVDKYGRLRDTYTFWFREVTARGYSRRKARSVIGMRVHEMLKYAYHHGVKTLFLENPEVLGKLKLLWIRNGKRLHKNYNWKLSTFRSRIIEMIAMKAPLYSIKVGYVDPKGTTNSKEHDEVMRKHRLDRHTASAYIIALRGLNHKFI

SEQ ID NO: 1316 - protein, 289 aa, unidentified
  REGION 1..289: note = Description of Unknown: uncultivated organism sequence
  REGION 1..289: note = Category: MG61 effectors
  REGION 1..289: note = Description: MG61-152 effector
MVRSIYESCRQLGVDFRGVELSDWLMFQQGELEYPARNITLKPGYEFHITTIDYSKNSYRDVVKPIIPKSYRLLLDKVLDDRQRYTGRVVLKSYGIKECNLWVQGEVQITIPIDFYYKHMARAKAGNGKLYGGVDVNVDRINLAIVNGGGELRDVYTFWFEEASRKGCSRQRARSIVGMRVREMLEYAHRHGVKVLFLENLEVLGKLKLLWIRSNDRRHENYNYKVSVFRSSVIEMIALKAPLYSIEVKYVDPKGTTNSEEHDEIMKRFGLDRHIASAYLIALRGLRHR

SEQ ID NO: 1317 - protein, 368 aa, unidentified
  REGION 1..368: note = Description of Unknown: uncultivated organism sequence
  REGION 1..368: note = Category: MG61 effectors
  REGION 1..368: note = Description: MG61-153 effector
MSYITIALSFNVGGEVAGRILSTAWLFKAATHRVLHLAKSSPALPGSDIGWKAAFRKDAYAVIPNRRYADGAVVLVRGIYESCRELGVDFRGVELGDWLMFQQAEKEYPARNITLRPGGEVYVTTISYSGAVERVVLKPTVPKSYATLLEKILEERQEHAARVVIKGYGVRKGVVWISGEVQLTIPLTFYYRHMARYRANKGSLYGGVDVNVDRVNLAIIDNSGELRDTYTFWFREVVARGYPRRSARSVIGMRVHEMLEYAYHHGVKVLFLENPAVLGRLRLLWARSTERRSENYNWKVSAFRSSIIEMIALKAPLYGIEVAYVNPKGTSNSREHSEAMKKLRLDRHATSAYLIALRGVAKQSKRAQ

SEQ ID NO: 1318 - protein, 363 aa, unidentified
  REGION 1..363: note = Description of Unknown: uncultivated organism sequence
  REGION 1..363: note = Category: MG61 effectors
  REGION 1..363: note = Description: MG61-154 effector
MSTLKLSNVDKLMPHVTIIGKLVPGTSDDYMKLVRLAWSFRRAVELMIREVMNGTSMKDVTKKLYQILPNYIYLESAYKHAKLIVEGCKFNNGVPGHIHIRKLFIVSRGNKYDKGNRNVKIIPNTKFFRVLIKYPWDSSWIECRALFDEKYIPLLRELLELAYQRKEGYSARIVFREGRIELHISEPLYLYLKHFSLPKRRGYGLVAGLDLNSDRINMVVIDSDSRIVAMKTAWFPELTLHGFPREKARDTRLKKLKELLSYARRIGVDYVAFENLFVVKKRSKVSSPSGNRKITRFAKKQFLQHGLLMTLKLCLTPVLVDPKGTTHSREHKEVMKKRGLDRHMASAYLIAIKGLKVIRNHEK

SEQ ID NO: 1319 - protein, 363 aa, unidentified
  REGION 1..363: note = Description of Unknown: uncultivated organism sequence
  REGION 1..363: note = Category: MG61 effectors
  REGION 1..363: note = Description: MG61-155 effector
MSFITIRFPFDANGSVAGELLSTAWWFKVATHRVLSLAKRQQVLPGTKIGWINTFRESAYGIVPNRRYADGAVILMMGIYESCRALGVDFRSIELSSWLMFQQVELEYPARNITLKPGYEFHVTTVDYGGNTHRVVVKPTVPGNYGLLLDKVLRERQRYTGRVVLRSYGIGGSNLWVQGEVQVTIPMGFYYRHMARYRRNDGKLYGGVDVNTDRINLAIIDEDGELIDHKTFWFSEASRKGCSGRRAWSIIGMRIHELLDYAYNNGVNTLFLENPEVLGRLKLMWAKSGDRGHGNYNHKVMTFRSTIIERVALKAPLYSIEVKYVNPKGTTNSVEHDEAMRKHGLDRHNASAYLIALRGLKHQ

SEQ ID NO: 1320 - protein, 364 aa, unidentified
  REGION 1..364: note = Description of Unknown: uncultivated organism sequence
  REGION 1..364: note = Category: MG61 effectors
  REGION 1..364: note = Description: MG61-156 effector
MSQYQISDVVNASNIVNYVTIVGRLVPISTEDYMKLVRLAHEFRKAVLYTTRMIVAGMNVNAILKELRRMLNKAYGDSAYKVAKAIVEGCKFNGGNPRHVKVRKLFIVSEGEASRFGNRNIRLESTSMVKVKYPYDGSWLTFKARFGEKYLPLIEELVKLTKHKEISYSARIVFRDGKIHLHLSIPITLYLRYFSKGRTKGSLVAGFDLNSDRINMVIIDRYSRIRDVKTEWFSEVTSHGYPRGKARAKRLEALARLLRYAYHHNVGTVIFENLLVIKKKRHTKSKRANRKIARFAKRELLQHGIVMAMKYGFKVLLVNPKGTTNSEEHSKIMRRYGLDRHTASAYLIALRGIEKYTKMQKAII

SEQ ID NO: 1321 - protein, 358 aa, unidentified
  REGION 1..358: note = Description of Unknown: uncultivated organism sequence
  REGION 1..358: note = Category: MG61 effectors
  REGION 1..358: note = Description: MG61-157 effector
MVGEVREPEITHVTVTGRVIQLDSDSYMELVLLAYRFRKALAKAVKMYAEGVGKDTIVKEVTKELNLGYADTIYKLAKLIVEGVRHNNSNPLRIRLRKLFIASRGFSSNKGNRNIRLLSSSELEVNIPWKGWVKFKVLFGKQYIPLIHELVEKSLCKEMSYTAKILFKNGKIYLHVSVPVELYLKHFKKGEVHGKLIATFDLNSDRINMVILDELSIIRDVKTEWFPEITSHGFPRNKANTLRLQALARLLSYAHHHGVGVVMFEDLERIKKQRCTKSRSANRKIAKFPKRILLKHAIVMAMKYGFKVYLVNPSYTSRVGEELGKLLGLDKHTASAYVLTLKTGKNFASLTNLLKFSK

SEQ ID NO: 1322 - protein, 380 aa, unidentified
  REGION 1..380: note = Description of Unknown: uncultivated organism sequence
  REGION 1..380: note = Category: MG61 effectors
  REGION 1..380: note = Description: MG61-158 effector
MDYINLRLPFNVDGDVARELLSTAWWFKVATHRVLAIAKQQVLPGNRIGWKNAFRQFAYEIIPNRRYADGVVTLVMGIYESCRALGVDFRGVELGDWLVFQQSELEYPAKSITLRQGYEFHITTIKYDGSIGRVVVKPTMSEDYRELIDAIYRERVRYMGRVVIRDYGVRNNQLWLHGEVHVTVPLDVYYEHMTRHKRNGGKLFGGIDVNADRINLAIIDEEGGLRDYKTFWFSEASRKGFGRHSAWSIIGMRIHEMLDYAYHHGVKTLFLENPEVLGRLKLMWVRGGDRKHENYNYKVSVFRSSIIERIALKAPLYSIKVGYISPRGTTNSEEHDELMKKYGLDRHTASAYLIALRGLRHQQKMSATNNHENRNSPLTD

SEQ ID NO: 1323 - protein, 363 aa, unidentified
  REGION 1..363: note = Description of Unknown: uncultivated organism sequence
  REGION 1..363: note = Category: MG61 effectors
  REGION 1..363: note = Description: MG61-159 effector
MGYITVSLSFNVGGDVAKGLLSTAWLFKVATHRVLDLARQAPVLPATDIGWRNTFRSVAYEVIPNRRYADGAITLVRSIYESCRVLGVDFRGVELDDWLMFQQSEMEYPVRNVTLREDYEFHITVIDYGGSASRVIIKPTIPKNYRLLLDKILEERQEHTGRVVINGYGVRGNTMWVHGEIQLTIPIEFYYKHMTRYRQNNGKLFGGVDVNADRINLVIVDKDGRLRDIKTFWFEEASRKGVTRHRARSIIGMAVHEMLGYAYHHGVKTLFLENPDILGRLKLMWIRSGDRRHENYNWKKAIFRNSVIEMIAMKAPLYGINVEYVNPKGTTSSEEHDEVMRRYGLDRHAASAYLIALKGLKQP

SEQ ID NO: 1324 - protein, 364 aa, unidentified
  REGION 1..364: note = Description of Unknown: uncultivated organism sequence
  REGION 1..364: note = Category: MG61 effectors
  REGION 1..364: note = Description: MG61-160 effector
MDYFTIRFPFNVNNSVAKELLSTAWLFKIATHRVLAVAKQQEVLPGTKIGWVNAFRSIAYGVVRNRRYADGAVTLVMGIYESCRSLGVDFRGVELGDWLMFQQSELEYPNRNVTLKPNYEFHVTTVRYNGATGRVVLKPTIPKTYKALLDAILTERVGYMGRVVIRDYGIRNNQLWVHGEVQVTVPLDLYYEHMARHKRNSGRFIGGIDVNSDRINLTIIDSIGRLIDHKTFWFSEATARGFPKHSAWGIIGMRIHEMLNYAYNNGVKTLFLENPEVLGRLKLVWIKNGDRGRENYNHKVATFRSTIIERITMKAPLYSIEVKHVNPRGTTNSKEHDELMKRYELDRHTASAYLIALRGLGMMN

SEQ ID NO: 1325 - protein, 351 aa, unidentified
  REGION 1..351: note = Description of Unknown: uncultivated organism sequence
  REGION 1..351: note = Category: MG61 effectors
  REGION 1..351: note = Description: MG61-161 effector
MAGEVREPEVAHITITGRIIPLDNDNYMELVLLAHRFRKSLAKAIKMYAKGINRNTIVKEVTKELNLGYADTIYKLAKLIVAGARHNNSNPLKIRIRKLFIASRGFAANKGNRNIRLLSTSGLQVNIPWKGWVPFKVLFGEQYVPLVKELVEKALAKKLSYSAKIVFRNGEVYLHVSIPVELYLKYFSKGRANGSLVASFDLNSDRINMVIVDRQGIIRDTRTEWFPEVTSHGFPRNKAETIRLQALAKLLDYAYDHGVGIVLFEDLEMIKKRKHTRSRTANRKISRFSKRKLLEHGIIMAMKYGFKVYLVNPAYTSKLGEKLGKEVGLDKHTASAYLTALKGLKKLQQLL

SEQ ID NO: 1326 - protein, 363 aa, unidentified
  REGION 1..363: note = Description of Unknown: uncultivated organism sequence
  REGION 1..363: note = Category: MG61 effectors
  REGION 1..363: note = Description: MG61-162 effector
MLQYQTSDVIATRLITYTTIIGKLIPTSPENHMKLVRLAYDFRRAVLYATRMIGKDMKTNDILKELRNMLNKAYGDSAYKVAKAIVEGCRFNGGEPRHIKIKRLFIVSEGEASRFGNRNVRLETTDIVKVRYPYDKSWIILRTCFGRKYLSLVREVSELAKQRRISYGARIVFKDGRIYLHLSIPINLYLKYFSKGKAHGELVVGFDINSDRMNMVIIDRYGKIRDIKTKWFSEVTSHGYPKSKAKARRLEALAKLLKYTYHHNVGIVVFENLFTIKKREYSRNPTANRKITRFAKKELLRYGILMAMKYGFKVLLVNPRGTTRSKEHDEVMKKLGLDRHVASAYLIALRGIRRYTMIQKAMI

SEQ ID NO: 1327 - protein, 356 aa, unidentified
  REGION 1..356: note = Description of Unknown: uncultivated organism sequence
  REGION 1..356: note = Category: MG61 effectors
  REGION 1..356: note = Description: MG61-163 effector
MSQSRTSSVVDATTLIEYATIVGRLIPASGEDHMKLARLAWEFRRAVQVATKMIAKGEEANIILKELRRMLNKAYADSAFKQAKAIVKGCLATGGDPRRIEVTKLFIISEGETSRNGNRNVRLEDTSLVKVKYPYDGSWIQLEAKFGEKYLPLLRELVELAKQRKVSYNARIVFRRGRIYIHVSVPIYLYLKHFEKGEARGELIAGFDLNSDRINLAIIDRYGGLVDAKTAWFTEVVSHGFPRNKAKALRLRALAKLLKYCYTHGVGIVVFENLYVVKKHRYTKSRNGNRRISKFAKRELLEHAIVMSLKYGFKVLLVDPKGTTNSKEHDEAMKRHGLDRHTASAYLIALRGLNPS

SEQ ID NO: 1328 - protein, 369 aa, unidentified
  REGION 1..369: note = Description of Unknown: uncultivated organism sequence
  REGION 1..369: note = Category: MG61 effectors
  REGION 1..369: note = Description: MG61-164 effector
MVESPLYTIKLAFNVDGDRAKKILSNAWLFKLACHRVLSRSKELLNALISSKIAWIKMFYSDARDLIPNKRYAYGAIYLIYGIWESSRSLKIDYTNVELSDWLMFQHYDREVDGNVVRVYSDGSALVTTYSYDGSKDRVLVKAKPNRGHEKLLKLVVESREKYMPRVLVRGYNVRDRELYISGEIHVTISYDFYLKHVKRYGNPKGDLIGGVDVNADRINLAIIDEKGNLRDYKAFWFSETTARGYPRRGVWSVVGMKIHEMLRYAYNHGVATITLENPEVLSYLKLAWVRNGDRKHENYNYKVSVFRNSIIERIATKAPFYGLNTKFVDPKGTTNSREHDEIMKRFGLDRHTTSAYLIALRGLRNQRT

SEQ ID NO: 1329 - protein, 351 aa, unidentified
  REGION 1..351: note = Description of Unknown: uncultivated organism sequence
  REGION 1..351: note = Category: MG61 effectors
  REGION 1..351: note = Description: MG61-165 effector
MCKLCAHRLLEHIKQTPLLADLSQYDFIEIGRKLCYDIVPNRRYIDGISTLIHASLQSAKALKVDVSRLELRQWLLFQSEAEPWAKGNLNIRFVDYSRVGVLVFDRDKSSKKIIVEPVISKGYAKLVKALVDKALRKEIGYPARIYITDYGERLKHLYGELQVMVKYKLYLEVMRRCDEPLGNNIAGVDVNADRLNLVVINRDGEIVWKYTARFPQVIARGCPGKRAWSIIGEAIHSVLRNAYSHGAFVVAVENPKIVGYLRCYWIKSGDRGHESYNYKKSIFRSSLIERIALKAPLYGLSVKFVNPKGTTSSKEYDKAMKRYGLDRHTASAYLIALKARKTYKNLERPTS

SEQ ID NO: 1330 - protein, 356 aa, unidentified
  REGION 1..356: note = Description of Unknown: uncultivated organism sequence
  REGION 1..356: note = Category: MG61 effectors
  REGION 1..356: note = Description: MG61-166 effector
MSRCQTSSAVRAEKLIPYATVVGRLTANTCDDYMKLVRLVYEFRKAVTYAARMVVRGVNVNEALKELRGMLNKAYGDSAYKVARAIVKGCRLNGGDPRHIKVRGLFIVSEGEASRSGNRNVRVEATDVVRIKYPFDGSWLTFKARFGERYLPLVQELVELAKDCKVSYGARITFRGGRVYLHLSVPVELYLKHFRKGDAKGGLVAGLDLNSDRINMAIVDRCGRIRDIKAEWFPEVVCHGYPRGKARARRLEALARLLNYAYHHGVGRVVFEDLLAIKHRTRTGSPSANRRITRFAKKQLLRHGILMAMKYGFEVLLVNPRGTTRSKQHDEVARKYGLDRHTASAYMVALKGLNLP

SEQ ID NO: 1331 - protein, 374 aa, unidentified
  REGION 1..374: note = Description of Unknown: uncultivated organism sequence
  REGION 1..374: note = Category: MG61 effectors
  REGION 1..374: note = Description: MG61-167 effector
MNEVKYVTLRLPFHAVGEGAKPIYWTAWLSKLCAHRLLDQVKQNPLLASLSQYEFVKMGRSLCYGVLPNRRYVDGVSTIIHASLQSAKALKIDVTKLELKPWLLFQSEAEPRAKGNLNIQFADYSTVKVLVFDKDGTSRKIAIRPVVPKGYAKLVKVLVDKALRREIGYPARIYVRDYGDGLAHLYGELQVMVKYDLYLEVMKRHGKPLGENIAGVDVNVDRLNLVVVNRDGDIVWTHTVRFPQVTARGFPRKKAWSIIGEAVHSVLKNAYSHGASVLAVESPEVIGYLKYYWIRNGNRGSRSYNYRVSIFRNAIIERLVWKAPLYGLKVVPISPRGTTRSKDHDYVMRRYGLDRHTASAYLIALKTRNIVRTY

SEQ ID NO: 1332 - protein, 364 aa, unidentified
  REGION 1..364: note = Description of Unknown: uncultivated organism sequence
  REGION 1..364: note = Category: MG61 effectors
  REGION 1..364: note = Description: MG61-168 effector
MNDTPLYTLKLSFNVSGEVARKILSTAWLFKLACHRVLSKSKELEKHLIPSKVAWIKMFYDDARSFIPNKRYAYGAIYLVYSVWESARGLKVDYKSVELSDWLLFQHYEREVDGNVIRVSEDGSALITTCSYNGSKDRVLVRAKPNRGYAKLLRFAVESREKYMPRVVVRGYNVRGGALYVHGEIHIVISYDFYLKHTTRFREPRGGLVGGVDVNADRINLAIVDEKGNLRDYKTFWFRETTARGYPRRSAWSTVGEKIHEMLRYAYYHGVSTIAMENPETLGYLKLAWIRGNDRRHENYNYKKSIFRSSVIERIAMKAPLYGLSVKFINPKGTTSSRDHAEAMKRYGLDKHTASAYLIALRCI

SEQ ID NO: 1333 - protein, 373 aa, unidentified
  REGION 1..373: note = Description of Unknown: uncultivated organism sequence
  REGION 1..373: note = Category: MG61 effectors
  REGION 1..373: note = Description: MG61-169 effector
MNGPYLTLRLPFNVYRDEARLLLSTARLFRFIVLHLHSLLLEENPHITSLIALKRVYRRRLQEMLPNRRYVDGAITLVYSIYESAQALGVSFSDIEFRNWLLFQQSEKEYPCRNITLQKDYSFRITTINYQGESIRIALKPTIPKNYKQVLDKIIEKKQPYVARVVLKGFGERKKILRVHGEIHLSILYKFYLEHFRRYKRNYGKLYGSVDVNVDRINLAIVDRYGRLRDTKTFWFEEASWKGCPRHRAWSIIGLAIHSMLKYAYHHGVKTLFLENPEALGYLKTLWIKKGERRNSNYNYRVQIFRNRVIERIAMKALLYSINIEYVGPKGTSHSKEHDEIMRKYGLDKHTASAYLIAFKGIERHTTIQKAII

SEQ ID NO: 1334 - protein, 379 aa, unidentified
  REGION 1..379: note = Description of Unknown: uncultivated organism sequence
  REGION 1..379: note = Category: MG61 effectors
  REGION 1..379: note = Description: MG61-170 effector
MSKSVVEYVTLRLPFHVTGENARLIYWTAWLCKICAHRLLELIKQNPILAGLSQYDFIKISRKMCYDIVPNRRYIDGVSTLIHASLQSAKALKVDVSKLELKSWLLFQSEAEPWAKGNLNIQFTDYDTVRVLVFDKDKSTRKITIKPIIPKGYAGLIKTLVDKALKKEIGYPARVYITDYGKRLEHLYGELQVMVRYSLYLEVMKRYDEPRGDNIAGVDVNVDRINLVVINRDGDIVWKYTARFPQVTARGYPRKRAWSIVGEAIHGILKNAYSHGASVIAVENPEVIGYLKYYWVRNGDRKSENYNYKVSIFRNSIIERIVWKAPLYGLHVVTVDPKGTTHSKDHEYVMRRYGLDRHTASAYLIALKARRNLQKPIET

SEQ ID NO: 1335 - protein, 378 aa, unidentified
  REGION 1..378: note = Description of Unknown: uncultivated organism sequence
  REGION 1..378: note = Category: MG61 effectors
  REGION 1..378: note = Description: MG61-171 effector
MKDTGLPDYIAINIPFTVNGEEAKLVWYTAWFSKLCAHRLLNDVKGNDALLGFSQASFLKYARERCYELLPNRRYIDGVATLVHSTLRSARKLGVNIRDIELGQWLLFQSEAESEKRGNLNIRLLSVNRAEVLVLNYDGASKRIDIGLKTPKGYVELLKVLIERAGKYEVGYPARVMVRGYNFRPGNMHLYCGLQVMVPYSLYLNVMRRYSEPRGNLIGGVDVNVNRLNLAIVDRYGRLRDVKTFWFREVTARGFKGVVAWTKIHQAIHELLNYAYHHGVSAISLENPRTIGYLRYYWVRNGDRGSRNYNYRVSIFRSRTIEVISYKAPLYAMRTIYVNPKGTTNSQQHDEVMRRLGLDRHAASAYLIALRGLNKQGR

SEQ ID NO: 1336 - protein, 365 aa, unidentified
  REGION 1..365: note = Description of Unknown: uncultivated organism sequence
  REGION 1..365: note = Category: MG61 effectors
  REGION 1..365: note = Description: MG61-172 effector
MTYITLTFPFNACCDVARRLLSTAWLFRVATHRLLSIARKFPVLPGTDIGWKSTFRGMVHEVIPNRRYADGVVVLVRSIYESCRQLRVDFRSVELSSWLMFQQVELEHPARNITLKPGYEFHVTTVDYGENTHRVVVKPTVPGNYGLLLDKVLRERQRYTGRVVLRSYGIGGGNLWVQGEVQMTIPMDFYYRHMARYRRNDGKLYGGVDVNTDRINLAIIDEDGELIDHKTFWFSEASRKGCSGRRAWSIIGMRIHELLDYAYNNGVKTLFLENPEVLGRLKLMWAKSGDRGHGNYNHKVMTFRSTIIERIALKAPLYGIEVSYVNPKGTTNSKEHDETMKKHGLDRHTASAYLTALKGLTHQRK

SEQ ID NO: 1337 - protein, 376 aa, unidentified
  REGION 1..376: note = Description of Unknown: uncultivated organism sequence
  REGION 1..376: note = Category: MG61 effectors
  REGION 1..376: note = Description: MG61-173 effector
MSKSVAEYITLRLPFHVTGVDAKLIYWTAWLCKLCAHRLLEAIKLNPSLAYLSQYDFIKVGRRLCYDIVPNRRYVDGISTLIHASLQSAKALKVDITKLEPKHWLLFQSEAEPWAKGNLNIQFVDYDKVKVLVFDRDKSSRRIIIEPVIPKGYIRLVKALVDKALKKEIGYPARIYITDYGERLEHLYGEIQVMVKYNFYLEVMKRYDKPLGDNIAGVDVNVDRLNLVVINRDGDMVWKHTVRFPQITSRGCPRKRAWSIIGEAIHSILRNAYSHGASVVAVENPEVLGYLRYYWIKNGDRGTKNYNYRISIFRNSIIERIVWKAPLYGLHVVTVNPKGTTHSKDHEYVMRRYGLDRHTASAYLIALKTRRNLQRP

SEQ ID NO: 1338 - protein, 371 aa, unidentified
  REGION 1..371: note = Description of Unknown: uncultivated organism sequence
  REGION 1..371: note = Category: MG61 effectors
  REGION 1..371: note = Description: MG61-174 effector
MSYITICLPFNVDGVEARRLLSTAWLFRVASHRMLSLAKQFPVLPATDIGWKNTFRKVIYEIIPNRRYTDGVIVLVRGIYESCRQLGIDFKEVKLGGWLMFQQSEKEYPVRNITLKQGYEFHITTISYGGEAERVVIKPTIPKNYKLLLDKILEEKQKHTARVVIKDYGVRRNKVWIHGEIQLTILINFYYKYMTRFKRNYGRLYGGVDVNIDRINLAIVDRYSRLRDAKTFWFEDTARKGYPRRKARALIGMVVHEMLRYAYHHGVKTLFLENPEVLGKLKLLWIRNGRRLHRNYNWRVSVFRSSVIEMVAMKTPLYSIKVDYVDPKGTTHSKEHNEIMRKYGLDSHTTSAYLIALKGIKRHTMIQRAII

SEQ ID NO: 1339 - protein, 364 aa, unidentified
  REGION 1..364: note = Description of Unknown: uncultivated organism sequence
  REGION 1..364: note = Category: MG61 effectors
  REGION 1..364: note = Description: MG61-175 effector
MDETLLYTLKLSFNASGGVARRILSTAWLFRLACYRVLSRSRELKERLVPSKVAWVKMFYEDARSYIPNKRYAYGAIYLVYGIWESARKLKLNYADVELSNWLLFQHYEREVDGNVIRVAEDGSALVTTYNYDGSKDRVLVRAKPNRGYAKLLESVVESKEKYMPRVVIKGYNIRNGTLYIHGEIHVIVSYDFYLKHSARYREPTGDLIGGVDVNVNRINLAIVDKKGNLRDYKTFWFAEATARGYPRQCAWSFIGARIREMLEYAYHHGVSTIALESPEVLGYLKLAWIRGNDRKHEDYNYKKSIFRGSIIERIAVKAPLYGLSVKFVDPKGTTSSIEHDNAMRKYGLDRHTASAYLIALKCI

SEQ ID NO: 1340 - protein, 363 aa, unidentified
  REGION 1..363: note = Description of Unknown: uncultivated organism sequence
  REGION 1..363: note = Category: MG61 effectors
  REGION 1..363: note = Description: MG61-176 effector
MSYVTVALPFNVCGREASLVLSTAWRFKIAAHRVLGVAKEMRMLPGSDIGWRNTFRSLVYEVMPNRRYADGVITLVRGIYESCRQLGVDFREVELGDWLMFQQTEKEYPPRNITLKPGYEVHVTVIDWHGERHRISLKPTVSGRWSKLLDTILEKRIKYTGQIVVEDYGVRDGVLWLHGKVHLIVPYDVYLECMARYKMNMGRLYGGVDVNTDRINLAIVDGSGRLRDIKTFWFEEASRKNCPRQRARSVVGMAVHEMLRYAYHHGVKTLFLEDPGVLGRLRLAWIRNGRRGSRNYNWKVSIFRSSVIEMIARKAPLYAIKTVYVDPRGTTHSQEHDEIMKRYGLDRHAASAYLIALKGLERP

SEQ ID NO: 1341 - protein, 1509 aa, unidentified
  REGION 1..1509: note = Description of Unknown: uncultivated organism sequence
  REGION 1..1509: note = Category: MG61 effectors
  REGION 1..1509: note = Description: MG61-177 effector
MSKRILGLDLGTNSIGWAVVDEAKEEIVNAGVRIFPEGVVSKTIGSGDKEETKNAARRRARQTRRQFYRKRLRKAKLLEVLIEQNMCPLSLDELNKWRHWDKKEKSQAKVFPNSDEFMNWIRMNPYELRARAIIGTVTAMELGRIFYHLIQRRGFLSSRKGDVKESKTLFEKGKPELNILPINRTEKEIAESGCQTMGEYLNRVVPKEGESYKPILDSDGNEIRARGRYATRKMYVEEFEAIWNAQADHLGLDKRSVLFKKVRMLKGNENSERNKKRISTLKKFYGAENVFVENRGNNLHITTTRTLPFKIFLAGDDVELKRNESVLFWQRPLRSQKGTLGNCSFEDTLPVINMDGTQRKNEKGKPVTYSKKPCPISHPLFELFRTHQFINTIEFGEKQRLSKDQKKQVLELINRKDNAFSFKEIVKKLELFSETFNYENDFKVSGNYTISKLSKLLGKKVWDEHPLAYWEAFYFYDDSTKLQKKLNKAYGLNLKVEEVDKIRLKEGYSRVSIKAIQNILPFLEKGYFYSTAVILGGVKNAFGSRWDSYLQDETKEKIEDDILKMLKDKNKEGELIEKIKAYLSDSSNRYGFSENSPAFKKLYHHSQSVEKKELKNKLPPVENIRNPIVQQSLYEMRKVVNALLEKYKEEDPTFSFSSIRVEMGRDLKNGKKQRQKINQVIRKNRENNDEARERLAEFGLQPSRNNIQKYLLFKEMERRAGHVQSPYTGRTISLTDLLGKDNLIQIEHIMPFSKSLNDSFANKTLCESSVNGLKGDKTPYAFYHQNPDPKIWGVSSWDEVKHRAFKLLPYAKAKRFVSDKSVDAEDFISRQLNDTRYIAKKATEILSEICSDVQVMPGQLTAELRHLWGLNNVLESSFGVTKQFSDIPLKPGEYYLVLNEQRESIQLIPKHNPKPKTNPNELLVAGEINNAIFESKKLVLELGAPDQANGKYWAKLTLKPIQKFSPKYISKPITDENRIVFKGLVKNQRFSSDSIPKNPIAEHKDGIYWGSFAVKNKRIERSTVAPITNRKEIKLFGEVKDGIFKSYIYECSTTAENGKYWLVLEPDFETPEFIQASNPEPQHSENEHIITGTIDDNGVFVSDLDPSYSVKTDHSAGKYYAVIELASKENDFYLMENPAPKVEKEHRLIEGTVWVDKYSSELKFDPKKNREDQRHHAIDAITIALTKRGYLNALSHYRAKELPEDYKPSFPEPWDGFEHDVKNAAEKILISYRKNDRIISKGKKGFSVRGQLHKENVFGKHKGKEDEKKSFYHRRKYLNDLKTNKHVSKIVDERIKQLVLDHLKNSCGVNISSEKGFKIPPNAFFTKDGKPRLFLPPNPRKKKNSQPVPIKKVRIKEEIGNARQLKNGINQYVNPRNNHHVMVYKTHSGDVKESIISFWDAVNRMKKNQSVYQLPEDGVEILAVLEQNDMYLIGITDEELEKRKNDQKFLSNHLYRVQKLSSMYYTFRHHLASTVTNPDEEERIVSFDRFQLRNPKKVKISELGEISLC

SEQ ID NO: 1342 - protein, 365 aa, unidentified
  REGION 1..365: note = Description of Unknown: uncultivated organism sequence
  REGION 1..365: note = Category: MG61 effectors
  REGION 1..365: note = Description: MG61-178 effector
MTYVTLVLPFNAGGDTTKRLLSTAWLFKTAVHRVLDVAKRSPVLPGTDIGWKSAFRSLAYSVIPNRRYADGAVTLVRSIYESCRQLGVDFKSVELSDRLMFQQSELEYPARNITLKPGYEVHVTTISYDRESYRDVIKLVAPKNYSTLLSKIIEERQEYSGRVVVKGCGVRDNTLWVRGEVQITIPVDFYYKHADRYREPKGDLVGGVDVNADRINLVVVDEKGNLRDYKTFWFEKTTARGYSRRRTWSVIGMRIHEMLEYAYRHGASTIVLENPEVLSKLKLLWIRRGDRRHENYNYKVSIFRSSIIEMVALKAPLYGLEVEYVNPRGTTNSVEHDMLMKEHGLDKHTASAYLIALRALAHQST

SEQ ID NO: 1343 - protein, 363 aa, unidentified
  REGION 1..363: note = Description of Unknown: uncultivated organism sequence
  REGION 1..363: note = Category: MG61 effectors
  REGION 1..363: note = Description: MG61-179 effector
MNYITITLPFNAHGKTARLLLSTARLFRITVLKVYEKLLEDKVKYISPIMLKKYYRSLAYEIIPNRRYADGALTLIWSIYESCEALGVPFNEIEWKNWLMFQQTEKEFPCRSITLRRNYTVGVSVIGFNGEKEKIELSPTVSRNYMKLIDYVIEERIPYTGRVVLKGYGERRGVLWVNGRIDVTVPYSAYFEVMRKFKRNYGKLYGGVDVNSDRLNLAIVDGNGRLRDTYTFWFREVTARGYSRHSAWSIIGMRIHEMLKYAYHNGVKTLFLEDPEVLGRLRLYWVRNGERLHENYNWKVSTFRCSIIERITMKAPLYSIKVKYVNPRGTTNSRKHREIMKKHRLDQHNTSAYLIALRGLNLF

SEQ ID NO: 1344 - protein, 364 aa, unidentified
  REGION 1..364: note = Description of Unknown: uncultivated organism sequence
  REGION 1..364: note = Category: MG61 effectors
  REGION 1..364: note = Description: MG61-180 effector
MTYITLVLPFNASGDVAKRLLSTVWLFKIASHRLLDIAKQTLVLPRTDTGWKITFRRVTYDVIPNRRYADGVVTLIRGIYESCRHLGVGFKSVELSDWLMFQQSEKEYPPRNITLKPGYEVHVTTISYSGESYRDVVKPSIPKSFSTLVDKIIEESQEYTGRVVVKDSSVRDCTTWVRGEVQVTVPVDFYYKHMARHREPKGNLIGGVDVNVDRVNLAIIDENGNLRGYKTFWFREATARGYPRRSARRVIGARIHEMLDYAHHQGVSILTLENPEVLGKLRLLWVKHGERGHENYNYRVSAFRCRVIEMIALKAPLYALEIKYVNPAGTTNSKDHDEAMRRYGLDKHASSAYLIATRSLNQKR

SEQ ID NO: 1345 - protein, 365 aa, unidentified
  REGION 1..365: note = Description of Unknown: uncultivated organism sequence
  REGION 1..365: note = Category: MG61 effectors
  REGION 1..365: note = Description: MG61-181 effector
MSYVTLCLPFNVGDDVAGKLLSTSWLFKAASHRMLDLAKQMPILPATDIGWKNTFRKIIYEITPNRRYTDGVIVLVRGIYESCRQLGVGFKDVELRDWLMFQQVEKEYPVRNITLKQGYEFHITTIDYNDGVERIVVEPTIPKNYKLLLDKILEEKQKHTARVVIKDYGVRKNKLWIHGEIQLTIPLDFYRKHMTRYRRNYGKLYGGVDVNSDRINLAIIDSEGNLRDTYTFWFREVTARGYPRRKARSVIGMRVHEMLKYAYHHGVKTLFLENPEVLGKLRLLWVRNGKRLHKNYNWKVATFRSSIIEIIAMKAPLYSIKIGYIDPKGTSNSGEHDKYMRKYRLDKHTASAHLIALKGLNHEFK

SEQ ID NO: 1346 - protein, 364 aa, unidentified
  REGION 1..364: note = Description of Unknown: uncultivated organism sequence
  REGION 1..364: note = Category: MG61 effectors
  REGION 1..364: note = Description: MG61-182 effector
MVENAFYTIKLAFNVGGDRARKVLSTAWLFKLACHRVLSRSKELLNALIPSKIAWVKMFYSDARDLIPNKRYAYGAVYLVYGIWESSRSLKIDYRNVELSNWLMFQHYDREVDGNVVKVLEDGSALVTTYSYDSSKDRVLIKAKPNRGHGELLKLVVESKEKYMPRVVVRGYNVRNGKPYVNGEIHVTIGYDFYLKHMTRHREPKGSLIGGVDVNADRINLAIIDEKGNLRDSKTFWFTEAVTRGYPRRKAWSVIGMKIHEMLRYAYNHGVSTIALEAPEVLGYLRLAWVRDGGRKHENYNYKKAIFRSSVIERIAMKTPLYGLNTKFVDPKRTTSSREHNEIMKRFGLDRHTASAYIIALRSI

SEQ ID NO: 1347 - protein, 353 aa, unidentified
  REGION 1..353: note = Description of Unknown: uncultivated organism sequence
  REGION 1..353: note = Category: MG61 effectors
  REGION 1..353: note = Description: MG61-183 effector
MLLSTARLFRQVVLHLHNLFLKENLRITSLIALKRMYRKRLQEILPNRRYVDGAITLVYSIYESAQALGVPFSDIEFKNWLLFQQSEKEYPCRNVTLQRDYSFRVTTISYQGESKRTSLKPTVPKNYKQILDKIIEKKQPYVARIVLRGFGERKNMLWIHGEIHLSIPYKFYLEHFSKFKRNYGKHFGGVDVNVDRINLAIVDKYGRLRDVKTFWFEEASWKGCPRQRAWSIIGMAIHNMLRYAYYHEVNTLFLENPKVLGYLKILWIRKGKRKNRNYNYRVQIFRSSVAEKIAMKAPLYTINIEYIDPKGTTHSKEHDEIMRRYGLDKHTVSAYLIALRGIERRIMIQKAIV

SEQ ID NO: 1348 - protein, 369 aa, unidentified
  REGION 1..369: note = Description of Unknown: uncultivated organism sequence
  REGION 1..369: note = Category: MG61 effectors
  REGION 1..369: note = Description: MG61-184 effector
MSQYQMHRVRDASKLVEYVTIVGRLEPLTEEDYVKLVRLAHEFRKAATYATRMIAKGIDPNTVLRELRSMLNKAYGDSAFKLAKAIVESARSNNGNPLKIEIRRLFIVSEGEAGRLGNRNVRLDDSSTVRIRYPYERSWLSFRARFGENHVPLVKELSELAKSRKCSYGAKIVFRKGRVYLHLSVPVELYLKYFGRGEAIGSLIAGFDLNSDRVNMVIVDKYGRVVDVRTAWFPEVTSPGYPGSKAMVVRLRALAELLNYAYHHGVGVVVFEDLDKIKQRRFTSSPTANRKITRFAKKQLLTHAVVMALKYGLKPVLVDPRGTTSSPVHSTVMKKHGLDRHTASAYLIALRYLQDEKTVNGHKAHKQYK

SEQ ID NO: 1349 - protein, 381 aa, unidentified
  REGION 1..381: note = Description of Unknown: uncultivated organism sequence
  REGION 1..381: note = Category: MG61 effectors
  REGION 1..381: note = Description: MG61-185 effector
MSLPEYITIDIPFTATGEEAKLIWCTAWFSKLCAHRLLSDVKRNEVVIDLSQISFLKYARKRCYDILPNRRYIDGVATLIHSTLRSARKLGVNIKSIELRQWLLFQSEAEKEKKGNLNIRLTTINKAELLVINHKKEPKKIVIDLRIPKGYRKTLETLIKKALNREIGYPARVVIKEYNFYPNNLHLYCSLQVMIPYDLYLETMRRYDKPLGDHIAGIDVNVDRLNLAIVDKYGRLKDVKTFWFREITNRGYRRKPAWTKVHQAIHDMLDYAYNHGVSLVALENPKVIGYLRYYWIKNGDRKSRNYNYRKSIFRNKIIEAVTYKAPLYSLKTIYVNPRGTTKSREHDKVMRRYGLDRHTASAYLIALRGIKRHTMIQKAIT

SEQ ID NO: 1350 - protein, 363 aa, unidentified
  REGION 1..363: note = Description of Unknown: uncultivated organism sequence
  REGION 1..363: note = Category: MG61 effectors
  REGION 1..363: note = Description: MG61-186 effector
MTYITLTFPFNACCDVARRLLSTAWLFRVATHRLLSIARKFPVLPGTDIGWKSTFRGMVHEVIPNRRYADGVVVLVRSIYESCRQLRVDFRSVELSSWLMFQQVELEYPARNITLKPGYEFHVTTVDYGGNTHRVVVKPTVPGNYGLLLDKVLRERQRYTGRVVLRSYGIGGGNLWVQGEVQMTIPMDFYYRHMARYRRNDGKLYGGVDVNTDRINLAIIDEDSELIDHKTFWFSEASRKGCSGRRAWSIIGMRIHELLDYAYNNGVKTLFLENPEVLGRLKLMWAKSGDRGHGNYNHKVMTFRSTIIERVALKAPLYGIEVKYVNPKGTTNSVEHDEAMRKHGLDRHNASAYLIALRGLKHQ

SEQ ID NO: 1351 - protein, 368 aa, unidentified
  REGION 1..368: note = Description of Unknown: uncultivated organism sequence
  REGION 1..368: note = Category: MG61 effectors
  REGION 1..368: note = Description: MG61-187 effector
MNYVTLVLPFNIGGDTAKRLLSTAWLFKAAVHRVLGVAKQSPALPGTDIGWKSAFRSIAYSVIPNRRYADGAVTLVRSIYESCRQLGVDFRSVELSSWLMFQQSEKEYPARNITLKHGYEVHVTTISYSKESHRDVIKPSIPKSYSALLSRIIEERQEYSGRVVVKGYGVRGNTLWVRGEVQITIPADFYCKHMAKYREPKGSLIGGVDVNVDRVNLAIIDEKGSLRDYKTFWFTEATVRRYPRKRARSVIGMRVHELLKYAYHHGVSTIALESPEVLGRLKLLWARRGDRKHEDYNYRKSVFRSSVIEMIALKAPLYGMKVEYVDPRGTTNSTEHDRLMKVCGLDRHTASAYMIALRGLAHQVKQMK

SEQ ID NO: 1352 - protein, 369 aa, unidentified
  REGION 1..369: note = Description of Unknown: uncultivated organism sequence
  REGION 1..369: note = Category: MG61 effectors
  REGION 1..369: note = Description: MG61-188 effector
MDYITIKLPFNVDGDVAKGLLSTAWLFRVAAHRVLALARQQESLPGSRIGWKNMFRQFAYGIIPNRRYADGAVILVMSIYESCRELGVDFKGVELSDWLMFQQSELEYPAKSITLKPNYEFHVTTVRYDGSTGRVVVKPTIPRSYGELLNAVLAERVKYMGRVVVKDYGVRGNQLWVRGEVHMTVPLDVYYERMARHKRNGGKLFGGVDVNTDRVNLAIVDEGGDLRDYKTFWFSEVTARGFPRHSALSIIGMRIHEMLNYAYHHGVKTLFLENPEVLGRLKLVWIRNGDRGRENYNHKVATFRSTIIERTALKAPLYSIEVGYVSPRGTTNSEEHDELMRKYRLDRHTASAYLIALKGLITNGNKHYD

SEQ ID NO: 1353 - protein, 363 aa, unidentified
  REGION 1..363: note = Description of Unknown: uncultivated organism sequence
  REGION 1..363: note = Category: MG61 effectors
  REGION 1..363: note = Description: MG61-189 effector
MTYVTLTFPFNICCDVAKRFLSTAWLFKIATHKLLGVAKQSPVLPGTDIGWKNTFRGIVYEVIPNRRYADGVITLVRSVYESCRQLGVDFRSVELSDWLMFQQGELEYPARNITLKPGYEFHITTIDYSKNSYRDVVKPIIPKSYRLLLDKVLDERERYTGKVVLKSYGIKECNLWVQGEVQITIPIDFYYKHMARAKAGNGKLYGGVDVNVDRINLAIVNGGGELRDVYTFWFEEASRKGCSRQRVRSIVGMRVHEMLEYAHRHGVKVLFLENLEVLGKLKLLWIRSNDRRHENYNYKVSVFRSSVIEMIALKAPLYSIEVKYINPKGTTNSEEHDEIMKRFGLDRHIASAYLIALRGLRHR

SEQ ID NO: 1354 - protein, 365 aa, unidentified
  REGION 1..365: note = Description of Unknown: uncultivated organism sequence
  REGION 1..365: note = Category: MG61 effectors
  REGION 1..365: note = Description: MG61-190 effector
MSYVILRLPFNINGGVAKELLSTAWWFKTAAHRVLSLAKRMQFLPGAKIGWVNMFRGIAYEIVPNRRYADGAVTLVMGVYESCRALGIDFRGVELGDWLMFQQSELEYPAKSITLRPGYEFHVTTIKYDGLIGRVVVKPTVSEDYRELIDAIYRERIKYMGRVVIRDYGARNNQLWVHGEIHITVPLDIYYEHMAKHRRNSGRLFGGVDVNTDRINLAIVDEGGDLRDYKTFWFSETMARGFLKHRAWSIIGMRIHELLDYAYNHGVKTLFLENSEVLGRLRLMWVWNGGRNHENYNYKVMIFRSTIIEKIALKAPLYSIRAGYVNPRGTTNSKEHEEAMRRYRLDRHTTSAYLIALKGLTHQQK

SEQ ID NO: 1355 - protein, 364 aa, unidentified
  REGION 1..364: note = Description of Unknown: uncultivated organism sequence
  REGION 1..364: note = Category: MG61 effectors
  REGION 1..364: note = Description: MG61-191 effector
MSQYQTHRVINASKLVEYVTIVGRLEPLTEEGYVKLVRLAHEFRKAVTYATRMITKGIDSKAVLRELRSILNKAYGDSAFKLAKAIVESAGVNDGNPLKVEIRKLFIVSEGETSRQGNRNVRLDDSGIVRIKYPYDRSWLIFKARFREEYVPLVKELSELARSKKLSYGARVVFRSGRVYLHLSVPVELYLKYFRRGEARGSLIAGFDLNSDRVNMVIVDEYGRIVDMRTAWFPEVTSHGFPRNRAKVARLQALSKLIEYAYHHGVGVTVFEDLGRIKRREFTGSPTANRKISRFAKRQLLAHVVVMSLKYGLKPALVDPRGTSSSHEHYFIMEKYGLDRHTASAYLIALKYLRDENHEPSQST

SEQ ID NO: 1356 - protein, 302 aa, unidentified
  REGION 1..302: note = Description of Unknown: uncultivated organism sequence
  REGION 1..302: note = Category: MG61 effectors
  REGION 1..302: note = Description: MG61-192 effector
MRLCLIADMLVIVLVRGIYESCRQLGVNFKEVELGNWLMFQQTEKEYPVRNITLKQGYELHITTLDYDGNSERIVIKPTTPKNYKLLLDKILEERQKHTARVVVKDYGIRKGKLWVHGEIQLTIPLNFYYKYTTRYKRNYGKLYGGADVNSDRINLAIVDKEGNLRNTYTFWFREVTARSYPRRKARTIIGMRIHEMLKYAYHHGVKTLFLENPEVLGRLKLMWMRNGKRLNRNYNWRVTTFRSSIIEMIAMKASLYAIRVMYVNPKGTTSSEKHDGIMRKYRLDKHTASAYLITLKGLDLL

SEQ ID NO: 1357 - protein, 356 aa, unidentified
  REGION 1..356: note = Description of Unknown: uncultivated organism sequence
  REGION 1..356: note = Category: MG61 effectors
  REGION 1..356: note = Description: MG61-193 effector
MAGEIREPGVTHVTVTGRVVPLDSNSYMELVLLAHRFRKALTKAVKMRARGVDKNAIVKEITRELNLGYADTIYKLAKLVVEGARRNNSNLLKVEIRKLFVASRGFSSNKGNRNIRLLSTSELEVNIPWRGWVKFRVLFGGQYIPLVSELIEKALRRELSYTAKIVFRNGRPYLQVSTPIELYLKHFKKEVARGDLIAGFDLNSDRINMVIVDKLGVIRDVKTEWFPEVTSPGFPREKANTLRLQALAKLLGYAYHHGVGVVVFEDLERIRGRRYTKSRSANRKIGRFPKRKLLQYAIVMALKYGFKVYLANPAYTSKIGEKLGKELGFDKHTASAYVLALKALQPENYKLLTELR

SEQ ID NO: 1358 - protein, 369 aa, unidentified
  REGION 1..369: note = Description of Unknown: uncultivated organism sequence
  REGION 1..369: note = Category: MG61 effectors
  REGION 1..369: note = Description: MG61-194 effector
MDYLTIKFPFNANGDVAKELLSTAWLFKIATHRVLSLVKQQQVLPGTRVGWKGMFRGIAYGVVPNERYADGAITLVMGIYESCRALGIDFRSAELGDWLMFQQSSLEYPSRNITLKPNYEFHITTIRFNGSIDRVVVKPTIPRSYEKLLGAVITKRVGYMGRVVVRDYGVRGNQLWVRGEVQVTIPLDIYYEHMSKHKRNAGKLVGGVDVNTDRINLAIIDEDGELIDHKTFWFSEVTARGFPKHSAWSIIGMRIHELLNYAYHHGVRILFLENPEVLGRLRLMWIRSGDRGHENYNHKVTTFRSTIIEKIALKAPLYSIEVKYVNPKGTTNSTKHDELMKKHGLDRHTTSAYLIALRGLGINKYVHYK

SEQ ID NO: 1359 - protein, 286 aa, unidentified
  REGION 1..286: note = Description of Unknown: uncultivated organism sequence
  REGION 1..286: note = Category: MG61 effectors
  REGION 1..286: note = Description: MG61-195 effector
MAREVRKPEITHVTITGRVIPLNNDSYMELVLLAYRLRITLIKAIKMTTKGLGKNTIVKEVTKELNLGYADTIYKLAKLIVEGAKSNGSNPLRVKLRRLFIASRGFTANKGNRNIRLLSSSELQVNIPWKGWVKFKVVSGKRCIPLVYELVEKALSKKLSYTAKIVFRNGKVYLHISIPIELYLKYFSKGRAKGKLIAGFDLNSDRVNMVVVNRQGIIRGTKTEWFPEVTSHGFPRNKANTIRLQALAKLLDYAYHHGVGVALFEDLDRIKKRRYTRSKTANRKIT

SEQ ID NO: 1360 - protein, 363 aa, unidentified
  REGION 1..363: note = Description of Unknown: uncultivated organism sequence
  REGION 1..363: note = Category: MG61 effectors
  REGION 1..363: note = Description: MG61-196 effector
MGYVTLCLPFNVDGVEARELLSTAWLFKAATHRVLYLARRAQALPATDIGWKDAFREAVYEVVPNRRYADGVVVLVRGIYEACRQLGVDFKDVELGDWLMFQQVEKEYPVRNITLRRGFELHITAIGYDGEVERIAVKPTVSKAYRALLDKVIEEKQKHTARVVIKGYGVRRDKLWVHGEVQLTLPLDFYYKHMTRYRGNYGKLYGGVDVNADRINLAIVDENGGLRDTYTFWFREVTARGYPRRRARSVIGMKVHDMLRYAYHHGVKAIFLESPEALGRLRLLWIRNGKRLHENYNWKVAAFRSSIIEMIAMKAPLYSIKVGYVGPRGTTHSKEHDEVMKKHRLDKHTASAYLIALKGLKQP

SEQ ID NO: 1361 - protein, 373 aa, unidentified
  REGION 1..373: note = Description of Unknown: uncultivated organism sequence
  REGION 1..373: note = Category: MG61 effectors
  REGION 1..373: note = Description: MG61-197 effector
MNETYLTLRLPFNACDVEAGMLLSTARLFRQVVLHLHNLFLKENLRITSLIALKRMYRKRLQEILPNRRYVDGAITLVYSIYESAQALGVPFSDIEFKNWLLFQQSEKEYPCRNVTLQRDYSFRVTTISYQGESKRTSLKPTVPKNYKQILDKIIEKKQPYVARIVLRGFGERKNMLWIHGEIHLSIPYKFYLEHFSKFKRNYGKHFGGVDVNVDRINLAIVDKYGRLRNVKTFWFEEASWKGCPRQRAWSIIGMAIHNMLRYAYYHGVNTLFLENPKVLGYLKILWIRKGKRKNRNYNYRVQIFRSSVAEKIAMKAPLYTINIEYIDPKGTTHSKEHDEIMRRYGLDKHTVSAYLIALRGIERCIMIQKAIV

SEQ ID NO: 1362 - protein, 371 aa, unidentified
  REGION 1..371: note = Description of Unknown: uncultivated organism sequence
  REGION 1..371: note = Category: MG61 effectors
  REGION 1..371: note = Description: MG61-198 effector
MSYITLTLPFNIDGGEARKLLSTAWLFKIASHRMLSLVKQFPILPATDIGWKNTFRKIIYEIIPNRRYTDGVIVLVRGIYESCRQLGIDFKEVGLGDWLMFQQTEKEYPVRNITLKQGYEFHITTINYNGNSERITIKPTIPKNYKLLLDKILEEKQKHTARIVIKDYGVRKNKLWIHGEIQLTIPLNFYYKCMVRYRRNYSRLYGGVDVNVDRINLAIIDRYGRLRDVKTFWFEDATRRGYPRRKARILIGMAVHGMLQYAYHHGVKMLFLENPSILSRLRLIWIRNGRRLHRNYNWKISVFRSSVIETISMKAPVYSINTEYIDPKGTTHSKKHDEVMKKYGLDRHTASAYLIALKGIKGYRMIQKATD

SEQ ID NO: 1363 - protein, 363 aa, unidentified
  REGION 1..363: note = Description of Unknown: uncultivated organism sequence
  REGION 1..363: note = Category: MG61 effectors
  REGION 1..363: note = Description: MG61-199 effector
MSFITLRFPFNVDGDAAKGLLSTAWLFKIAAHRVLDVAKQQEVLPGTKIGWVNVFRGIAYGVVPNRRYADGAVTLVMGVYESCRALGVDFRSVELGDWLMFQQSELEYPSRSITLKPNYEFHVTTVGFDGTVGRVILKPTIPRNYKELLDTVITEHVKHMGRVVITDYGVRNNRLWVHGEVQVTIPLDVYYEHMSKHKRNSGRFIGGVDVNTDRINLAIIDSVGRLIDHKTFWFSEASRKGFSRHSAWSIIGMRIHETLNYAYHHGVRALFLENPEVLSRLRLMWVRGGDRKHENYNHKVSIFRSTIIEKIAMKAPLYSIRAGYVSPRGTTNSKEHDEAMKRYELDKHTASAYLIALKGLTHQ

SEQ ID NO: 1364 - protein, 293 aa, unidentified
  REGION 1..293: note = Description of Unknown: uncultivated organism sequence
  REGION 1..293: note = Category: MG61 effectors
  REGION 1..293: note = Description: MG61-200 effector
MTYIMLVFPFNVCGDVAKRFLSTAWLFKIATHRLLNVVKHFPVLPATDIGWKNTFRGITYEIIPNRRYADGVVTLVRSIYESCRQFRIDLKSVELSNWLMFQQSELEYPARNITLRSGYEFHITTVDYNKNTYRDVVKPIIPKNYKPLLDKMLEERHKYTGRVAVKSYGIRKYNLWVRGEIQITIPTDFYYNHMTRYRESKGSLIGGIDVNVDRLNLAIIDEKGNLRDCKTFWFSEAVARGFSRRGARSIIGAKIREMLSYAYHHNVKILFLENPEVLSKLKLLWVRNGDRKT

SEQ ID NO: 1365 - protein, 305 aa, unidentified
  REGION 1..305: note = Description of Unknown: uncultivated organism sequence
  REGION 1..305: note = Category: MG61 effectors
  REGION 1..305: note = Description: MG61-201 effector
MGLLSERYADGAVTLVMSIYESCRELGVDFKGVELSNWFMFQQSELEYPAKSITLKQNHGFHVTTVRFDGVIGRVVVKPTIPRSYKELLDAILTERIKYVGKVLIDGVGARGSQLWVHGEVQVTIPMDVYYEHMARHRRNAGKLIGGVNVNSDRINLAIIDEDSEPIDHKTFWFSEASRKGFSRHKAWSIIGMRIHETLNYAYRHGVKTLFLENPEVLGRLKLVWIRSGDRKHENYNYKVMTFRSSIIERITMKAPLYGIETKYVNPRGTTNSEEHDEAMRKHRLDKHTASAYLTALRGLKHQQK

SEQ ID NO: 1366 - protein, 364 aa, unidentified
  REGION 1..364: note = Description of Unknown: uncultivated organism sequence
  REGION 1..364: note = Category: MG61 effectors
  REGION 1..364: note = Description: MG61-202 effector
MVENPLYTIKLSFNASGDRAKKILSTAWLFKLACHRVLSRSKELLNALIPSKIAWVKMFYSDARDLIPNKRYAYGGIYLVYGIWEGTRELGIDYRSIELSDWLMFQHYDREVDGNVIRILEDGSALVTTYSYDGSKDRVLIKSKPNRGHGELLKLVVESKEKYMPRVVVRGYNVRSGKLYVSGEIHVTIGYDFYLKHATRYGEPRGSLIGGVDVNSDRINLAIVDEKGNLRDCKTFWFSETTARGCPRRKAWSIIGMKIHEMLRYAYEHGVSTIALENPEALGYLKFAWVREGDRKHENYNYKIAVFRNSIIERIAMKAPLYWLDVKFVDPRGTTSSREHDEIMKRLGLDRHTASAYIIALRNI

SEQ ID NO: 1367 - protein, 363 aa, unidentified
  REGION 1..363: note = Description of Unknown: uncultivated organism sequence
  REGION 1..363: note = Category: MG61 effectors
  REGION 1..363: note = Description: MG61-203 effector
MSYVTVVAGFNASGEEAKLLFSTAWLFKLATYRVLSVAQNMPILPVSRIAWKNVFRRVAYEVIPNRRYADSTVILVMGIYESCRQLGIDFRRVELGDWLMFQQTEKEYPPRNITLKSVDEAWVTVFGYDLEARRVKLRVSTSGSFKELLGKVLEEKQPYNPRIVIRSWNARDGILYVRGELHISIPLGFYYKHMTRYGRNCGKLYGGVDVNVDRVNLAIVDEYGRLRDTKTFWFEEASWKGCPRQRAWSIIGMAIHNMLRYAYHHGVKTLYLENPETLGHLKTLWIRKSDRGNSNYNFRVQVFRTRIVEKISLKAPLYSIDTRYVDPRGTTSSRKHGEIMRKYGLDRHTASAYLIALKGLKQP

SEQ ID NO: 1368 - protein, 373 aa, unidentified
  REGION 1..373: note = Description of Unknown: uncultivated organism sequence
  REGION 1..373: note = Category: MG61 effectors
  REGION 1..373: note = Description: MG61-204 effector
MGIYPSSGLKVSYVTIVTGFNASDEKARLLLTTAWLFKVATHRLFNIVKQMPVLPASDIGWKSAFYKAVYDVIPNRRYSYGVITLVRSVYESCRQLGIDFRSVKLSDWLMFQQSEKEYPPRSITLKSPSEVEVTVFSYSKESKRVALRVSTSGVYRKLLDVILREKQLYMPRIYVKSWNVRDGKLFVRGELQIAIPVDFYYKHMPRASANNGKLYAGVDVNVDRVNLAIVDGDGRLRDVYTFWFEEASRKGCSRHRARSIIGMRVHEMLEYAYSHGVKVLLLENPEVLGKLKLLWVRSSDRRHENYNYRKAIFRSSVIEMIALKAPLYSIEAKYIDPKGTTNSREHDDVMRKYRLDRHTASAYLIALKGLKQP

SEQ ID NO: 1369 - protein, 356 aa, unidentified
  REGION 1..356: note = Description of Unknown: uncultivated organism sequence
  REGION 1..356: note = Category: MG61 effectors
  REGION 1..356: note = Description: MG61-205 effector
MSRYQTSSVVDTSSIVNYVTIIGRAYPASSEDYMRLVRLAWNFRRAVQVATRMTVKGLEEDSILRELRRMLNKAYADSAYNAAKAMVEGCIFNGGNPLHIEVRKLFIISEGESSRLGNRNVRLEDTCLVKVKYPYDSSWITLRAEFGEKYLPLLRELVDLAKQKKLSYTARIVFREGSIYLHLSIPIQLYLKYFKKGEARGELIAGFDLNSDRVNLVIIDEHGRILDTRTAWFPEATSHGFPRGKAKALRLNALARLLEYCYRHSVSIVVFENLLSVKRKRFTRSKIANRKITRFAKKQLIQYSVVMALKYGFRVFLVDPKGTTNSREHYDVMRKYRLDRHAASAYLIALRGLRHQ

SEQ ID NO: 1370 - protein, 321 aa, unidentified
  REGION 1..321: note = Description of Unknown: uncultivated organism sequence
  REGION 1..321: note = Category: MG61 effectors
  REGION 1..321: note = Description: MG61-206 effector
MLPATDIGWKSAFREALYEVIPNRRYADGAIVLIRGIYEACRQLGVDFKEVELGDWLMFQQAEKEYPVRNITLRRGFEFHITTIGYDGEVERAVVKPTIPKTYRTLLDKVIEEKQKHTAKVVIKGYGVRRSELWVHGGIQLTIPLDFYYKHMTRYRGNYGKLYGGVDANTDRINLAIVDENGGLRDTYTFWFREVTARGYPRRRARSIIGMKIHEMLKYAYHHGVKTISLENPEMLGRLRLLWIRNGRKLHKNFNWKVSTFRSSIIEMIAVKAPLYSITVKYVDPKGTTHSKEHDEIMKKRRLDKHTASAYIIALKGLKLP

SEQ ID NO: 1371 - protein, 340 aa, unidentified
  REGION 1..340: note = Description of Unknown: uncultivated organism sequence
  REGION 1..340: note = Category: MG61 effectors
  REGION 1..340: note = Description: MG61-207 effector
MCVSRYQMLKPGGASRLIEYVTVTGRLEPLTEEDYMKLVRLAHEFRKAVVYATRMIAKGLDSNAVLGELRLMLNKAYGNSAFKLARTLIEGARAKGEDPLRIEVERLFIVSEGEASRQGNGNVRLGDPGTVRIRYPYDGSWLSFRSRFGEEYVPLVKELSELAKSKRCSYGARVVFRSGRIYLHLSVPVELYLKYFRKGKAGGDLIAGFDLNSDRINMVVMDEHGRIVDTRTAWFLKVTSPGFPRNKARVARLQAFSKLIEYAYYHGVGVAVFEGLDKVKRREFTSSPTTNRKMSRFAKRQLLTHAVIMSLRYGLKPVLVDPRGTTSSPIHLVIMKIWFR

SEQ ID NO: 1372 - protein, 370 aa, unidentified
  REGION 1..370: note = Description of Unknown: uncultivated organism sequence
  REGION 1..370: note = Category: MG61 effectors
  REGION 1..370: note = Description: MG61-208 effector
MSQCQTSSAGGVEADVVDASKLVKYVTVTGRLAPISSEDHMKLARLAHDFKRAVLMATRMVAKGVREAEVLRELRKRLNKAYADSAFKTAKAIVEGCLFNGGNPLHIEVRKLFIVSEGEASRLGNRNVKFEGTDIIKVKYPYDGSWLSLRAEFGGEQLPLVKELVDLAERRRISYRTEIVFRSGKVYLHLSIPIELYLKHLGRGRGRRGRGGLVAGIDLNSDRVCMVVVDSLGRVRDLKTKWFSELTSHGFSRGRARARRLEALSKIFEYARDHNVGVVVFEDLFKVKRRRFVKSRKANRKISKFAKRKLLQHGVVMALRRGFEVLLVEPRGTTSSEEHAKVMRELGLDKHVASAYLIALRGLHEAGARK

SEQ ID NO: 1373 - protein, 362 aa, unidentified
  REGION 1..362: note = Description of Unknown: uncultivated organism sequence
  REGION 1..362: note = Category: MG61 effectors
  REGION 1..362: note = Description: MG61-209 effector
MLYLQKPSSVEELVTHVTVIGKLVPETSEDYMKVARLAWSFRRAVELMVREIANGTSMKEATKRLYHVLPNYVYLESAYKHAKLIAEGCKFNNSNPKHIHIKKLFIISRGNKYDVGNRNVKLVSEGSFFRALIKYPWDGSWITCRAFFGEKYIPLLLELVELTKQRKDGYGSHIVFREGKVELHVSVPLNLYLKHFSLQRRRGYGLVAGLDLNSDRINMLVMDSSGRIVTLKTTWFPEVTLHGYPRNKTQDIRLKKLKELLSYARRIGVDYVILENLFMVKRRNRVRSPSGNRKITRFAKKQLLQHGLLTALKLGLTPVLISPKGTTNSREHEEVMKSRGLDRHVASAYVIAQRGLEVIKSH

SEQ ID NO: 1374 - protein, 362 aa, unidentified
  REGION 1..362: note = Description of Unknown: uncultivated organism sequence
  REGION 1..362: note = Category: MG61 effectors
  REGION 1..362: note = Description: MG61-210 effector
MTYITLTLPFNISGGVAGRLLSTAWLFKVASHRLLDVAKQTPVLLGTDVGWKNAFRRIVYDVIPNRRYADGVATLVRGIYESCRQLNVDFKSVELSDWLMFQQSELEYPARSVTLKPEYEVHVTTISYSGESYRDVIRPSIPKGLSALVGKIIEERQEYAGRVVIKDFGVRDGTIWVRGEAQVTVPVDFYYKHMARYKEPRGSLIGGVDVNVDRVNLAIVDKNGDLRDYKTFWFGEATARGYPRRSARSVIGMRIHEMLDYAYHHGVSTIALENPEVLGKLRLLWVKHGKRGHENYNYRVSVFRCRVIEMITIKTSLYAVKVKYVNPASTTNSKEHAETMERYGIDRHTSSAYLIALKAQNQ

SEQ ID NO: 1375 - protein, 366 aa, unidentified
  REGION 1..366: note = Description of Unknown: uncultivated organism sequence
  REGION 1..366: note = Category: MG61 effectors
  REGION 1..366: note = Description: MG61-211 effector
MSRCLTSSVVNGADVVRYVTVTGRLVPHTPEDFMKLIRLARDFRRAVVYATRMIVKKLDRNEVLRELRSMLNKAYGDSAYKVAKALVKGAKFNGGDPRRIEVKRLFIVNGGEASRLGNRNVRLESTDTVKVKYPHDGSWLTFRACFGEEYLPLVSELVELARARKASYGARMIFRSGRVYLHLSIPVELCLKHFRRGEARGNLAAGFDLNSDRINMVIVDRYGRIRDVKTAWFPEVTSHGFPRNKAKARRLEALAKLFEYAYYHGVGTVVFENLLAIKHRRYVRSPTANRKIAKFAKRELLQHAIVSAMKYGFKVLLIDPRGTTRSREHDETMRKHGLDSHAASAYLIALRGIEGYRKYNLRFQPT

SEQ ID NO: 1376 - protein, 362 aa, unidentified
  REGION 1..362: note = Description of Unknown: uncultivated organism sequence
  REGION 1..362: note = Category: MG61 effectors
  REGION 1..362: note = Description: MG61-212 effector
MSYITLRFPFNAGGDVAKELLSTAWLFKIATHRVLRITKQQQTLPITKIGWKTTLRKVAYDVIPNERYADGSITLVMGIYESCRELGIDFGSVELSDWLMFQQSWLEYPSRSISLKPNYEFHTTTIRYNGTTSRVVVKPTIPRSYKQLLDTIITEHVKYIGRVVIRDYGVRDNQLWVRGEVHMTVPLDVYYERMARHKRNGGKLFGGVDVNVDRINLAIINDDGELIDHRTFWFSEVTARGFPKHRAWSIIGMRIHEMLDYAYRHGVKTLFLENPEVLGRLKLMWIRNGNRKHENYNYKVSVFRSTIIEKIVLKAPLYSIKVGYVNPRGTTNSTEHDELMRKYRLDRHSTSTYLIALRGLRH

SEQ ID NO: 1377 - protein, 363 aa, unidentified
  REGION 1..363: note = Description of Unknown: uncultivated organism sequence
  REGION 1..363: note = Category: MG61 effectors
  REGION 1..363: note = Description: MG61-213 effector
MSYITITLPFNVNGREAGSLLSTAWLFKIASHRMLSLARQTPVLPATDIGWKSVFRKAVYEIIPNRRYADGVIVLVRSIYESCRQLGVDFKNVEFSDWLMFQQAEMEYPVRNITLREGYVFHITTIDYVGNIDRVVVKPTIPRGYRLLLDKVLEERVGHTARVVIKDYGIRENRLWVHGEVQLTVPMDFYYRHMIRYGQNNGRLFGGVDVNVDRINLVIVDEGGELRDVKTFWFREVTTRGYPRHRAWSVIGMRVHEMLDYAYHHGVKTLFLEDPGVLGRLKLMWIRNGRRLHENYNYRVATFRSSVIGMITMKAPLYSIEVKYVNPKGTTSSEEHDEVMRKHGLDRHTASAYIIALKGLKQP

SEQ ID NO: 1378 - protein, 364 aa, unidentified
  REGION 1..364: note = Description of Unknown: uncultivated organism sequence
  REGION 1..364: note = Category: MG61 effectors
  REGION 1..364: note = Description: MG61-214 effector
MQVQPLYTVKLLFNASGENAKKVLSTAWLFKIACHEVLNKSKQVRDVLIPSKIAWIKMFKNYAYELIPNKRYSYGVVYLIYGIWESARSLGIDYDNVELSDWMLLQHYEREVNGNVIRVYEDGSALVTTYDYDGSKDRILVRAKPNKGQAGFLRKIVELREKYMPKLIIRDYGVRKGKLYVRGEIHISISYDFYLKYVKRYNEPKGNLVGGIDVNSDRINLAVIDEEGKLRDVKTFWFQEVTTRGYPRRKAWSVIGMKVHELLKYAYHHGVSTIVLENPEVIGRLRLVWVRNGKRLHRNYNWRVTIFRNRIIEMITMKALIYGLHVNYVNPKGTTHSREHDDIMMRYGLDRHTASAYLIALKSI

SEQ ID NO: 1379 - protein, 369 aa, unidentified
  REGION 1..369: note = Description of Unknown: uncultivated organism sequence
  REGION 1..369: note = Category: MG61 effectors
  REGION 1..369: note = Description: MG61-215 effector
MSQYQTHRVRDASKLVEYVTIVGRLEPLTEEDYVKLVKLAHEFRKAVTYATRMIAKGIDSKVVLRELRSMLNKAYGDSAFKLAKAVVESARANNGNPLKIEIRRLFIVSEGEAGKQGNRNVRLDDSSKVRIRYPYDKSWLSFRARFGENYIPLVRELSELAKSRKCSYGARIVFRSGRIYLHLSVPVELYLKYFRKGEARGSLIAGFDLNSDRINMVIVDKSGVIRDVRTEWFPEATSPGYPRNKARVVRLRALTKLLSYAYHHGAGVAVFEELDKIKWRRFTSSPKANRKIAKFAKKQLLTHAVVMGLKYGLKPVLVDPRGTTSSSVHSAVMKKHGLDKHTASAYLIVLRYLQNRKTVNSYKAYKQHK

SEQ ID NO: 1380 - protein, 367 aa, unidentified
  REGION 1..367: note = Description of Unknown: uncultivated organism sequence
  REGION 1..367: note = Category: MG61 effectors
  REGION 1..367: note = Description: MG61-216 effector
MDREVREPEITHVTVAGRVVPSNSKDYMKLALLAHRFRKCLVKVVRMLAKGIDKNTIVKEITRELNLGYADTIYKMAKLIVEGAKHNKSNPLRIEIRKLFIASRGFSSNKGNRNIRLVSTEQVEVNIPKEEEDWVKFKVVFGERYIPLVRELVDKSLSKQLSYTAKIVFRDGRIYLHLSVPLELYLKHFRKGEARGDLVAGFDLNSDRVNMVIVDKLGIIRDVKTVWFPEVTSHGYPENKAHTTRLQALAKLLDYAYHHGVGVVVFEDLERIKKRRFTNNEKANRKIARFPKRRLLQHAVVMAMKYGFRVYLVNPAHTSKLGAEVGKELGLDRHTASAYIIALKYLGIAEHLRNIVYNYNYNQSIAK

SEQ ID NO: 1381 - protein, 361 aa, unidentified
  REGION 1..361: note = Description of Unknown: uncultivated organism sequence
  REGION 1..361: note = Category: MG61 effectors
  REGION 1..361: note = Description: MG61-217 effector
MDYITIKLPFNVDGDVAKELLSTAWLFRITTHRVLTIAKQQVLPATRIGWKNAFRGIAYRVIPNRRYADGAIILVMGVYESCRALGIDFRSVELSDWLMFQQSELEYPAKSITLKQNHEFHVTTVRYNGSTGRVIVKPTVPRNYRELLDAILTGRVEYMGRVVITDYGVRNNRLWVHGEVHITIPLDVYYEHMARHKKNSGKLIGGVDVNTDRINLAIIDEDGELIDHETFWFSEVTARGFPKHKAWSIIGMRVHEMLNYAYHHGVRILFLENPEVLGRLRLMWVRNGDRKHENYNHKVATFRSTIIEKITMKAPLYGIEVKYVNPRGTTNSKEHDKLMRKYGLDKHTTSAYLTALKGLKH

SEQ ID NO: 1382 - protein, 368 aa, unidentified
  REGION 1..368: note = Description of Unknown: uncultivated organism sequence
  REGION 1..368: note = Category: MG61 effectors
  REGION 1..368: note = Description: MG61-218 effector
MGDGWLSVLQSQTGNVVDAFTVVNYVTIIGKLHPASGEDYMRLVRLAWDFKNTVRITIRMIAKGVGRSNILKELRGVLNKAYADSAYKLAKAMVEGCLFNGCNPLHIEVRRPFIVSEGESSRLGNRNVRLEDTNIVKVKYPYDGSWITLRAEFGERYLPLLRELAELARRKKVSYGARIVFREGNIYLHLSIPIKLYLKYFKRGEAKGGLVGGFDLNSDRVNLVIIDVHGRIVDTRTAWFTEAVSHGFSRNRARALRLGALAKLLKYCYTHNVGVVVFENLPLIKRRRYTRSRVGNRKITLFAKRQLIQYGIVMALKYGFKTLLTNPKGTTNSKEHSEVMKKYGLDRHTASAYLTALRGLETLNENYK

SEQ ID NO: 1383 - protein, 363 aa, unidentified
  REGION 1..363: note = Description of Unknown: uncultivated organism sequence
  REGION 1..363: note = Category: MG61 effectors
  REGION 1..363: note = Description: MG61-219 effector
MTYVTLVLPFNASGDVAKRLLSTAWLFKVASHRLLSIAKQMPVPPGSDIGWKSAFRSVAYEVIPNRRYADGVVTLIRSIYESCRQLGVDFRSVELGDWLMFQQSELEYPARNITLKPGHEVHVTTVSYSGESYRDVVKPLIPRSCGMLVDKVVEERQEYTGRVVVNDFGVRGNTIRVCGEVQIIIPLSFYYKYMAKHREPKGNLIGGVDVNVDRVNLAIIDERGILRDYKTFWFKEVAARGYPRASTRSAIGARVHEMLEYAHHHGVSTIVLENPEVLGKLRLLWIKNGKRGGENYNYKVSIFRCRVIEKIALKAPLYALKVKYASPAGTTNSKEHDEAMKRHGLDRHTASAYLIALRELNPS

SEQ ID NO: 1384 - protein, 372 aa, unidentified
  REGION 1..372: note = Description of Unknown: uncultivated organism sequence
  REGION 1..372: note = Category: MG61 effectors
  REGION 1..372: note = Description: MG61-220 effector
MEPPRYVTIALDFHADSGEAKAVLSTAWLSKLVAHRVLNLVKRNELLVDLLEYRFLKTLRGKCYDILPNRRYVDGILKLIHSTLKSAKALEVNIKEIELKRWLLFQSDRERGYAKGNMNIRLIDLHHIRVLTIGYDGKTTYIELEVSVPKGWRKLIESLVDRANKGLMGYPARVIVKDYGLGKNGLHVHGEVQVMVPYELYLEVMRRYSEPRGINVAGVDVNVERIDAVVIDEYGNLVSNKTFWIKRATHMGIRRKRAWSLIGEQIHALLKWLYSQGVSIIGLENPEIIGYLRYYWIRNGERKGGKWNCKVSMFRNSIIERITWKAPLYSMKTIYVNPRNTSKEGEKIGKKLGLDRHLGSAYIIAKRALKYL

SEQ ID NO: 1385 - protein, 346 aa, unidentified
  REGION 1..346: note = Description of Unknown: uncultivated organism sequence
  REGION 1..346: note = Category: MG61 effectors
  REGION 1..346: note = Description: MG61-221 effector
MCKLCAHRLLNIVKENPLLADLSQYDFIKFGRKLCYGIIPNRRYVDGISTLLHASLQSAKALKVNITKLELKPWLLFQSEAEPWAKGNLNIQFINNDKVRVLVFDKDKSSRKITIEPVIPKGYAKLIRSLVGKALRKEVGYPARVYITDYGGRLEHLYGEIHVMVKYDLYLEVMRRYKKPLGDNIGGVDVNVDRLNLVVINRDGDIVWKHTVRFPQIASRGYRGEKAWSIIGEAIHSILKNAYSHGASVIAVENPEVIGYLRYYWIRNGERRTKNYNYKVAIFRNSIIERIMWKAPLYGLHVVAVNPKGTTHSEDHEHVMRRYGLDRHTASAYLIALKARRNIQRP

SEQ ID NO: 1386 - protein, 363 aa, unidentified
  REGION 1..363: note = Description of Unknown: uncultivated organism sequence
  REGION 1..363: note = Category: MG61 effectors
  REGION 1..363: note = Description: MG61-222 effector
MSYITLTLPFNANGLEAKRLLSTAWLFKIASHRMLSIAKQSPVLPVTDIGWKNTFRRVIYEIVPNRRYTDGVIVLVRGIYESCRQLEVAFRDVELGDWLMFQQVEREYPVRNITLKQGYEFHITTIDYNGEAERVIVKPTVPKSYKLLLNRILDEKQKHIARVVIKDYGVRRDMLWVHGEIQLTIPIDFYYKYMTRYRRNYGRLYGGVDVNVDRVNLAIVDDEGKLRDKKTFWFREVVARGFPKKKARTIIGMKVHKMLRYAYHHGVKVLFLENPSTLGKLKLLWIRNGKRLHGNYNWKVSIFRSSVIEMIVMKAPLYSMKVGYVDPRGTTNSREHDEIMRRCRLDKHTTSAYLIALKGLKQP

SEQ ID NO: 1387 - protein, 371 aa, unidentified
  REGION 1..371: note = Description of Unknown: uncultivated organism sequence
  REGION 1..371: note = Category: MG61 effectors
  REGION 1..371: note = Description: MG61-223 effector
MSYTTLVLPFNVDDVAARWLLSTSWLFKVATHRMLSLAKQFPVLPATDIGWKNTFRKTVYGVVPNRRYTDGVIVLVRDIYESCRQLGVDFREVELGDWLMFQQSEKEFPVRNITLRQNYEFWITTINYNGESKRMTIKPTIPKNCRPLLDRILEEKQKYTARVVIKDYGIRKNKLWIHGEIQVTIPIDFYYKHTARYRGNNGRLYGGVDVNTDRINLAIVDRYCRLRDVKTFWFEDATRRGYPRRKARILVGMAVHKMLRYAYHHGVRMLFLEDPSVVSRLRLLWIRNGRRLHRNYNWRVSVFRSSVMEMITMKAPLYAVKVDYVDPKGTTNSEGHNEIMKRYGVDRHTASAYLIAMKGIKRHAMIQKATT

SEQ ID NO: 1388 - protein, 1513 aa, unidentified
  REGION 1..1513: note = Description of Unknown: uncultivated organism sequence
  REGION 1..1513: note = Category: MG61 effectors
  REGION 1..1513: note = Description: MG61-224 effector
MSKRILGLDLGTNSIGWAVVDEAKEEIVNAGVRIFPEGVVSKTIGSGDKEETKNAARRRARQTRRQFYRKRLRKAKLLEVLIEQNMCPLSLDELNKWRHWDKKEKSQAKVFPNSDEFMNWIRMNPYELRARAIIGTVTAMELGRIFYHLIQRRGFLSSRKGDVKESKTLFEKGKPELNILPINRTEKEIAESGCQTMGEYLNRVVPKEGESYKPILDSDGNEIRARGRYATRKMYVEEFEAIWNAQADHLGLDKRSVLFKKVRMLKGNENSERNKKRISTLKKFYGAENVFVENRGNNLHITTTRTLPFKIFLAGDDVELKRNESVLFWQRPLRSQKGTLGNCSFEDTLPVINMDGTQRKNEKGKPVTYSKKPCPISHPLFELFRTHQFINTIEFGEKQRLSKDQKKQVLELINRKDNAFSFKEIVKKLELFSETFNYENDFKVSGNYTISKLSKLLGKKVWDEHPLACWEAFYFYDDSTKLQKKLNKAYGLNLKVEEVDKIRLKEGYSRVSIKAIQNILPFLEKGYFYSTAVILGGVKNAFGSRWDSYLQDETKDKIEDDILKMLKDKNKEGELIEKIKAYLSDSSNRYGFSENSPAFKKLYHHSQSVEKKELKNKLPPVENIRNPIVQQSLYEMRKVVNALLEKYKEEDPTFSFSSIRVEMGRDLKNGKKQRQKINQVIRKNRENNDEARERLAEFGLQPSRNNIQKYLLFKEMERRAGHVQSPYTGRTISLTDLLGKDNLIQIEHIMPFSKSLNDSFANKTLCESSVNALKGDKTPYAFYHQNSDPKIWGVSSWDEVKHRAFKLLPYAKAKRFVSDKSVDAEDFISRQLNDTRYIAKKATEILSEICSDVQVMPGQLTAELRHLWGLNNVLESSFGVTKQFSDIPLKPGEYYLVLNEQRESIQLIPKHNPKPKTNPNELLVAGEINNAIFESKKLVLELGAPDQANGKYWAKLTLKPIQKFSPKYISKPITDENRIVFKGLVKNQRFSSDSIPKNPIAEHKDGIYWGSFAVKNKRIERSTVAPITNRKEIKLFGEVKDGIFKSYIYECSTTAENGKYWLVLEPDFETPEFIQASNPEPQHSENEHIITGTIDDNGVFVSDLDPSYSVKTDHSAGKYYAVIELASKENDFYLMENPAPKVEKEHRLIEGTVWVDKYSSELKFDPKKNREDQRHHAIDAITIALTKRGYLNALSHYRAKELPEDYKPSFPEPWDGFEHDVKNAAEKILISYRKNDRIISKGKKGFSVRGQLHKENVFGKHKGKEDEKKSFYHRRKYLNDLKTNKHVSKIVDERIKQLVLDHLKNSCDVNISSEKGFKIPPNAFFTKNGKPRLFLPPNPRKKKNSQPVPIKKVRVSETIKNAQQKRLGVNQYVNPRNNHHVMIYKTQSGELKEIIVSFWDAVHRLIKGEDLYKLPKDGIEVVLVLEKNDMVLLNLSKEEFDRRKHDICLLSTNLYRVQKIYSGDESFEYVFRHHLASTLNNKNEEVMIKSFDKFRKINPKKVKVSELGEISLC

SEQ ID NO: 1389 - protein, 356 aa, unidentified
  REGION 1..356: note = Description of Unknown: uncultivated organism sequence
  REGION 1..356: note = Category: MG61 effectors
  REGION 1..356: note = Description: MG61-225 effector
MSQYQTSSIVNASTLVKYATIVGRVVPASSEDYMKLTRLAWNFRRAVQVVARIIAKGVEANDVLKELRRMLNKAYADSAFNQAKAVVRACLATGGDPRKIEIGKLFIISEGESSRMGNRNIRFEDTNIVKVKYPYDGSWIQLKARFGEKYLSPLKELVELAKQKKVSYNAKIVFRSSRIYIHVSVPIHLYLKHFKKADARGELVAGFDLNSDRINLAIIDKYGRLADAKTVWFTEITSHGFPHNKAKTTRLRALAKLLKYCYAHGVGTVVFENLYEVKKRRFTKSRNTNRKISRFAKRELLDHAIVMSLKHGFKVLLADPKGTTNSKEHDEAMRTHGLDRHTASAYLIALRGLKPP

SEQ ID NO: 1390 - protein, 365 aa, unidentified
  REGION 1..365: note = Description of Unknown: uncultivated organism sequence
  REGION 1..365: note = Category: MG61 effectors
  REGION 1..365: note = Description: MG61-226 effector
MNYITPSFPFNVNGEVAKKLLSTAWLFKIATHRMLSIAKQTPVLPATDIGWKNVFRKIIYEVIPNRRYADGVITLVRGIYESCRELEIGFREVELSNWLMFQQSEKEYPVRNITLKEGYEFRITTIDYNGNSERVVIKPTTSKNYVLLLDKILEERQKHTAKVVIKDYGVRKSRLWVHGEIQLTIPIDFYYKCMTRYKKNKGKLYGGVDVNTDRINLAIVDSEGNLRDAYTFWFRETTARGYPRRRARTVIGMRVHEMLKYAYHHGVKEVFLENPKVLGRLRLLWIRNGRRLHRNYNWKVMTFRSRIIEMITTKAPLYSISIKYVDPRGTTSSKEHDEIMKKYRLNRHTASAYIIALRGLNRKFI

SEQ ID NO: 1391 - protein, 387 aa, unidentified
  REGION 1..387: note = Description of Unknown: uncultivated organism sequence
  REGION 1..387: note = Category: MG61 effectors
  REGION 1..387: note = Description: MG61-227 effector
MELPKYITVTMDFHVNGDYARNILSTAWLSKLVAHRVLGLIKENELLADLSEYKFLKVLRSKCYDVLPNRRYVDGILKLVHSTLKSAKALKVNIKDIELKQWLLFQSDGERGYARGNMNIRFIDTQHVRALTLGYDKRTRYVELEVTTPKGWKKLIEFLINRAFDGQIGYPARVVVKDYGIGKHGLHAHGEVQVMVPYSLYLEVMRRYDKPRGSNIAGIDVNVERLDAVVVDEYGNLVSYRTFWMKNTTFMGVRRKRSWSLIGEQIHTLLKWLYSQGVSIIGLENPEIIGHLRYYWIRNGERRDRKWNWKVSMFRNSIIERMTWKAPLYSMKVTYVDPKNTSKEGEKIGKKLGLDKHLGSAYIIAKRTLKHLQKLKTYKEKTVAQLS

SEQ ID NO: 1392 - protein, 364 aa, unidentified
  REGION 1..364: note = Description of Unknown: uncultivated organism sequence
  REGION 1..364: note = Category: MG61 effectors
  REGION 1..364: note = Description: MG61-228 effector
MVENPLYTIKLSFNASGDRAKKILSTAWLFKLACHRVLSRSKELLNALIPSKIAWVKMFYSDARDLIPNKRYAYGGIYLVYGIWEGARELGIDYRSIELSDWLMFQHYDREVDGNVIRILEDGSALVTTYSYDGSKDRVLIKSKPNRGHGELLKLVVESKEKYMPRVVVRGYNVRSGKLYVSGEIHVTIGYDFYLKHATRYGEPRGSLIGGVDVNSDRINRAIVDEKGNLRDCKTFWFSETTARGCPRRKAWSIIGMKIHEMLRYAYEHGVSTIALENPEALGYLKFAWVREGDRKHENYNYKIAVFRNSIIERIAMKAPLYWLDVKFVDPRGTTSSREHDEIMKRLGLDRHTASAYIIVLRSI

SEQ ID NO: 1393 - protein, 370 aa, unidentified
  REGION 1..370: note = Description of Unknown: uncultivated organism sequence
  REGION 1..370: note = Category: MG61 effectors
  REGION 1..370: note = Description: MG61-229 effector
MDYLTIKLPFNVDGDVAKGLLSTAWLFRVAAHRVLALARQQESLPGSRIGWKNMFRQFAYGVVPNRRYADGAVTLVMSIYESCRELGVDFKGVELSNWLMFQQSELEYPAKSITLKQNHGFHVTTVRFNGSISRVVIKPTVSRSYRELLNAVLFERVKYMGRVVVRDYGVRNNQLWVHGEVQVTVPMDVYYEHMARHRRNAGRLFGGVDVNTDRINLAIIDEEGELRDTHTFWFSEASARGFPMHKAWGIIGMRIHELLDYAYNHGVKTLFLENPEILGRLKLMWVRGGDRRHENYNHKVSVFRSSIIERIALKAPLYSIETKYVSPRGSTNSEEHDELMRKYRLDRHTASAYLIALRGLITNGNKYYYD

SEQ ID NO: 1394 - protein, 351 aa, unidentified
  REGION 1..351: note = Description of Unknown: uncultivated organism sequence
  REGION 1..351: note = Category: MG61 effectors
  REGION 1..351: note = Description: MG61-230 effector
MRKLAEYATIQGLLLPETPEDHLRLIRLAYEFRRAVTYATRMIARGVGERAALRELRSMLNKAYGDSAYKVAKMLVRSCASNGGDPRRIKIRKLFIISGGEASRKGNRNIRLGCGYVLIKYPFDGSWLKFRCCFGKYSGLIEELAQLATEKKVSYGARIVFRRGRIYLHLSVPVELYLKHFRRGRASGSHVAGFDFNSDRINMVIVDEYGKIRDARTEWFPEVTSHGYPRSKARARRLEALARLLDYAYHHGVGVVAFENLFLVKRGEFTGCARANRKISKFAKRQLIQHAILMARKYGFKVILVDPKGTTKSREHDEAMRRHGLDRHAASAYLVALRGIERCTTKQNAIV

SEQ ID NO: 1395 - protein, 363 aa, unidentified
  REGION 1..363: note = Description of Unknown: uncultivated organism sequence
  REGION 1..363: note = Category: MG61 effectors
  REGION 1..363: note = Description: MG61-231 effector
MSVQRLSSNTVDGVISHVTIIGKLIPETPEDYMKLARLAWSFKRAVELMVREVANGTPMKVATKKLYSLIPNYVYLESAYKHAKLVVEGCRFNNGNPRHVHIKKLFIVSRGNKWDKGNRNIKVIPRHDYFEVLIKYPWGGSWTKCRVFFGEKYIPLLRELVELSEKRIEGYGARIVFRNRRLELHLSVPLSLYLKYFSLPKRRGYELVAGIDLNSDRINMVVIDPNARIITMKTAWFPEVTLHGFPRDRARDIRLKKLKKLLSYARRIGVDYVVFENLFVVKKRGKAPSPSGNRRITRFAKKQLLQHGLLMVLKFGLTPILVDPRGTTHSREHREVMRKRGLDRHMASAYIIAFKGLKIIKNH

SEQ ID NO: 1396 - protein, 379 aa, unidentified
  REGION 1..379: note = Description of Unknown: uncultivated organism sequence
  REGION 1..379: note = Category: MG61 effectors
  REGION 1..379: note = Description: MG61-232 effector
MSLDVTKSLPEYLTVDLPFTVKGDHAKLIWFTSWLSKPCARRLLGDVKDDDLLVDLSQTSFLKYARKRCYGILPNRRYVDGVATLMHSTLKSARKLGINIESIELKQWLLFQSEAEKEKKGNLNIRLISANKAEILVFNHRRETEKIVVRLRIPKGYRKVLETLVEKALNKEIGYPARIVIKEYNFYPSNLHLYCSLQVMIPYSIYLETMKKYDKPLRDHVAGVDVNVDRLNLTIVDKYGRLRDTKTFWLREITSRGYRRKQAWTKIHQAIHAMLDYAYHHGVSVVALENPEIIGYLRYYWIRNSYRKTKNYNYKVAVFRNRIIEVVTYKAPLYSLKTIYVNPKGTSHSKEHDETMRKYGLDRHSASAYLIALKGLNLP

SEQ ID NO: 1397 - protein, 392 aa, unidentified
  REGION 1..392: note = Description of Unknown: uncultivated organism sequence
  REGION 1..392: note = Category: MG61 effectors
  REGION 1..392: note = Description: MG61-233 effector
MDYLTIRLPFDANGDVVKELLSTAWLFKIAAHRVLAVAKQMQVLPGTRIGWKNTFRDIAYGVIPNRRYADGAVTLVMGVYESCRTLGVDFRGVELGDWLMFQQSELEHPSRNITLKPNYEFHITTIRYNGTTSRVVVKPTIPRSYGELLDAGLTGRVGYIGRVVVRDYGVRGVHGEVQVTIPLDFYYEHMSRHKRNSGRFVGGVDVNADRINLAIIDSVGRLIDHKTFWFSETSRKGYSGHSAWSIIGMRIHETLNYAYHHGVKTLFLENPEILGRLKLMWVRSGDMGHGNYNHKVATFRSTIIEKIALKTPLYGIEVSYVNPRGTTNSIEHDKLMRKYRLDKHTASAYLTALKGLNTNENEQPQITMKTETVQRGLRPCIMCLMVTLTTSQ

SEQ ID NO: 1398 - protein, 364 aa, unidentified
  REGION 1..364: note = Description of Unknown: uncultivated organism sequence
  REGION 1..364: note = Category: MG61 effectors
  REGION 1..364: note = Description: MG61-234 effector
MSHYQTNEVIDGKSLVFHVTIIGKLAPQTPNDFMKLVRLAYDFRKAVLYATRMISKGMKANEFLKELRGMLNKGYGDSACKVAESIVEGCKFNGGNPQHIKVKKLFIASEGETSRFGNRNVRLEATDKVKIKYPYDRTWLFFKAQFGKDYLPLVQEIVKLAKEKKMSYGARIVFRDGRIYSHLSIPVDLYLKYFSKGSANGSLTAGFDLNADRINMVVVDKFGRIRDVKTEWFPEVTSHGFPRSKAKIKRLEALARLLDYAYHHNVGVVVFENLFIIKRRKFTKNSSANRKMSRFAKKELLQYGIIMARKYGFKVLLINPKGTTHSKEHGEVMRKYGLDRHTASAYLIALRGIESHNLIRKAII

SEQ ID NO: 1399 - protein, 370 aa, unidentified
  REGION 1..370: note = Description of Unknown: uncultivated organism sequence
  REGION 1..370: note = Category: MG61 effectors
  REGION 1..370: note = Description: MG61-235 effector
MDYITLKLPFNADGDAARELLSTAWLFKIATHRVLGVARQQALPGSRIGWKNMFRKIAYGIIPNERYADGVITLVMGVYESCRELSIDFRGVELSDWLMFQQSSLEYPSRNTTLKPNYEFHVTTVRFDGSTGRVVVKPTIPKIYKALLDAVLFEHVKYMGRVVVTDYGVRSNQLWVRGEVHMTVPMDVYYERMARHKKNSGKLIGGVDVNTDRFNLAIIDKEGRLIDHRTFWFSEATARGFPKHSAWSIIGVRIHEMLNYAYHHGVKTLFLENPEVLGRLRLMWIRSGDRNHENYNHKVSIFRSSIIERIAMKAPLYSIETKYVNPRGTTNSKEHDETMKKHGLDKHTTSAYLTALRGLGINKHVHYKQS

SEQ ID NO: 1400 - protein, 364 aa, unidentified
  REGION 1..364: note = Description of Unknown: uncultivated organism sequence
  REGION 1..364: note = Category: MG61 effectors
  REGION 1..364: note = Description: MG61-236 effector
MVENTLYTIKFTFNVGGDRAKKILSTAWLFKLACHRVLSRSKELLNALIPSKIAWVKMFYSDARDLIPNKRYAYGAIYLIYGIWESSRSLKIDHRNVELSNWLMFQHYDREVDGNVIRVLGDDTILVTTYSYDGSKDRVLIKAKPNRGHGELLKLVVESKEKYMPRVVVRGYNVRNGKPYVSGEIHVTIGYDFYLKHMTRHREPKGSLIGGVDVNADRINLAIVDEKGNLRDSKTFWFTEVVARGYPRRRAWSVIGMRIHEMLRYAYSHGVATIALETPEVLGYLRLAWVRDGGRKHENYNYKKAIFRSSVIERIAMKAPLYGLNAKLVDPKGTTSSREHDEIMKRSGLDRHTASAYLIALRSI

SEQ ID NO: 1401 - protein, 370 aa, unidentified
  REGION 1..370: note = Description of Unknown: uncultivated organism sequence
  REGION 1..370: note = Category: MG61 effectors
  REGION 1..370: note = Description: MG61-237 effector
MAGEVREPEITHATIIGRVVPLDNEGYMELVLLAYRFRKALVKAIKMYTKGIDRNTIVKEITKELNLGYADTIYKLAKLIVKGIRHNESNPLKIKIRKLFIASRGFASNKGNRNIRLLSTNELQVNIPWKGWVKFKVVFGKRYIPLVNELIEKALSKQLSYSGKIVFRDGKPHLHVSVPIELYLKYFSKGRANGKLVAGFDLNSDRINMVIVDIQGIIRDTKTEWFPEATSHGFSKNKAHTMRLQALARLLNYAYRHGVGIVLFEDLARIKKRRYTKSKTANRKITRFPKRKLLQHGIVMAMKYGFRVYLVNPAYTSKIGEKLGKELGLDKHTASAYILALKYLGVANLISGSSSIQKKPEYHYLLNSLV

SEQ ID NO: 1402 - protein, 371 aa, unidentified
  REGION 1..371: note = Description of Unknown: uncultivated organism sequence
  REGION 1..371: note = Category: MG61 effectors
  REGION 1..371: note = Description: MG61-238 effector
MSYITLTLPFNIDGGEARKLLSTAWLFKIASHRMLSLAKQIPVLPVTDIGWKNTFRKVIYEVIPNRRYTDGVIVLVRSIYESCRQLGVNFKDVELGDWLMFQQVEKEYPVRNITLKQGYEFHITTIDFNGNSDRIVVKPSIPENYRLLLDGILEEKQKHTARVVIKDYGVRKNKLWVHGEVQLTIPLDFYYKYMVRYRRNYGRLYGGVDVNVDRINLAIIDRYGRLRDVKTFWFEDVTRRGYSKRKARILIGMAVHGMLQYAYHHGVKTLFLENPSILSRLRLIWIRNGRRLHRNYNWKISVFRSSVIETISMKAPLYSINTEYIDPKGTTHSKKHDEVMKKYGLDRHTASAYLIALKGIKGYRMIQKATD

SEQ ID NO: 1403 - protein, 364 aa, unidentified
  REGION 1..364: note = Description of Unknown: uncultivated organism sequence
  REGION 1..364: note = Category: MG61 effectors
  REGION 1..364: note = Description: MG61-239 effector
MLHYQTNEVINAETLISHVTITGKLIPQTPSDFMKLVRLAYDFRKAVLYATRMISKSMKANELLKELRGMLNKGYGDSAYKVAKSIVEGCRFNGGNPQHIKVKKLFIVGEGEAVRFGNRNVRLEATDRVKIKYPYNRTWLFFKIQYGKDYLPLVQEIVKLAKEKKISYSARIVFRDGRMYLHLSIPVDSYLKYFSKGSANGSLTAGFDLNADRINMVIVDKFGRIRDVKTEWFPEVTSHGYPRSKAKIKRLEALAKLLKYAYHHNVSVVVFENLFIIKRRKFTRNSTANRKISRFAKKELLQYGIIMAMKWGFKVLLIDPKETTSSKQHSIVMKKYGLDKHTASAHLIALKGIERHSLIQKATT

SEQ ID NO: 1404 - protein, 398 aa, unidentified
  REGION 1..398: note = Description of Unknown: uncultivated organism sequence
  REGION 1..398: note = Category: MG61 effectors
  REGION 1..398: note = Description: MG61-240 effector
MPFLSRWQRLGASAIYLSTVSLGPLTVVALGSLTIKLPFNVDGDTAKELLSTAWLFKIATHRVLAVVKQQQILPGSRIGWKNAFRRIAYEIIPNRRYADGAVTLVMGVYESCRALDVDFKSVELGDWLMFQQSELEYPAKSITLKPGYEFNITTIRYNGATGRVVLKPTIPKIYKALLDAIITRRVGYMSRVVVTDYGVRSNQLWVRGEVHVTIPLDLYYERMARHKKNSGKLIGGVDVNADRINLAIIDEDGELIDHKTFWFSEASRKGFSRHKAWSIIGMRIHEMLNYAYHHGVRALFLENPGVLGRLKLVWIKNGDRGRENYNHKVSIFRSTIIEKIALKAPLYSIETKYVNPRGTTNSTEHDETMRKHRLDRHTASAYLIALKGLTPMNTSNRK

SEQ ID NO: 1405 - protein, 363 aa, unidentified
  REGION 1..363: note = Description of Unknown: uncultivated organism sequence
  REGION 1..363: note = Category: MG61 effectors
  REGION 1..363: note = Description: MG61-241 effector
MSYITLCLPFNVDGVEAKKLLSTAWLFKVASHRMLSIVKQSPIPPVTDIGWKNTFRKVIYDVIPNRRYTDGVIVLVRGIYESCRQLGIDFKSVELGDWLMFQQVEKEYPVRNITLKQGYEFHITTIDCNGNSDRIVIKPSIPKKYRVLLDKILEEKQKHTARVAIKDYGVRKGMLWIHGEIQLTIPLNFYHKYMIKYRRNYGKLYSGVDVNSDRINLVIVDGEGNLRDTYTFWFREVTARGYPRRRARSVIGMKIHEMLKYAYHHGVRELFLENPEVLGRLKLLWVRNGKRLHKNYNWKVATFRSSVIEMIAMKAPLYSIDVKYVDPRGTTHSKEHVEIMRKHRLDKHTSSAYMTALKGLKQP

SEQ ID NO: 1406 - protein, 369 aa, unidentified
  REGION 1..369: note = Description of Unknown: uncultivated organism sequence
  REGION 1..369: note = Category: MG61 effectors
  REGION 1..369: note = Description: MG61-242 effector
MPVDYITLRFPFNASGSTAGELLSTAWWFKIATHRLLNVLKQQQTLPITTIGWVNTFKDIVYGIIPNYRYATGVITLMMGIYESCRKLGIDFKRVELSDWLMFQQGYLEYSVKSITLKTNYKFHITTIKYDGSISRVVINPTIPENYEKLLSVIITKQIKHTGRVVIDRFGVRNNQLWIHGEVQVTIPLDIYYEHMARHKRNNGKLIGGVDVNTDRINLAIVDENGGLRNYKTFWFSETIARGFPKDKARIIIGSKIHEMLDYAYNNGVKTLFLEDPEVLGRLKLMWVRSGDRKHENYNYKVMVFRSSIIERIALKAPLYSIEVKYVNPGGTTNSEEHKDIMRRYGLDKHTASAYLIAIRGLGLSPRAV

SEQ ID NO: 1407 - protein, 314 aa, unidentified
  REGION 1..314: note = Description of Unknown: uncultivated organism sequence
  REGION 1..314: note = Category: MG61 effectors
  REGION 1..314: note = Description: MG61-243 effector
MSMFRSIAYGIVPNRRYADGAVTLVMGVYESCRALGVDFRGVGLSGWLMFQQSELEYPAKSITLRRGYEFHITTIRFDGSTSRVVIKPTIPRNYKGLLDAVLTRHVEYMGRVVVRDYGVRNNQLWVHGEVHMTVPLDIYYEHMSRHKRNGGKLFGGVDVNTDRINLAIIDEEGGLRDYKTFWFSEVTARGFPRQKAWRIIGMRIQELLNYAYNNGVKTLFLENPEVLGRLKLMWVRNGDRKHENYNYKVSVFRSSIIERITMKAPLYSIETKYVNPKGTTNSTEHDELMKKYGLDRHTASAYLIALRGLTHQQK

SEQ ID NO: 1408 - protein, 329 aa, unidentified
  REGION 1..329: note = Description of Unknown: uncultivated organism sequence
  REGION 1..329: note = Category: MG61 effectors
  REGION 1..329: note = Description: MG61-244 effector
MAKQQQVLPGDKIGWVSMFREVAYGIVPNRRYADGAVTLVMGVYESCRALGVDFRSVELTDWLMFQQSGLEYPAKSITLRRGYEFHITTIKYDGSIGRVVVKPTVSEGYRELIDAIYRERIKYMGRVVIGDYGVRNNQLWVHGEVQVTVPLDVYYEHMARHRRNAGKLIGGVDVNTDRINLAIVDEEGGLRDYKTFWFSEVTTRGFPKHKAWSIIGMRIHEMLNYAYNNGVKTLFLENPEVLGRLRLVWIRNGDRKHENYNYKVSVFRSSIIEKIVLKAPLYSIETKYVNPKGTTNSTEHDEAMRKYGLDRHTASAYLIAIRGLTHQQK

SEQ ID NO: 1409 - protein, 364 aa, unidentified
  REGION 1..364: note = Description of Unknown: uncultivated organism sequence
  REGION 1..364: note = Category: MG61 effectors
  REGION 1..364: note = Description: MG61-245 effector
MLQYQISDVVDASKLVTHTTVIGKLIPTSPEDYMKLVKLAYDFRRAVLYATRVISKGMKTNDILRELRSMLNKAYGDSAYKVAKTIVEGCRFNGGESHHIKIRRLFIVSEGEASRLGNRNVRLESTDVVKVRYPYDKSWIVLKVHFGRKYLPLAREVSELAKQRRVSYGARIVFKDGRIYLHLSVPINLYLKYFSKGKAHGELVAGFDLNSDRVNMVIIDRYGKIRDVKTERFSEVTSHGYPRSKAKARRLEALAKLLKYAYHHNVGTIDLENLFVIKKREYTRNPTANRKITRFAKKELLRHGILMAMKYGFKVLLVNPKGTTRSKEHDEVMRKYGLDRHTASAYVIALRGIESHNLMRKAII

SEQ ID NO: 1410 - protein, 370 aa, unidentified
  REGION 1..370: note = Description of Unknown: uncultivated organism sequence
  REGION 1..370: note = Category: MG61 effectors
  REGION 1..370: note = Description: MG61-246 effector
MDYLTIKLPFNVDGDVAKGLLSTAWLFRVAAHRVLALARQQESLPGSRIGWKNMFRQFAYGVVPNRRYADGAVTLVMSIYESCRELGVDFKGVELSNWLMFQQSELEYPAKSITLKQNHGFHVTTVRFNGSISRVVIKPTVSRSYRELLNAVLFERVKYMGRVVVRDYGVRNNQLWVHGEVQVTVPMDVYYEHMARHRRNAGRLFGGVDVNTDRINLAIIDEEGELRDTHTFWFSEASARGFPMHKAWGIIGMRIHELLDYAYNHGVKTLFLENPEILGKLRLMWIKNGDRKHENYNHKVSVFRSSIIERIALKAPLYSIETKYVNPKGTTNSKEHDELMRKYRLDRHTASAYLIALRGLITNGNKYYYD

SEQ ID NO: 1411 - protein, 363 aa, unidentified
  REGION 1..363: note = Description of Unknown: uncultivated organism sequence
  REGION 1..363: note = Category: MG61 effectors
  REGION 1..363: note = Description: MG61-247 effector
MSYVTVTAGFNTSGEKAKLLLSTAWRFKIAAHRVFTHAKAMPILPATKIAWKSTFREVARSAIPNRRYADSAIILVMGIYEACRELGIDFRDVELGEWLMFQQSEKEWPPRNITLKRLDEVWVTTFDYDGTSRRIRLTVSTSGIFRKLLKALLDEKQPYNPRIYIKSWNMRQGTLYVRGQLQVAIPYSFYVAHAARYRRNRGSLYAGVDVNTDRINLAIVDSKGWLRNVKTFWFREVTARGYPRHRARSVIGMRVHEMLKHAYHNGVKTLFLEDPGVLGRLKFLWIRGGKRKSRNYNYKVSVFRSSTIEMIAMKAPLYAINTRYVSPRGTTNSEEHDEVMRRYGLDKHTASAYIVALRGLGYA

SEQ ID NO: 1412 - protein, 374 aa, unidentified
  REGION 1..374: note = Description of Unknown: uncultivated organism sequence
  REGION 1..374: note = Category: MG61 effectors
  REGION 1..374: note = Description: MG61-248 effector
MNEIEYVTLRLPFHAVGEGAKLIYWTAWLSKLCAHRLLDQVKQNPLLASLSQYEFVKMGRSLCYGVLPNRRYVDGVSTIIHASLQSAKALKIDVTKLELKPWLLFQSEAEPRAKGNLNMQFADYSTVKVLVFDKDGTSRKIAIRPVVPKGYAKLVKVLVDKALRREIGYPARIYVRDYGDGLAHLYGELQVMVKYDLYLEVMRRHGKPLGENIAGVDVNVDRLNLVVVNRDGDIVWTHTARFPQVTARGFPRKKAWSIIGEAVHSVLENAYSHGASVLAVESPEVIGYLKYYWIRNGNRGSRSYNYRVSIFRNAIIERLVWKAPLYGLKVVPISPRGTTRSKDHDYVMRRYGLDRHTASAYLIALKTRNIVRTY

SEQ ID NO: 1413 - protein, 366 aa, unidentified
  REGION 1..366: note = Description of Unknown: uncultivated organism sequence
  REGION 1..366: note = Category: MG61 effectors
  REGION 1..366: note = Description: MG61-249 effector
MLQYQINSKGVIDATKLVSHVTIVGKLVPISNEDYMKLVRLAHDFRKAVTYATRMIAKKHPTNNILRELRAVLNKAYGDSAYKIAKTLVEGAKFNGSSPRRIKVRKLFIISEGEASRFGNRNVRLEDIDMAKIRYPYNGTWLNFKVLFGTKHIPLVKELVELAKARKVSYGARIVFRNGSIYLHLSIPVHLYLKYFKKRYANGKLVAGFDLNSDRVNMVIVDRYGRIRDMKTAWFPEITSHGFPKNKAKAKRLEALAKLLKYAYYHDVGTVVFENLLMIKHRKYTRSPTANRKISRFAKKELLQHAIISAMKYGFKILLVNPRGTTRSKEHDKAMRKYGLDRHTASAYLIAVKSIEGRTMIQKTIT

SEQ ID NO: 1414 - protein, 364 aa, unidentified
  REGION 1..364: note = Description of Unknown: uncultivated organism sequence
  REGION 1..364: note = Category: MG61 effectors
  REGION 1..364: note = Description: MG61-250 effector
MLQYQTSEIVDASSLVSHATVIGRLIPFSPNDFMKLARLARDFRKAVLYATRMIGKGMEANKVLRELRVMLNKAYGDSAYKVAKAIVEGCKFNRGNPRHIKIRKLFIVSEGETLRFGNRNVRFESTDKVKVKYPYDKSWLLFKAQFGEDYIPLVQEVVKLAREKKLSYGTRIVFKNGRIYLHVSIPIDLYLQYFSKGEADGGLIAGFDINADRINMVIVDRYGRIRDIKTEWFPEVTSHGFPRSKARTRRLEALTKLLRYAYCHNVGIVVFENLLTIKRKKFTRNPTANRKITRFAKRELMQYGILMSMKYGFKVLLIDPRGTTRSKEHDDVMKRYGLDKHIASAYMIALRGMKRHSLLQKATV

SEQ ID NO: 1415 - protein, 381 aa, unidentified
  REGION 1..381: note = Description of Unknown: uncultivated organism sequence
  REGION 1..381: note = Category: MG61 effectors
  REGION 1..381: note = Description: MG61-251 effector
MSLPDYLTIIIPFTVTRGRAKLFWWTAWLSKLCAHRLLSDVKNNSMLIDLSQASFLKYARKRCYDILPNRRYIDGIATLIHSTLKSIRKLGINVKDIELKQWLLFQSEAEREKKGNLNIRLVTIHEAEILVFNHMKEPEKITIKLRTPKGYRKILETLIEKALNKEIGYPARIVVKEHNFYPNNLHLYRSLQVMIPYNLYLETMRKYNKPLGDHVAGVDVNTDRLNLAIVDKYSKLRDIKTFWFREITSRGYRRKPAWTKIHQAIHNMLDYAYNHGASHIALENSEIIGYLRYYWIRNGERKTKNYNYKISIFRNKVIEVITYKAPLYSLKTIHVNPKGTTRSEEHDEVMRRYGLDRHTASAYLIALRGIKRHTMIQKARI

SEQ ID NO: 1416 - protein, 360 aa, unidentified
  REGION 1..360: note = Description of Unknown: uncultivated organism sequence
  REGION 1..360: note = Category: MG61 effectors
  REGION 1..360: note = Description: MG61-252 effector
MSRCLTSSVVDASKLIEYVTVTGKLIPASSEDHVKLARLAWSFRRAVQLAVKMIAKGVKASDALRELRRTLNKAYADSAFKAAKAIVEGCMANGGDPLRVEVRRLFIISGGESSRLGNRNVRLEDVGSVRVKYPYDGSWIALRARFGEEYLSLLRELVELAKQKKASYNAKIVFRGGGIYVHVSVPIQLFLKHFKKGEARGGLIAGLDLNSDRINLAIIDERGRLVDVRTARFPETTSHGFPRSKARAMRLGALAKLLGYCYYHGVGTVAFEDLFEVKGRRFAKSKTANRKMSRFAKRELLQHAITMSLKYGLRVLLVDPKGTTSSREHDEVMKSHGLDRHAASAYLIALKALNQSEQMK

SEQ ID NO: 1417 - protein, 363 aa, unidentified
  REGION 1..363: note = Description of Unknown: uncultivated organism sequence
  REGION 1..363: note = Category: MG61 effectors
  REGION 1..363: note = Description: MG61-253 effector
MSYITITAGFSASGEEAKLLLSTAWLFKVATHRVLSYAKSMPLLPASKISWKNTFRKIAYEVIPNRRYADSAVVLVMGIYESCRELGVDFKDVELGDWLMFQQSEKEYPPRNITLKSVNEAWITVFSYDGRSERIKLRVSTSGTYRRLLEALLQEKQEYNPRIYIKSWNVRNGKLYVNGELQIAIPLDFYYKHVARFKVNNGKLYGGVDVNVDRINLAIIDAKGNLRDTYTFWFREVTSRGYPRHRARSVIGMRIHEMLKYAYHNGVKTLFLESPEVLGKLKLTWIRSGNRKSGNYNWKKTVFRSSVIEMVAMKAPLYAINVKYVNPRGTTNSEEHDEVMKRCGLDRHTASAYLIALKGLKQT

SEQ ID NO: 1418 - protein, 370 aa, unidentified
  REGION 1..370: note = Description of Unknown: uncultivated organism sequence
  REGION 1..370: note = Category: MG61 effectors
  REGION 1..370: note = Description: MG61-254 effector
MNEVEYVTLRLPFHAVGEGAKLIYWTAWLSKLCAHRLLDQVKQNPLLASLSQYEFVKMGRSLCYGVLPNRRYVDGVSTIIHASLQSAKALKIDVTKLELKPWLLFQSEAEPRAKGNLNIQFADYSTVKALVFDKDGTSRKITIRPVVPKGYTKLVKVLVDKALRREIGYPARIYVRDYGDGLAHLYGELQVMVKYDLYLEVMRRHGKPLGENIAGVDVNVDRLNLVVVNRDGDIVWTHTVRFPQVTARGFPRKKAWSIIGEAVHSVLENAYSHGASVLAVESPEVIGYLKYYWIRNGNRGSRSYNYRVSIFRNAIIERLVWKAPLYGLKVVPISPRGTTRSKDHDYVMRRYGLDRHTASAYLIALKTRKL

SEQ ID NO: 1419 - protein, 281 aa, unidentified
  REGION 1..281: note = Description of Unknown: uncultivated organism sequence
  REGION 1..281: note = Category: MG61 effectors
  REGION 1..281: note = Description: MG61-255 effector
MAKEVREPELTHVTITGRVVPLNNESYMELVLLAYRFRKSLTKAIKMYAKGVSRNTIVKEITKELNLGYADTIYKLAKLIVEGVKHNGSNPLKIRVRKLFIASRGFSSNKGNRNIRLLSTNELQVNIPWRGWIKYKAVFGGRYIPLVKELVKRALSKELSYTVKITFRDDKVYLHVSVPMGLYLKYFSKGKADGNLIAGFDLNSDRVNMVIVDRYGIIRDVKTEWFPEVTSHGFLRNKACTLRFQALAKLLKYAYYHGVGVVLFEDLSRIKKRRYTKKQDS

SEQ ID NO: 1420 - protein, 373 aa, unidentified
  REGION 1..373: note = Description of Unknown: uncultivated organism sequence
  REGION 1..373: note = Category: MG61 effectors
  REGION 1..373: note = Description: MG61-256 effector
MSETYLTLRLPFNACESEARLLLATARLFRHVALHLHRVILEEMPQITSLITLKRMYRRRLLEIMPNRRYVDGAITLVYSIYESAQALGVSLSEIEFKSWLLFQQSEKEYPCRNITLQKDFSFRITAISYGGESVRIQVKPTIPKKYVPILDKILEKRQPYVARVVLKGFGERKNILWVHGEIHLSVPYSFILEHFRVHKRNYGKLCGGVDVNVDRINLAIIDKYGRLRDVKTFWFEEASWKGCPKQKAWSIIGTAIHDMLKYAFHHGVETLFLENPEALGYLKTLWIRRGERKSNNYNYRVQVFRTRLVERIAMKAPLYAIDVKYVSPRGTTSSEEHDEVMKRCGLDRHSASACMIALRGREKHILTQKGII

SEQ ID NO: 1421 - protein, 365 aa, unidentified
  REGION 1..365: note = Description of Unknown: uncultivated organism sequence
  REGION 1..365: note = Category: MG61 effectors
  REGION 1..365: note = Description: MG61-257 effector
MSQCQTSEMSKTEVVSASEFVKYVTITGKLVPISIEDHMKLARLAHYFKRAVLMATRMVAKGVREAEVLRELRKRLNKAYADSAFKTAKAIVEGCSFNGGNPLHIEVRKLFIVSEGEASRLGNRNVKFESTDVIKVKYPHDGSWSLLRAEFGEKYLPLVRDLVDLAERRRISYRAKIVFRSGKVYLHLSIPIELYLKHLGKERSKGELVAGVDLNSDRICMVVVDSLGRVRDVKTEWFSELALHGFSRGRARARRLEALSKLLEYARNHNVGIVVFEDLFKIKRRRFVKSRRANRKISKFAKRELLQHGVVMALRRGFEVSLVEPRGTTSSEEHVKVMRELGLDRHVASAYLIALRRLHEASARK

SEQ ID NO: 1422 - protein, 369 aa, unidentified
  REGION 1..369: note = Description of Unknown: uncultivated organism sequence
  REGION 1..369: note = Category: MG61 effectors
  REGION 1..369: note = Description: MG61-258 effector
MSQYQTHRVRDASKLVEYVTIVGRLEPLTEEDYVKLVKLAHEFRKAVTYATRMIAKGIDSKVVLRELRSMLNKAYGDSAFKLAKAVVESARANNGNPLKIEIRRLFIVSEGEAGKQGNRNVRLDDSSKVRIRYPYDKSWLSFRARFGENYIPLVRELSELAKSRKCSYGARIVFRSGRIYLHLSVPVELYLKYFRKGEARGSLIAGFDLNSDRINMVIVDKSGVVRDVRTEWFPEATSPGYPRNKARVVRLRALTKLLSYAYHHGAGVAVFEELDKIKWRRFTSSPKANRKIAKFAKKQLLTHAVVMGLKYGLKPVLVDPRGTTSSSVHSAVMKKHGLDKHTASAYLIVLRYLQNRKTVNSYKAYKQHK

SEQ ID NO: 1423 - protein, 364 aa, unidentified
  REGION 1..364: note = Description of Unknown: uncultivated organism sequence
  REGION 1..364: note = Category: MG61 effectors
  REGION 1..364: note = Description: MG61-259 effector
MQEQLLYTLKMSFNASGEEARKILSTAWLFKIACHRVLNKSKQVRDVLIPSKIAWIKMFKSHAYELIPNKRYSYGAVYLVYGVWESCRRLNIDYNVVELSDWLLFRHYEREINGNVIRVYEDSSALVTTYDYSGSKDRILVRAKPNEGQSELLKKIIGSREKYMPKLIIRDYGVRSGTLYIRGEIHIAVSYNFYLKHMKKYNEPKGNLIGGVDVNTDRINLAIVDRDGKLRDVKTFWFSEETARGYPRRRAWSVIGMKVHELLKYAYHHGVSTIALENPEVIGRLRLAWVKNGKRLHRNYNWKVTIFRNRIIEMISMKTPIYGLNVKYVDPKGTSSSREHEEVMKKYGLDRHKASAYLIALKSI

SEQ ID NO: 1424 - protein, 371 aa, unidentified
  REGION 1..371: note = Description of Unknown: uncultivated organism sequence
  REGION 1..371: note = Category: MG61 effectors
  REGION 1..371: note = Description: MG61-260 effector
MSYTTLVLPFNVDDVAARWLLSTSWLFKVATHRMLSLAKQFPVLPATDIGWKNTFRKTVYGVVPNRRYTDGVIVLVRDIYESCRQLGVDFREVELGDWLMFQQSEKEFPVRNITLRQNYEFWITTINYNGESKRMTIKPTIPKNCRPLLDRILEEKQKYTARVVIKDYGIRKDKLWIHGEIQVTIPIGFYYKHTARYRGNNGRLYGGVDVNTDRINLAIVDRYCRLRDVKTFWFEDATRRGYPRRKARILVGMAVHKMLRYAYHHGVRMLFLEDPSVVSRLRLLWIRNGRRLHRNYNWRVSVFRSSVIEMIAMKAPLYAVKVDYVDPKGTTNSEGHNEIMKRYGVDRHTASAYLIAMKGIKRHAMIQKATT

SEQ ID NO: 1425 - protein, 359 aa, unidentified
  REGION 1..359: note = Description of Unknown: uncultivated organism sequence
  REGION 1..359: note = Category: MG61 effectors
  REGION 1..359: note = Description: MG61-261 effector
MSQYQTSSTVDDASTLVEYATITGRVIPASSEDYMKLAKLAWGFRRAVQVATRMIAKGVVSDDVLKELRRMLNKAYADSAFKIAKAIARGCIASGGDPLHVEVRKLFIVSEGESSRLGNRNVRFEGTNLVKVKYPYDGSWIQLRAKFGEKYLPLLRELVELAKQKKASYNARILFRDAKIYLHLSVPIQLYLKYFKRGDALGEFIAGFDLNSDRVNLVIIDKYGRLVDVKTEWFPEVTSPGFPREKARALRLRALAKLLKYCYTHSVGAVVFENLLDVKKRRFTKSKKANRKISRFAKRKLLQHAILMSLKYGFKVLLVDPKNTTSSREHREVMLKYGLDRHTASAYIVALRGLAYQIT

SEQ ID NO: 1426 - protein, 361 aa, unidentified
  REGION 1..361: note = Description of Unknown: uncultivated organism sequence
  REGION 1..361: note = Category: MG61 effectors
  REGION 1..361: note = Description: MG61-262 effector
MSQSQTSSTVASTPTVEYVSITGRLIPISSEDHMKLARLAWSFRRAVQVATRMIARGMDNNEILRELRKMLNKGYADSAFKIAKAIVKGCIATGGDPLHVEVRKLFIVSEGESSRLGNRNVRFMDTSMVKVKYPYDGSWIQLRAKFGEEYLPLLNELIGLANQKKASYTAKIVFRDGEVYLHVSVPIELYLKHFRNGNANGRLIAGFDLNSDRVNMVILDELGVIRDAKTEWFPEATSPGFPRSKATALRLRALAKLLEYAYHHGVGVVVLEDLERIKKRRRYTKSKSANRKITRFPKRKLLEHAIVMAMKYGFEVLLVDPKGTTSSSEHDEAMKKYGVDKHTASAYLVALRALHQIKQTK

SEQ ID NO: 1427 - protein, 363 aa, unidentified
  REGION 1..363: note = Description of Unknown: uncultivated organism sequence
  REGION 1..363: note = Category: MG61 effectors
  REGION 1..363: note = Description: MG61-263 effector
MTYITLVFPFNVCCDVAERLLSTAWLFKIATHRLLNVAKHFPALPATDIGWMNTFRGIAYEIIPNRRYADGVVALVRSIYESCRQLGIDFKSVELSNWLMFQQSELEYPARNITLKPGLEFHITTVDYSKNTYRDVVEPIIPKSYKPLLDKTLEERQEYTGRVAVKSYGIRKYNLWVRGEIQITIPTDFYYKHMTRYREPKGGLIGGIDVNVDRLNLAVIDERGNLRDCKTFWFSEATTRGFSRRSARSIVGARICEMLSYAYHHNVKTLFLENPGVLGKLKLLWVRNGDRKHENYNYRKAVFRGSVIEMIALKAPLYSINVKYVDPKGTTNSEEHDEAMKRYGLDRHTASAYLIALRGLRNK

SEQ ID NO: 1428 - protein, 408 aa, unidentified
  REGION 1..408: note = Description of Unknown: uncultivated organism sequence
  REGION 1..408: note = Category: MG61 effectors
  REGION 1..408: note = Description: MG61-264 effector
MVAYRGSSRFLPARVFIEDLSTPAGVTENGMWSIGCINPSVLGMSEPRYITVRLPFHADGIYAGLLLSTAWLSKIVAHRVLGIVKGNTILVELPEYRFLGKLRRKCYDILPNRRYVDGVLKLVYSTIRSAMALGVDVSKLELKQWLLFQSDGEASAKGNNNIRLLEPHRARILVFSYDRQPETMEIKLTVPKGYRKLVEELVRKAYSREIGYPARVYISDYGIGKFGLHVAGELQVMVPYQLYCEVMKRYDKPLSDNIAGIDVNVERLDVAIVSPSGRLRRVKTFWLDGTVHMGIRAGRAWSLIGETIHEMLEWLYHSGVSTIVLENPEVLGYLRYYWIRNGKRRGRYWNWKVSMFRTSIIERIAWKTPLYSINVVYIVGAKKFRYFHFSSNSLIFLLRAFQGSKSEA

SEQ ID NO: 1429 - protein, 365 aa, unidentified
  REGION 1..365: note = Description of Unknown: uncultivated organism sequence
  REGION 1..365: note = Category: MG61 effectors
  REGION 1..365: note = Description: MG61-265 effector
MTYITLTFPFNACCDVARRLLSTAWLFRVATHRLLSIAREFPVLPGTDIGWKSTFRGMVHEVIPNRRYADGVVVLVRSIYESCRQLRVDFRSVELSSWLMFQQVELEYPARNITLKPGYEFHVTTVDYGGNTHRVVVKPTVPGNYGLLLDKVLRERQRYTGRVVLRSYGIGGGNLWVQGEVQVTIPMDFYYRHMARYRRNDGKLYGGADVNTDRINLAIIDEDGELIDHKTFWFSEASRKGCSGRRAWSIIGMRIHELLDYAYNNGVKTLFLENPEVLGRLKLMWAKSGDRGHGNYNYKVMTFRSSIIERIALKAPLYGIEVSYVNPRGTTNSKEHDETMKKHGLDRHTASAYLTALKGLTHQRK

SEQ ID NO: 1430 - protein, 374 aa, unidentified
  REGION 1..374: note = Description of Unknown: uncultivated organism sequence
  REGION 1..374: note = Category: MG61 effectors
  REGION 1..374: note = Description: MG61-266 effector
MELPEYITIDVPFTVRGDSARLVWWTAWLSKLCAHRLLNDVKKNEMLTDLSQTSFLKYARERCYEILPNRRYVDGIAVLIYSTLKSARKLGISIKDIELKQWLLFQSEAEKGREGNLNIRLMSLDKAEILVLDREKTLKRIVVGLRTTKGYLRLLKVLVQKAMSGEIGYPARVVIKEYNFYQNDMHLYCGLQVMVPYYLYLDVMKRYGKPLGGNVGGVDVNVDRINLAIVDTNGKLRDVKTFWFREATSRGCRRKQVWTEIHQAIHDMLNYAHHHGVSTIALENPRIIGYLKYYWIRNNNDRGSRNYNYRKTIFRNRIIEVISYKAPLYGMKTVFVNPRGTTHSEEHDEVMKKYGLDRHLASAYIIALKGLKQP

SEQ ID NO: 1431 - protein, 365 aa, unidentified
  REGION 1..365: note = Description of Unknown: uncultivated organism sequence
  REGION 1..365: note = Category: MG61 effectors
  REGION 1..365: note = Description: MG61-267 effector
MGGRWLSVLQSQTGNVVDAFAMVNYVTITGKLHPASGEDYMRLVRLAWDFKNAVRITTRMIAKGVGRSNILKELRGVLNKAYADSAYKLAKAMVEGCLFNGCNPLHIEVRRPFIVSEGESSRLGNRNVRLEDTNIVKVKYPYDGSWITLRAEFGERYLPLLRELAELARRKKVSYGARIVFREGNIYLHLSIPIKLYLKYFKRGEAKGGLVAGFDLNSDRVNLVIIDGHGRIVDTRTAWFTEAVSHGFSRNRARALRLGALAKLLKYCYTHNVSVVVFENLPLIKRRRFTRSRVGNRKITLFAKRQLIQYGIVMALKYGFKTLLTNPKGTTNSKEHSEVMKKYGLDRHTASAYLTALRGLTHQQK

SEQ ID NO: 1432 - protein, 422 aa, unidentified
  REGION 1..422: note = Description of Unknown: uncultivated organism sequence
  REGION 1..422: note = Category: MG61 effectors
  REGION 1..422: note = Description: MG61-268 effector
MGSSRRRLDPLTVALRLRVSGIEAHRKLLVKKTYKAFGGIYPYVIVLNRPVTVDIPFTVTGEKARLVWWTAWFSKFCAHRLLNDAKENEILVDLSQTSFLKYARKRCYDVLPNRRYVDGIAVLIHSTLKSARKLGLKVNEIKLRQWLLFQCEADKKKKGNLNVRLTSTREAEALVFNQEREPRKIKINLRTHKKYEKLLKILVERAIKSEVGYPARIVIKEYNTHLNDLRLYCSLQVIVPYDLYLEVMRKYDAPLGNHVAGIDVNVDRLNIAIVDRYGRLRDVKTFWFREITSRGYRRKRAWTKIYQAIHDMLNYAYHHGVSHVVLENPEIVGYLKYYWIKNGNKKTKNYNYRISIFRNRIIETIAYKTPLYGLKTIYVNPKGTTRSKEHEKIMKKYGLDRHTASAYLIALRSLKKIHYATK

SEQ ID NO: 1433 - protein, 361 aa, unidentified
  REGION 1..361: note = Description of Unknown: uncultivated organism sequence
  REGION 1..361: note = Category: MG61 effectors
  REGION 1..361: note = Description: MG61-269 effector
MDYITIKLPFNVDGDVAKELLSTAWLFRITTHRVLTIAKQQVLPATRIGWKNAFRGIAYRVIPNRRYADGAIILVMGVYESCRALGIDFRSVELSDWLMFQQSELEYPAKSITLKQNHEFHVTTVRYNGSTGRVIVKPTVPRNYRELLDAILTGRVEYMGRVVVTDYGVRNNRLWVHGEVHITIPLDVYYEHMARHKKNSGKLIGGVDVNTDRINLAIIDEDGELIDHETFWFSEVTARGFPKHKAWSIIGMRVHEMLNYAYHHGVRILFLENPEVLGRLRLMWVRNGDRKHENYNHKVATFRSTIIEKITMKAPLYGIEVKYVNPRGTTNSKEHDKLMRKYGLDKHTTSAYLTALKGLKH

SEQ ID NO: 1434 - protein, 363 aa, unidentified
  REGION 1..363: note = Description of Unknown: uncultivated organism sequence
  REGION 1..363: note = Category: MG61 effectors
  REGION 1..363: note = Description: MG61-270 effector
MSYVTLCLPFNVDGVEAKRLLSTAWLFKIATHRMLSIAKQCPVLPATDIGWKNAFRKVIYEVIPNRRYVDGVIVLVQGIYESCRQLGVDFMKVELGDWLMFQQVEKEYPVRNITLKHGYEFHITAIGFDGEPSRVVIKPTIPRNYMKLLDGILVERQKHVARAVIRDYGVRKGRLWVRGEIQVTIPIDFYYRHMARYRVNNGRLYGGVDVNVDRINLAIVDEKGRLRDVKTFWFEEASRKNCPRRRARSIIGMAVHNMLRYAYHHGVKTLFLENPEVLGRLKLLWIRNGSRLHENYNYRVSVFRSSVIEMIAMKAPLYAIKTIYVDPRGTTHSKEHDELMRKYGLDRHTASAYLIALKGLKLP

SEQ ID NO: 1435 - protein, 364 aa, unidentified
  REGION 1..364: note = Description of Unknown: uncultivated organism sequence
  REGION 1..364: note = Category: MG61 effectors
  REGION 1..364: note = Description: MG61-271 effector
MLHYQTNEVINAETLISHVTITGKLIPQTPSDFMKLVRLAYDFRKAVLYATRMISKSMKANELLKELRGMLNKGYGDSAYKVAKSIVEGCRFNGGNPQHIKVKKLFIVGEGEAVRFGNRNVRLEATDRVKIKYPYNRTWLFFKIQYGKDYLPLVQEIVKLAKEKKISYSARIVFRDGRMYLHLSIPVDSYLKYFSKGSANGSLTAGFDLNADRINMVIVDKFGRIRDVKTEWFPEVTSHGYPRSKAKIKRLEALAKLLKYAYHHNVSVVVFENLFIIKRRKFTKNSSANRKMSRFAKKELLQYGIIMAMKYGFKVLLINPRGTTHSKEHDEVMRKYGLDRHTASAYIIALRGIESHNLIRKAII

SEQ ID NO: 1436 - protein, 371 aa, unidentified
  REGION 1..371: note = Description of Unknown: uncultivated organism sequence
  REGION 1..371: note = Category: MG61 effectors
  REGION 1..371: note = Description: MG61-272 effector
MSQYQISSTVVDASTLIEYVTITGKLAPSTGEDYMKLARLAWSFRKAVKVATRMIAKGVKANAVLKELRKTLDKAYADSAFKLAKAIVKGCMTNGGNPLHVNIRKLFIASEGESSKLGNRNIRFEDTSFVKVKYPYDGSWIQLKAEFGEEYLPLLRELTELAKQKRASYNAKIMFRDGKTYLHVSVPAELYLKHFKKGEAHGELIAGFDLNSDRISLAIVDKYGRLVDAKTEWFPEVTSHGFSREKAKALRLRALAKLLTYCYTHGVGTAVFEDLFNVNKRRFTWNRTANRKMSRFAKRELLQHAILMSLKYGFRVLLADPRGTTSSREHDEVMRSHGLDKHVASAYLIALRVLNQDKQTKQTIMKTETAL

SEQ ID NO: 1437 - protein, 328 aa, unidentified
  REGION 1..328: note = Description of Unknown: uncultivated organism sequence
  REGION 1..328: note = Category: MG61 effectors
  REGION 1..328: note = Description: MG61-273 effector
MGYVTVSLSFNVGGDAAKGLLSTAWLFKVATHRVLDLVRQSPVLPATDIGWKNTFRSVAYEVVPNRRYADGVVVLVRGIYESCRQLGVDFRSVELGDWLMFQQSEIEYPVRNITLREGYEFYVTTINYLGKSDRVVIKPTIPRNHKPLLDRLIEEGVEHTGRVMIRDYGVRRGMLWIHGEVQVTLPLDFYYRHMVRYGVNNGRFYGGVDVNADRINLAIVDGDGELRDVRTYWFREVTARGYPRRRAWSVIGMRVHEMLDYAYHHGVRTLLLEDPGVLGRLRLLWVRSGKRKHENYNWRVAIFRSSVIEMIAMKAPLYGIEAKYENPK

SEQ ID NO: 1438 - protein, 371 aa, unidentified
  REGION 1..371: note = Description of Unknown: uncultivated organism sequence
  REGION 1..371: note = Category: MG61 effectors
  REGION 1..371: note = Description: MG61-274 effector
MSYITLCLPFNIDSSEAERLFSTAWLFKIASHRMLSLVKQFPILPATDIGWKNSFRKIIYEVIPNRRYTDGVIVLIRGVYESCRQLGVDFKEVELGDWLMFQQVEKEYPVRNITLKQGYEFHVTTIDHNGSSERIVIKPTISKNYKLLLDRILEDKQKHTARIVIKDYGVRKDKLWVHGEVQLTIPLDFYYKYMVRFKRNYGKLYGGVDVNTDRINLAIVDKYGRLRNVKTFWFEDASRKGYPKRKARVLIGMAVHEMLKYAYHHGVKTLFLENPEVLGKLKLLWIRNGRRLYKNCNWKVMTFRSSIVEMVAIKAPLYAIKVDYVSPRGTTNSKEHVKIMRGYGLDRHTVSAYLIALRGIEGHTMIQKAII

SEQ ID NO: 1439 - protein, 362 aa, unidentified
  REGION 1..362: note = Description of Unknown: uncultivated organism sequence
  REGION 1..362: note = Category: MG61 effectors
  REGION 1..362: note = Description: MG61-275 effector
MAGEAREPEITHVTVTGRIMPLNSEDYVKLRYLAYKFRKNLVRAVKMYTRGVNKLVIVKEITRELNLGYADTIYKMAKLIVEGARKNGSNPVKIEVKKLFIASRGFSANKGNRNIRLESTDTLYVNIPREGWVKFKVSFGERYVPLVKELVELAESRKTSYTARIVFRNGRIYLHLSIPIELYLKYFRRGEANGDLIAGFDLNSDRVNMVIVDKSGVVRDVRTEWYPEVTSPGYPGSKATVARLQALSKLIEYAYHHGVGVAVFEDLGRIKRRRFTGSPVANRKMSRFPKRKLLEHAVVMALKYGFKVYLVDPSYTSVVGDYLSRELGLDKHTASAYMLTARYLGLDLKSVEITQITRKTKN

SEQ ID NO: 1440 - protein, 324 aa, unidentified
  REGION 1..324: note = Description of Unknown: uncultivated organism sequence
  REGION 1..324: note = Category: MG61 effectors
  REGION 1..324: note = Description: MG61-276 effector
MVGEVREPGITHVTITGRIILLNTNDYVKLCYLAYKFRKNLAKAIKMYARGVDKLVMVKEITRELNLGYADTIYKIAKLIVEGARRNGSNPLKIEVKKLFVASRGFSANKGNRNIRLESTDMVYVNILKERWIRFKVSFGEKYVPLVKELVELAKSRKNSYSAKVVFRNGRIYLHLSVPIELYLKYFRRGEAKGDLIAGFDLNSNRINMVIVDRCGVIRDVRIEWFPEVTSPGYPRNKAKVARLQALAKLLNYAYHHGVGVTVFEDLDKVKQRAFTSSPTANSYLSRELGLDKHTASAYMLTARYLGLDLKSVEITQITRKTKN

SEQ ID NO: 1441 - protein, 363 aa, unidentified
  REGION 1..363: note = Description of Unknown: uncultivated organism sequence
  REGION 1..363: note = Category: MG61 effectors
  REGION 1..363: note = Description: MG61-277 effector
MTYITLVLPFNVCCDVAKRFLSTAWLFKIATHRLFNVVKYFPVLPVTDIGWKNTFRGIAYEIIPNRRYADGVVTLVRSIYESCRQLRIDFKSVELSNWLMFQQSELEYPARNITLRSGYELHITTVYYNKNTYRDVVKPTIPKSYKPLLDKMSEERQKYTGRVAVKSYGTRKDNLWIRGGVQIIIPTDFYYKHMTRYREPKGSLIGGIDVNADRLNLAIIDEKGNLWDCKTFWLSEAAARGFSRRNARSIISAKIHEMLSYAYHYNVKTLFLESPVVLGKLKPLWVKNGGRRHENYNYKVSVFRSSVIEMIELKTPLYGIEVKYVDPKGTTNSEEHDEAMKRCGLDRHTASAYLIALRGPRNQ

SEQ ID NO: 1442 - protein, 363 aa, unidentified
  REGION 1..363: note = Description of Unknown: uncultivated organism sequence
  REGION 1..363: note = Category: MG61 effectors
  REGION 1..363: note = Description: MG61-278 effector
MSYVTIVAGFNTSGEDAKLLLSTAWLFKVATHRLFNIVKQMPVLPASDIGWKSMFYKAVYDVIPNRRYSYGVITLVRSIYESCRQLGVDFKSIELSDWLMFQQSEKEYPPRSITLKSLSEVEVTVFSYSKESKRIALRVSTSGVYRKLLNAILREKQPYMPRIYVKSWNARGGKLFVRGELQVAIPTDFYYKHMPRASANNGKLYGGVDVNVDRVNLVIVDGDERLRDAYTFWFEESSRKGCKRRRARSIIGMRVHEMLEYAYSHGVKTLFLENPEVLGKLKLLWVRSNDKRHENYNYGVSVFRSSVIEMIALKASLYSIEVKYVDPKGTTSSRKHDDVMRKYRLDRHTASAYLIALKGLKQL

SEQ ID NO: 1443 - protein, 362 aa, unidentified
  REGION 1..362: note = Description of Unknown: uncultivated organism sequence
  REGION 1..362: note = Category: MG61 effectors
  REGION 1..362: note = Description: MG61-279 effector
MDYLTIRLPFNVDGGVAGELLSTAWLFRVAAHRVLSLAKQMQFLPSTKVGWVNAFRESAYGVIPNRRYADGALTLVMSIYESCRELGVDFKGVELSNWLMFQQSELEYPAKSITLKPGYEFHVTTIKYNGSTGRVVIKPTVPRSYGKLLNAVLTERVKYMGRVVVRDYGVRGSQLWVRGEVQVTVPMDVYYEHMAKHRRNAGRLLGGVDVNSDRINLAIVDEDGELIDHKTFWFSEASRKGFSRHSAWSIIGMRIHEMLNYAYHHGVRALFLENPGVLGRLKLVWIKNGDRGRENYNHKVSIFRSTIIEKIALKAPLYSIEVKYVNPRGTTNSKEHDETMRKHGLDRHTASAYLIALRGLRH

SEQ ID NO: 1444 - protein, 363 aa, unidentified
  REGION 1..363: note = Description of Unknown: uncultivated organism sequence
  REGION 1..363: note = Category: MG61 effectors
  REGION 1..363: note = Description: MG61-280 effector
MSYVTVTAGFNASGEEAKLLLSTAWLFKIATHRVLSIAQNTPALPASKIAWKNTFRRIAYEVIPNRRYADSATVLVMGIYESCRQLGVNFKEVELGDWLMFQQSEKEYPPRNITLKYIDEAWVTVLGYEGRRERIKLKVSISGAFRRLLEAILREKQPYNPRIVLKSWNTRGGKLYVKGELHLAIPLDFYYKHMKRFEGNHGKLYGGVDVNSDRVNLAVVDDNGRLRDTYTFWFREATARGYPKRRARSVIGMRLHEMLRYAYHHGVKMLFLENPDVLGRLKLLWVRNGRRLGRNYSWRVMTFRSSIIEMIALKAPLYSIKIGYVDPRGTTHSEEHDEVMRRHGLDKHTASAYLIALKGLKQP

SEQ ID NO: 1445 - protein, 333 aa, unidentified
  REGION 1..333: note = Description of Unknown: uncultivated organism sequence
  REGION 1..333: note = Category: MG61 effectors
  REGION 1..333: note = Description: MG61-281 effector
MLHLAKNCDVLPASDIGWKSMFRKAIYSIIPNRRYADGVIVLIRGIYESCRQLEVNFKDVELGNWIMFQQSEMEYPVRTITLKQDYSFRITTFDYNGSSERISISPTIPKSYSLLLSKILEDKQKHTARIVIKDYGVRKNKVWVHGEIQLTIPLSFYYRYMVRFKKNKGKLFGGVDVNCDRINLAIVDRFGRLRDVKTFWFRETTARGFPRRKARVIIGMRVHEMLKYAYFHGVSKIFLENPEILGKLKLLWIRNGKRFSRNYNWKVAVFRSNIIEMISMKATLYSIKTRYVNPKGTTSSNEHKEIARKLGLDRHTASAYLIALRGLKQNDTI

SEQ ID NO: 1446 - protein, 371 aa, unidentified
  REGION 1..371: note = Description of Unknown: uncultivated organism sequence
  REGION 1..371: note = Category: MG61 effectors
  REGION 1..371: note = Description: MG61-282 effector
MSYITLCLPFNVDGFKARKLLSTTWLFKTASHRMLSLAKQFPILPATDIGWKNTFRKIIYEIIPNRRYTDGVIVLVRGIYESCRQLGVDFEDVELGDWLMFQQVEKEYPVRNITLKQGYEFHITTIDYNDGVERIAVEPTIPKNYRLLLDKILEEKQKHSARVIIKDYGVRKNKLWVHGEIHVTIPLDFYHKYMTRYRRNYGKLYGGVDVNTDRINLAIVDSEGNLRDTYTFWFREVTARGYPRRKARSVVGMRVHEMLKYAYYHGTKILFLENPEILGKLRLLWVRNGKRLHKNYNWKVATFRSSIIEMITMKAPLYSIKVGYVDPRGTTSSKEHGEIMRKYRLDRHIASAYLIALRGIERRATIQKATA

SEQ ID NO: 1447 - protein, 373 aa, unidentified
  REGION 1..373: note = Description of Unknown: uncultivated organism sequence
  REGION 1..373: note = Category: MG61 effectors
  REGION 1..373: note = Description: MG61-283 effector
MSEPRYITVRLPFHADGIYAGLLLSTAWLSKIVAHRVLGIVKGNTILVELPEYRFLGKLRRKCYDILPNRRYVDGVLKLVYSTIRSAMALGVDVSKLELKQWLLFQSDGEASAKGNNNIRLLEPHRARILVFSYDRQPETMEIKLTVPKGYRKLVEELVRKAYSREIGYPARVYISDYGIGKFGLHVAGELQVMVPYQLYCEVMKRYDKPLSDNIAGIDVNVERLDVAIVSPSGRLRRVKTFWLDGTVHMGIRAGRAWSLIGETIHEMLEWLYHSGVSTIVLENPEVLGYLRYYWIRNGKRRGRYWNWKVSMFRTSIIERIAWKTPLYSINVVYIDPKGTTSSREHSEIMRKYGLDRHTASAYLIALKGLKQP

SEQ ID NO: 1448 - protein, 363 aa, unidentified
  REGION 1..363: note = Description of Unknown: uncultivated organism sequence
  REGION 1..363: note = Category: MG61 effectors
  REGION 1..363: note = Description: MG61-284 effector
MSYITVTAGFNASGGEAKLLLSTAWLFKLATHRVLSYAKSMPILPASKIGWKSTFRKVAYEIIPNRRYADSAVTLVMGIYESCRQLGINFGDVGLGDWLMFQQSEKEYPPRNITLKDVDEAWITVLGYDGESRRIKLRVHASKAFRKLLDALLRERQPYNPRIVLKTWNVRDGKLYVRGELHVAIPLDFYYKHMARFTRNNGRLYAGVDVNVDRINLAVVDVEGNLRDTYTFWFREVTTRGYPRHRARSVIGMRIHEMLKYAYHHGVKTLFLENPEVLGKLKLLWIRNGDRKSKNYNWKKTIFRSSVIEMIAMKAPLYSINVKYVDPRGTTNSREHDEAMKRCRLDRHTASAYLTALKGLNLT

SEQ ID NO: 1449 - protein, 369 aa, unidentified
  REGION 1..369: note = Description of Unknown: uncultivated organism sequence
  REGION 1..369: note = Category: MG61 effectors
  REGION 1..369: note = Description: MG61-285 effector
MWAIALNESPLYTLKLSFNASGEAARRILSTAWLFKLACHRVLNKSKGLIDHLVPSKVAWLKVFYDDARAYIPNKRYAYGAVYLVYGVWQSAGELKVDYKNVELSDWLLFQHYEREVDGNVIRVSEDGSTLITTYSYDGSKDRVFIRARPNRGHAGLLKLVVESKEKYMPKVVVKGYNVRDGTLYLRGELHVAVSYSFYLKHSTRYREPRGGLVGGVDVNADRINLAIVDRKGNLRDYKTFLFAETTARGYPRRGAWSVIGMKIHEMLEYAYHHGVSAIALEGPEVLGYLKSAWMRGDDRSHENYNYKKAVFRSSLIERIAMKAPLYGLSVEFVNPRGTTSSVERDEAMRRYGLDKHTASAYLIALRCI

SEQ ID NO: 1450 - protein, 374 aa, unidentified
  REGION 1..374: note = Description of Unknown: uncultivated organism sequence
  REGION 1..374: note = Category: MG61 effectors
  REGION 1..374: note = Description: MG61-286 effector
MAYKLYWGFPITSYITIVLPFNAGGDVAERLLSTAWLFKVASHRMLRLAKQSPVLPATDIGWKNMFRKAVYEVIPNRRYADGAVVLVRGIYESCRQLGVGFKEAELSDWLMFQQAETEYPVRNITLKEDYEFHITTIGYEGATDRVVVEPTIPKNYRTLLDEILEERQRHTARVVIKDYGARENMLWVHGEVQLTIPIDFYCKHMARYRRNYGKLYAGVDVNVDRINLAIIDADGNLRDTYTFWFRETTARGFPRRRARSVIGMAVHEMLKYAYHHGVKTLFLENPDVLGKLKLMWVKSSERRHENYNYKVAIFRGSVIEMVAMKAPLYAIDVKYVSPRRTTNSKEHNEIMRKHRLDRHTASAYLTALKGLKQT

SEQ ID NO: 1451 - protein, 382 aa, unidentified
  REGION 1..382: note = Description of Unknown: uncultivated organism sequence
  REGION 1..382: note = Category: MG61 effectors
  REGION 1..382: note = Description: MG61-287 effector
MTSLPEYLTISLPFTVKGENAKLIWLTAWFSKLCAHRLLDDVKNNEFLIDLSQTSFLKYARKRCYDILPNRRYIDGIATLIHSTLKSVRKLGVTIGSIELKRWLLFQSEAEKEKKGNLNIRLVSVNRAEILVFNHKKESRRIEISLRTLKGYRRVLEALLGRALKSEVGYPARVVIKEFNFYPSNLHLYCSLQIMIPYNLYLETMRKYYKALGDHVAGVDVNVDRLNLAIVDKYGRLRDVKTFWFREITSRGYRRRPAWTKIHHAIHNMLNYAYHHGISCIALERPEIIGYLRYYWVRNGDRKSKNYNYRKSIFRNKIIEAITCKAPLYSLKTIYVNPKGTTRSKKHDEAMKKYGLDRHTASAYLIALRGIERHTMIQKATI

SEQ ID NO: 1452 - protein, 364 aa, unidentified
  REGION 1..364: note = Description of Unknown: uncultivated organism sequence
  REGION 1..364: note = Category: MG61 effectors
  REGION 1..364: note = Description: MG61-288 effector
MSQYQTNNVVDATNFITYVTITGELVPISPEDYMKLVRLAHDFRKAVLYATRMIAKGKNTNAILKELRSMLNKAYGDSAYKVAKALVEGCRFNGGNPRHIEVRKLFIVSEGESSRLGNRNIRLESTSTTRIKYPYDSSWLTFKARFGEKYLSLIEELVKLTRHKEISYGARIVFRSGKVYLHLSVPIGLYLKYFSKGKTKGNLIAGFDLNSDRINMVVIDRYGRIRDIKTEWFPEVASHGYPRSKAKTKRLEALAKLLRYAYYHNVGAVVFENLLVIRKRRYTRNRKANRKITRFAKRELLQHGIVMAMKHGFKVLLVNPKGTTNSEEHSKIMRRDGLDRHSASAYIIALRGIERHNPIQKTII

SEQ ID NO: 1453 - protein, 378 aa, unidentified
  REGION 1..378: note = Description of Unknown: uncultivated organism sequence
  REGION 1..378: note = Category: MG61 effectors
  REGION 1..378: note = Description: MG61-289 effector
MKDTGLPDYIAINIPFTVNGEEAKLVWYTAWFSKLCAHRLLNDVKGNDALLGFSQASFLKYARERCYELLPNRRYIDGVATLVHSTLRSARKLGVNIRDIELGQWLLFQSEAESEKRGNLNIRLLSVNRAEVLVLNYDGASKRIDIGLKTPKGYVELLKVLIERAGKYEVGYPARVMVRGYSFRPGNMHLYCGLQVMVPYSLYLNVMRRYSEPRGNLIGGVDVNVDRLNLAIVDRYGRLRDVKTFWFREVTARGVKGVVAWTKIHQAIHELLNYAYHHGVSAISLENPRTIGYLRYYWVRNGDRGSRNYNYRVSIFRSRTIEVISYKAPLYAMRTIYVNPKGTTNSQQHDEVMRRLGLDRHAASAYLIALRGINKQRK

SEQ ID NO: 1454 - protein, 300 aa, unidentified
  REGION 1..300: note = Description of Unknown: uncultivated organism sequence
  REGION 1..300: note = Category: MG61 effectors
  REGION 1..300: note = Description: MG61-290 effector
MLNKAYGDSAFKLAKTIVESARSNRGDPLKIEIRRLFIVSEGEAGRQGNRNVRLDDSSKVRIRYPYERSWLSFRARFGENYVPLVKELSELAKSRKCSYGVMIVFRNGRIYLHLSVPVELYLKYFRKGEAKGDLIAGFDLNSDRINTVIVDKYGRVVDVRTAWFPEVTSPGYPRNKARVVRLQALVELFNYAYHHGANVAVFEDLDKIKRRRFTSSPTANRKITRFAKKQLLTHAVVMSLRYGLKPALVDPRGTMSSPVHSAVMKKHGLDRHTTSAYLIALRYLQDEKTVNSYKAYKQSK

SEQ ID NO: 1455 - protein, 363 aa, unidentified
  REGION 1..363: note = Description of Unknown: uncultivated organism sequence
  REGION 1..363: note = Category: MG61 effectors
  REGION 1..363: note = Description: MG61-291 effector
MSYVTVTAGFNACGEEAKLLLSTAWLFKIATYRVLAHAKSMPVLPATKVAWKNAFREVALSAMPNRRYADSSIIVVMGIYESCRQLGMDFREVELGDWLMFQQSEKEYPPRNITLRDVDEVWVTVIGYGGESGRIKLRVSTSKTFRELLGALLRERQPYNPRVVLKAWNVRGGELYVRGELQVSVHMNLYYAHVAKHRRNEGRLYAGVDVNADRINLAIVDERGDLRDAYTFWFREVTARGYPRRRARSVIGMKVHDMLRYAYHHGVKMIFLEDPGILGRLRLMWIRNGRRLHKDYNWKVSAFRSSVIEMIATKAPLYTVKAVYVDPRGTTHSKRHDEVARKYGLDRHTASAYMIALKGLNLP

SEQ ID NO: 1456 - protein, 364 aa, unidentified
  REGION 1..364: note = Description of Unknown: uncultivated organism sequence
  REGION 1..364: note = Category: MG61 effectors
  REGION 1..364: note = Description: MG61-292 effector
MVENPLYTIKLSFNVSGDRAKKILSTAWLFKLACYRVLSRSKELLNALIPSKIAWVKMFYSDARDLIPNKRYAYGTIYLVYGIWESARELGINYRSVELSDWLMFQHYDREVDGNVIRILEDGSALVTTYSYDGSKDRVLIKAKPNKGYEELLKLVVESKEKYMPRVVVRGYNVRNDKLYVSGEIHVTIDYNFYLKHTTRYGEPKGSLIGGVDVNSDRINLAIVDEKGNLRDCKTFWFPETVTRGYPKRRAWSIIGIKIHEMLRYAYNHDVSTIALENPETLGYLKLAWVRNGDRKHENYNYKKSVFRNTIIERIVMKAPLYGLNTKFVDPKWTTSSREHDEIMKRFGLDRHTASAYIIALRSI

SEQ ID NO: 1457 - protein, 359 aa, unidentified
  REGION 1..359: note = Description of Unknown: uncultivated organism sequence
  REGION 1..359: note = Category: MG61 effectors
  REGION 1..359: note = Description: MG61-293 effector
MNYVTLTLPFNVDGDVAKRLVSTAWLFKTASHRMLSLAKQRPILPATDIGWKNTFRKLVYEIIPNRRYADGVIVLVRGVYESCRQLSIDFRRVELGDWLMFQQAEKEYPVRNITVKLGYEFHITTIDYNGIAERIVLKPTIPKNYKCLLDKILEEKQKHTARVVIKDYGVRKDRLWVHGEIQLTIPLDFYYKYMVRYTVNNGKLYGGVDVNTDRINLAIVDGNGRLRDTYTFWFSETTARGYPRHRARSIIGMKIHDMLRYAYHHGVKTLFLENPGVLGKLRLLWIKNGKRLHSNYNWKVSVFKSSAIEMIAMKAPLYAIITRNVDPGGETNSREHDNDTTNKILHTQLYKFIEFIIYA

SEQ ID NO: 1458 - protein, 1262 aa, unidentified
  REGION 1..1262: note = Description of Unknown: uncultivated organism sequence
  REGION 1..1262: note = Category: MG61 effectors
  REGION 1..1262: note = Description: MG61-294 effector
DRYMDFTKFQKLNSIIKTCSFEMIPIGKTRETMEKHNVIEEDAERKSNAELTKEVSDSFIREFIADYKEDMDWKDLYDAYGEDRARFTDIMNQKAEKLAKRFSDSFNEYINTFLKANGINDKKSKWSDSGYVDVVLPLYVSIHPDFSNDKYERAVASLLHCSNSLFKKYTTSYARIIAGTKKGSFADRSMENFQTACANSVMFDLISRNLSSVGSHDAFKEVFADAPLNMNEYLSQKGISRYNEFVGDSFDESGQVIRYGVNHYINEWNQTHPDERMPKIHKLKKQILSIVEPSFRIRTINDETELFGTFDNIRTAEQRYAGMLESILENMNTADIYDKSGILVTSAERDSLANAITGEWSYFRRQIKEEEENRIREEYLQKKNRVKTKLTQKDNKQIEDALNKSIYSVADLNKMLGSDFGTIEEKLLDEYIRNKSKKESAYAQLVKTDFYDKKTIPAGDDVQRIQQYLDKVLSLTHIVRGLCADSQDPRTDFVFSDDVSSLEDDRVQIISCYNLIRNFVTKKREKTAKEKQIQLCFGRPAHFEQVWNNKQEGKFGNVDAALLEYAGKYYYMVPAAKNEAKLNFPVTDEPQMGECYNYLATKKAIGFAKAFAKFYIKSPEAMEGFEKTEEPFEISVGNDTMIISRKVYEDYEVKTFRESEEAKNKLIDCAKEFLSKNLSYCIYDWSVLKEANDYVNYGEFCNEVDSIAFRVINRYVSKKLVDDAVERGNLYMFEISSLDMYKDSSRMKNIMALRFNQIINGMFTGDKSIIINNAPQIRYRPVVIEKKDVHPVGSRLVNKNTTDGRTIPGDVYLELCAYYNGKKDSLSPEASLYNEKVSVKDSDRAHIKDKHYTEEKFLITFSYTANKNVASATSGYQLNEMVRKEIRENGCNIMAVIRGIDNLLYYAVVDENGNRIEAGDLNVVGDTDFYEKLTILGKQRYTDQKNWKHENKVADLKDTYLGQVCRKIASIAVKNNAVIVIDKINESTKRKNAAFDNNMYRKFENALVNSLTDYYDIGIRGDEPGSVKNPLQLTVKEDNGFQNGIIFYQFDTFTKNICMRTGFVNLLNTFEIKTVASKVAFLKKLSGIYYDNDINEFVFEFTWRNIGCILKDEELPLYDGMDKIWKVRTHFTRYMRNAEKNKYVEIDGTEVLKELIRKNHPDMIGGKIDVDRLTSEEVKKVFEIFTLYTNGYIPRMDDAESGYMSPACDWNNFGTIRYDEMTALQLAKKSSLMIGKVKSGKDWKDMNVSRVEWLNHVLKADW

SEQ ID NO: 1459 - protein, 376 aa, unidentified
  REGION 1..376: note = Description of Unknown: uncultivated organism sequence
  REGION 1..376: note = Category: MG61 effectors
  REGION 1..376: note = Description: MG61-295 effector
RYVSKKLVDDAVERGNLYMFEISSLDMYKDSSRMKNIMALRFNQIMNGMFTGDKFIIINNAPQIRYRPVVIEKKDVHPVGSRLVNKNTTDGRTIPGDVYLELCAYYNGKKDSFSPEASLYNEKVSVKDSDRAHIKDKHYTEEKFLITFSYTANKNVASATSGYQLNEMVRKEIRENGCNIMAVIRGIDNLLYYAVVDENGNRIEAGDLNVVGDTDFYEKLTILGKQRYTDQKNWKHENKVADLKDTYLGQVCRKIASIAVKNNAVIVIDKINERTKRKNAAFDNNMYRKFENALVNSLTDYYDIGIRGDEPGSVKNPLQLTVKEDNGFQNGIIFYQFDTFTKNICMRTGFVNLLNTFEIKTVASKVAFLKKLSGIY

SEQ ID NO: 1460 - protein, 258 aa, unidentified
  REGION 1..258: note = Description of Unknown: uncultivated organism sequence
  REGION 1..258: note = Category: MG61 effectors
  REGION 1..258: note = Description: MG61-296 effector
MYRKFENALVNSLTDYYDIGIRGDEPGSVKNPLQLTVKEDNGFQNGIIFYQFDTFTKNICMRTGFVNLLNTFEIKTVASKVAFLKKLSGIYYDNDINEFVFEFTWRNIGCILKDEELPLYDGMDKIWKVRTHFTRYMRNAEKNKYVEIDGTEVLKELIRKNHPDMIGGKIDVDRLTSEEVKKVFEIFTLYTNGYIPRMDDAESGYMSPACDWNNFGTIRYDEMTALQLAKKSSLMIGKVKSGKDWKDMNVSRVEWLNH

SEQ ID NO: 1461 - protein, 122 aa, unidentified
  REGION 1..122: note = Description of Unknown: uncultivated organism sequence
  REGION 1..122: note = Category: MG61 effectors
  REGION 1..122: note = Description: MG61-297 effector
NKYVEIDGTEVLKELIRKNHPDMIGGKIDVDRLTSEEVKKVFEIFTLYTNGYIPRMDDAESGYMSPACDWNNFGTIRYDEMTALQLAKKSSLMIGKVKSGKDWKDMNVSRVEWLNHVLKADW

SEQ ID NO: 1462 - protein, 1264 aa, unidentified
  REGION 1..1264: note = Description of Unknown: uncultivated organism sequence
  REGION 1..1264: note = Category: MG61 effectors
  REGION 1..1264: note = Description: MG61-298 effector
MEDIYMDFTKFQKLNSIIKTCSFEMIPIGKTRETMEKHNVIEEDAERKSNAELTKEASDSFIREFIADYKEDMDWKDLYDAYGEDRARFTDIMNQKAEKLAKRFSDSFNEYINTFLKANGINDKKSKWSDSGYVDVVLPLYVSIHPDFSNDKYERAVASLLHCSNSLFKKYTTSYARIIAGTKKGSFADRSMENFQTACANSVMFDLISRNLSSVGSHDAFKEVFADAPLNMNEYLSQKGISRYNEFVGDSFDESGQVIRYGVNHYINEWNQTHPDERMPKMHKLKKQILSIVEPSFRIRTINDETELFGTFDNIRTAEQRYAGMLESILENMNTADIYDKSGILVTSAERDSLANAITGEWSYFRRQIKEEEENRIREEYLQKKNRVKTKLTQKDNKQIEDALNKSIYSVADLNKMLGPDFGTIEEKLLDEYIRNKSKKESAYAQLVKTDFYDKKTIPAGDDVQRIQQYLDKVLSLTHIVRGLCADSQDPRTDFVFSDDVSSLEDDRVQIISCYNLIRNFVTKKREKTAKEKQIQLCFGRPAHFEQVWNNKQEGKFGNVDAALLEYAGKYYYMVPAAKNEAKLNFPVTDEPQMGECYNYLATKKAIGFAKAFAKFYIKSPEAMEGFEKTEEPFEISVGNDTMIISRKVYEDYEAKTFRESEEAKNKLIDCAKEFLSKNLSYCIYDWSVLKEANDYVNYGEFCNEVDSIAFRVINRYVSKKLVDDAVERGNLYMFEISSLDMYKDSSRMKNIMALRFNQIMNGMFTGDKSIIINNAPQIRYRPVVIEKKDVHPVGSRLVNKNTTDGRTIPGDVYLELCAYYNGKKDSLSPEASLYNEKVSVKDSDRAHIKDKHYTEEKFLITFSYTANKNVASATSGYQLNEMVRKEIRENGCNIMAVIRGIDNLLYYAVVDENGNRIEAGDLNVVGDTDFYEKLTILGKQRYTDQKNWKHENKVADLKDTYLGQVCRKIASIAVKNNAVIVIDKINESTKRKNAAFDNNMYRKFENALVNSLTDYYDIGIRGDEPGSVKNPLQLTVKEDNGFQNGIIFYQFDTFTKNICMRTGFVNLLNTFEIKTVASKVAFLKKLSGIYYDNDINEFVFEFTWRNIGCILKDEELSLYDGMDKIWKVRTHFTRYMRNAEKNKYVEIDGTEVLKELIRKNHPDMIGGKIDVDRLTSEEVKKVFEIFTLYTNGYIPRMDDAESGYMSPACDWNNFGTIRYDEMTALQLAKKSSLMIGKVKSGKDWKDMNVSRVEWLNHVLKADW

SEQ ID NO: 1463 - protein, 343 aa, unidentified
  REGION 1..343: note = Description of Unknown: uncultivated organism sequence
  REGION 1..343: note = Category: MG61 effectors
  REGION 1..343: note = Description: MG61-299 effector
FNEYINTFLKANGINDKKSKWSDSGYVDVVLPLYVSIHPDFSNDKYERAVASLLHCSNSLFKKYTTSYARIIAGTKKGSFADRSMENFQTACANSVMFDLISRNLSSVGSHDAFKEVFADAPLNMNEYLSQKGISRYNELVGDSFDESGQVIRYGVNHYINEWNQTHPDERMPKMHKLKKQILSIVEPSFRIRTINDETELFGTFDNIRTAEQRYAGMLESILENMNTADIYDKSGILVTSAERDSLANAITGEWSYFRRQIKEEEENRIREEYLQKKNRVKTKLTQKDNKQIEDALNKSIYSVADLNKMLGSDFGTIEEKLLDEYIRNKSKKESAYAQLVKT

SEQ ID NO: 1464 - protein, 1258 aa, unidentified
  REGION 1..1258: note = Description of Unknown: uncultivated organism sequence
  REGION 1..1258: note = Category: MG61 effectors
  REGION 1..1258: note = Description: MG61-300 effector
MEFTKYTRSNKIVRSVIFEMSPIGNTRAAIKEHGVIEEDAVRKSNAVLIKEVSDNFIREFLNDDKLEKYDWVEWEDLCLLIDDKPAFDAKAEKMKESIATSISKSFDSYINRFMAANGKANGKYSWKSAGYIDEVIPMYILCHPDYQDEKYTLAAESLKHASSAMFKKYFVSYERILNGTKTGSIAYRVMENVLIFCTNSKMYKKFAAKISGADLFAKIADITVLEDLISQNGIDFYNEMIGDLYDKDGQLIRKGFNSRINEYNSTHPDDKIPYLKKMKKQILSYVEPFFTIDKIESKEDLDNILTSVRATEESLTENLKTLFSNLLSNDKFPLDRILLTSAARSTIANSLAGRWDYFENIIREKETDKLKADYFEKKNRILTKLTKKDQKKINDAVTSNISSIADLNQMLHNVSEETVEDFLIKSLNKQISLKESSYSVLNNSGFMKSDSKPAWDDNQKIQDYLDHVIAISRMLKYFYTDLMNEKVDPIFVEELQMFDDSKDKIVKSYNMIRNYCTTKTELTAKEKRIQLCFGRPVHFEQTWNNKQEGKFGNLDAALLEFDGLYYYIVPAAKNKRKLNFPVTDIPQEGVNYHYLSTKKSIKLSMALPKMTFKSPAAVKKYAETEEPFTINIGNSTMTVSKKMYDDYNLKTFSSSPDARIALIDYAKEFISKEFSFKCYDYSSLKPSEEYRSYGEFCNEVDSITFSTTSKYVNKDLVDNAVMDGDLYMFLITSADMYKDREKNKDITAIRFNTIMQSMFTGDTSIIINNSPTIYYRPQIIEAVDKHPVGSILVNKMTTDGRTIPGEIYLELCDFYNGKKDYLSAEAKAYNENVSVKESSFSHIKDAHYTREMFTISLSYTLNKGVSNEKLGYALNDEIRRDIVEEGCNIMSIIRGINNLLYYCIVDQNGNQLKAGSLNIVGGVDYYEKLTLLSTQRYLDSKNWKYEKKSAELKDTYLGQVCREIAKIAIANNAIIVIDKLIDSIKNKAAAFDNQVYKKFENRLISTLGNYYDVTLPDNEPGGSTNPLQLTVPDNTSIQNGIIFFIIDSGTKNICQETGYVNLLNTYNVNTVTAKAKFLSKISKIYFDADLNEFVFEFSWKDIGSINLKEDEEIPLYLGMNKVWKVRTHITRYKKNKEKRSYEEIDGTEMMKAVMKNYPDMIGKDIDITKLSSKDIQAVYEVFTYYANGFIPRIGNEDSEFISPVSTWTSIGNVPYDEMSAYQLAKKSLLGINKIQFTEDSGRYQYTPVSKVEWYNSLL

SEQ ID NO: 1465 - protein, 327 aa, unidentified
  REGION 1..327: note = Description of Unknown: uncultivated organism sequence
  REGION 1..327: note = Category: MG61 effectors
  REGION 1..327: note = Description: MG61-301 effector
MDFTKFQKLNSIIKTCSFEMIPIGKTRETMEKHNVIEEDAERKSNAELTKEVSDSFIREFIADYKEDMDWKDLYDAYGEDRARFTDIMNQKAEKLAKRFSDSFNEYINTFLKANGIKDKKSKWSDSGYVDVVLPLYVSIHPDFSNDKYERAVASLLHCSNSLFKKYTTSYARIIAGTKKGSFADRSMENFQTACANSVMFDLISINLSNVGSHDAFKEVFADAPLNMNEYLSQKGISRYNEFVGDSFDESGQVIRYGVNHYINEWNQTHPDERMPKMHKLKKQILSIVEPSFRIRTINDETELFGTFDNIRTAEQRYAGMLESILEK

SEQ ID NO: 1466 - protein, 278 aa, unidentified
  REGION 1..278: note = Description of Unknown: uncultivated organism sequence
  REGION 1..278: note = Category: MG61 effectors
  REGION 1..278: note = Description: MG61-302 effector
MDFTKFQKLNSIIKTCSFEMIPIGKTRETMEKHNVIEEDAERKSNAELTKEASDSFIREFIADYKEDMDWKDLYDAYGEDRARFTDIMNQKAEKLAKRFSDSFNEYINTFLKANGINDKKSKWSDSGYVDVVLPLYVSIHPDFSNDKYERAVASLLHCSNSLFKKYTTSYARIIAGTKKGSFADRSMENFQTACANSVMFDLISRNLSSVGSHDAFKEVFADAPLNMNEYLSQKGISRYNEFVGDSFDESGQVIRYGVNHYINEWNQTHPDERMPKMH

SEQ ID NO: 1467 - protein, 367 aa, unidentified
  REGION 1..367: note = Description of Unknown: uncultivated organism sequence
  REGION 1..367: note = Category: MG61 effectors
  REGION 1..367: note = Description: MG61-303 effector
MIRGIDNLLYYAVVDENGNRIEAGDLNVVGDTDFYEKLTILGKQRYTDQKNWKHENKVADLKDTYLGQVCRKIASIAVKNNAVIVIDKINESTKRKNAAFDNNMYRKFENALVNSLTDYYDIGIRGDEPGSVKTPLQLTVKEDNGFQNGIIFYQFDTFTKNICMRTGFVNLLNTFEIKTVASKVAFLKKLSGIYYDNDINEFVFEFTWRNIGWILKEEELPLYDGMDKIWKVRTHFTRYMRNAEKNKYVEIDGTEVLKELIRKNHPDMIGGKIDVDRLTSEEVKKVFEIFTLYTNGYIPRMDDAESGYMSPACDWNNFGTIRYDEMTALQLAKKSSLMIGKVKSGKDWKDMNVSRVEWLNHVLKADW

SEQ ID NO: 1468 - protein, 410 aa, unidentified
  REGION 1..410: note = Description of Unknown: uncultivated organism sequence
  REGION 1..410: note = Category: MG61 effectors
  REGION 1..410: note = Description: MG61-304 effector
FVHIISRKYKEATYNMNYAKFTKQGKLIKGIKLELVPQGNTRDAISEYKIVEADQQLADMVKEVVMAGNEFYKDFIKQIVEHMDGTDWQAYGEAVENKTADQKAYDEAVKSISASIKNAILDTAELYGGKKTLFAKDFITIVLRKYVETAENFPYNRERVLTCIDVLSDKNVLFKTPYVKWEHIIFGESKGSIAERMLSNFDIFYDNKNKYAALKEATAITDFDDFFTDYASYTRYVGQDGIELYNSAIRGIYSESGAKISEGINEYINKLKMKHPELHVNMLKKLQKQILSNSEPLFKVATIQNAEELKGIMNKVKVTEESVLSSAKELLVHMETSDLHDLYISGQRLYFVCQKIAKDGGLLEELIFNDECSRVEKLTEKKKEEIRGAIVKHDYSFAYVDSLLSEYAEK

SEQ ID NO: 1469 - protein, 1259 aa, unidentified
  REGION 1..1259: note = Description of Unknown: uncultivated organism sequence
  REGION 1..1259: note = Category: MG61 effectors
  REGION 1..1259: note = Description: MG61-305 effector
MDFTKFQKLNSIIKTCSFEMIPIGKTRETMEKHNVIEEDAERKSNAELTKEVSDSFIREFIADYKEDMDWKDLYDAYGEDRARFTDIMNQKAEKLAKRFSDSFNEYINTFLKANGINDKKSKWSDSGYVDVVLPLYVSIHPDFSNDKYERAVASLLHCSNSLFKKYTTSYARIIAGTKKGSFADRSMENFQTVCANSVMFDLISRNLSSVGSHDAFKEVFADAPLNMNEYLSQKGISRYNEFVGDSFDESGQVIRYGVNHYINEWNQTHPDERMPKMHKLKKQILSIVEPSFRIRTINDETELFGTFDNIRTAEQRYAGMLESILENMNTADIYDKSGILVTSAERDSLANAITGEWSYFRRQIKEEEENRIREEYLQKKNRVKTKLTQKDNKQIEDALNKSIYSVADLNKMLGSDFGTIEEKLLDEYIRNKSKKESAYAQLVKTDFYDKKTIPAGDDVQRIQQYLDKVLSLTHIVRGLCADSQDPRTDFVFSDDVSSLEDDRVQIISCYNLIRNFVTKKREKTAKEKQIQLCFGRPAHFEQVWNNKQEGKFGNVDAALLEYAGKYYYMVPAAKNEAKLNFPVTDEPQMGECYNYLATKKAIGFAKAFAKFYIKSPEAMEGFEKTEEPFEISVGNDTMIISRKVYEDYEAKTFRESEEAKNKLIDCAKEFLSKNLSYCIYDWSVLKEANDYVNYGEFCNEVDSIAFRVINRYVSKKLVDDAVERGNLYMFEISSLDMYKDSSRMKNIMALRFNQIMNGMFTGDKSIIINNAPQIRYRPVVIEKKDVHPVGSRLVNKNTTDGRTIPGDVYLELCAYYNGKKDSLSPEASLYNEKVSVKDSDRAHIKDKHYTEEKFLITFSYTANKNVASATSGYQLNEMVRKEIRENGCNIMAVIRGIDNLLYYAVVDENGNRIEAGDLNVVGDTDFYEKLTILGKQRYTDQKNWKHENKVADLKDTYLGQVCRKIASIAVKNNAVIVIDKINESTKRKNAAFDNNMYRKFENALVNSLTDYYDIGIRGDEPGSVKNPLQLTVKEDNGFQNGIIFYQFDTFTKNICMRTGFVNLLNTFEIKTVASKVAFLKKLSDIYYDNDINEFVFEFTWRNIGCILKDEELPLYDGMDKIWKVRTHFTRYMRNAEKNKYVEIDGTEVLKELIRKNHPDMIGGKIDVDRLTSEEVKKVFEIFTLYTNGYIPRMDDAESGYMSPACDWNNFGTIRYDEMTALQLAKKSSLMIGKVKSGKDWKDMNVSRVEWLNHVLKADW

SEQ ID NO: 1470 - protein, 1334 aa, unidentified
  REGION 1..1334: note = Description of Unknown: uncultivated organism sequence
  REGION 1..1334: note = Category: MG62 effectors
  REGION 1..1334: note = Description: MG62-1 effector
MKTFENFTNLYELNKTLRFELKPIWGTKELIEEKHILKLDKEKRENYEKVRPYFNKIHQEFINFALKNPNFDFLKHKEKYLNWLKDKKNKDLLKEKEKIDKIFLEKIWELFENSVKDFLKENGFESIIKQEDQDLKFFRRKEIFEVLQEKYGSELETQIIWKDWETKSIFSGWDKWLWYFDKFFNTRDNFYKTDGTSTAIATRIIKDNLKIFLENTIIFEKVKNKKIDFSEVEKNFSINIDSFFEINNFNNYFLQDGIDFYNKIIWWETLENWKKLKGLNEIINKYRQDTGDKIPYFKKLQKQILSEKDWVFIEKIEDDGGFYDILKKFYENAVEKEWFLRNIFENFYGIWDENLEKIYFNKVAFNTISHKFWNAQEFEKILYEEMKKSKVDWIKFEKKENKYKFPDFIQIIFIKKALENYDSENLFWKERYYKSEENTDWFLERNNKNLWEQFCKIFKFEFLNILKRKIIDDAWEEHEVWFDISKEILWKKLENFELNQENKWIIKDFADYALVLYSFWKYFAVEKWRNWDPNTEDIDDEFYKWENWYIEKFYDTGYDEIVKPYNLMRNYISKKPWEDSKKWKINFETSSLLSWWDKNLESNWSYIFQKWNKYYIWIINWSKPAKEVLEKLYSWNGEKIKRFIYDFQKPDNKNTPRMFIRSKKDSFSPAVGKYNLPVEDILEIYDNWLFKTENKDNSNYKESLSKLIDYFKLGFSKHESFKHFNFVWKDSKEYENIADFYRDVEKSCYQITSEFLDFEELKKLTFKKHLYLFQIYNKDFELDESLQKNWYNFRDEWQKNIHTKYFEALFLEENILRKSWAVFKLSWGWEVFFRKESIKAEKEKRKNIEVTKNRRYTEEKYFLHFPIQVNFKNEISWNFNQEINKFLANNPDINIIGIDRWEKHLAYFSVINQKWEILESGSFNKIENYDKNGEKILYSEREIKKTYKDWKLIDLELVETWKKVDYVDYKLLLEYKEEKRILQRQSWKEVEQIKDLKKWYISLLVRKIADLIIKYNAIVIFENLNFRFKQIRGWIEKSIYQQLEKALIDKLSFLVNKNEINLEKAGSLLKAYQLTVPVDSLKEIWKQTWVIFYTEAAYTSKIDPITGWRPNLYLKKNNSKINKENILKFDNIIFNSKENRFEFTYDLKKFLWKDAKFPEKTIWTVCSCVERFKWNKFLANNLWDYDHYEDLTDWKLLNRALKEWEFSNFKELFKKYLIDINWNILEQIKNLDTKNNERFFSEFINLFSLICQIRNTNQKEKWDENDFILSPVEPFFDSRKSKKFWKNLPKNGDENWAFNIARKGLIILDRISQNPEKTDLLILNSDWDNFVRNA

SEQ ID NO: 1471 - protein, 1333 aa, unidentified
  REGION 1..1333: note = Description of Unknown: uncultivated organism sequence
  REGION 1..1333: note = Category: MG62 effectors
  REGION 1..1333: note = Description: MG62-2 effector
MKNFQDFTNLYELSKTLRFELKPIWGTKKLIEEKNILKLDKKKRENYEKVKPYFNKIHQEFINFALRNPNFDFSQFEEKYLNWLKDKKNKDLLKEKESIDKIFLEKIWKLFENSVKDFLKENGFESIVKSEDQNLKFFRRKEIFEVLQEKYGSELETQMVNKDWEIKSIFNGWEKWLWYFDKFFNTRDNFYKTDWTSTAIATRIIKDNLKIFLENTIIFEKVKNKKIDFSEVEKNFSVSIDTFFEINNFNNCFLQDWIDFYNKVIWGETLENWEKLKWLNEIINKYRQDTGEKIPYFKKLQKQILSEKDWVFIDKIEDDGGFYEVLKNFYKNAAEKEWFLKNIFENFYTISDKNLEKIYFNKIAFNTISHKFWSALEFERILYEEMKKEKADWIKFEKKENKYKFPDFIQIIFIKRSLENYDSENLFWKERYYKSEENVDWFLEKNNNNIWEQFCKILNFEFLNILKRRIIDEAWEEYEVWFEISKNILWEKLENFELNQENKWIIKDFADYSLALYSFWKYFAVEKWRNWDLNIDISDDFYGWEDWYIEKFYNTGYDEIVKPYNLMRNYISKKPWEDSKKWKINFETSSLLSWWDKNLESNWSYIFQKWNKYYIWIINWSKPAKEVLEKLYSWNGEKIKRFIYDFQKPDNKNTPRMFIRSKKDSFSPAVGKYNLPVEDILEIYDNWLFKTENKDNSNYKESLSKLIDYFKLGFSKHESFKHFNFVWKDSKEYENIADFYRDVEKSCYQITSEFLDFEELKKLTFKKHLYLFQIYNKDFELDESLQKNWYNFRDEWQKNIHTKYFEALFLEENILRKSWAVFKLSWGWEVFFRKESIKAEKEKRKNIEVTKNRRYTEEKYFLHFPIQVNFKNEISWNFNQEINKFLANNPDINVIWIDRWEKHLAYFSVINQKWEILESWSFNKIENYNKNWEKLLFPEREIKEIHKDWSLIDLELVETWRKVDYVDYKLLLEYKERKRLLQRQSWKEVEQIKDLKKWYISALVRKIADLIIKHNAIVIFEDLNFRFKQIRGWIEKSIYQQLEKALIDKLNFLVNKNEINLEKAGSILKAYQLTVPVDSLKEIWKQTWVIFYTEAAYTSKIDPIKWWRPNLYLKKQNAEINKENILKFDNIIFNSKENRFEFTYDLKKFFWKDSKFPAKTVNTVCSCVERFKWNRNLNNNKWGYIHYENLTDWKLANKEQKEDEFSNFKELFEKYFIDINWNILEQIKNLDTKNNEKFFSSFIDLFTLVCQIRNTNQNAKWDENDFILSPVEPFFDSRKSQNFWKSLPKNWDENWAFNIARKGLIILNRISENPEKPDLLIFNADWDNFARNI

SEQ ID NO: 1472 - protein, 1333 aa, unidentified
  REGION 1..1333: note = Description of Unknown: uncultivated organism sequence
  REGION 1..1333: note = Category: MG62 effectors
  REGION 1..1333: note = Description: MG62-3 effector
MKNFQDFTNLYELSKTLRFELKPIWGTKKLIEEKNILKLDKKKRENYEKVKPYFNKIHQEFINFALRNPNFDFSQFEEKYLNWLKDKKNKDLLKEKESIDKIFLEKIWKLFENSVKDFLKENGFESIVKSEDQNLKFFRRKEIFEVLQEKYGSELETQMVNKDWEIKSIFNGWEKWLWYFDKFFNTRDNFYKTDWTSTAIATRIIKDNLKIFLENTIIFEKVKNKKIDFSEVEKNFSVSIDTFFEINNFNNCFLQDWIDFYNKVIWGETLENWEKLKWLNETINKYRQDTGEKIPYFKKLQKQILSEKDWVFIDKIEDDGGFYEVLKNFYKNAAEKEWFLKNIFENFYTISDKNLEKIYFNKIAFNTISHKFWSALEFERILYEEMKKEKTDWIKFEKKENKYKFPDFIQIIFIKRALENYDSENLFWKERYYKSEENADWFLEKNNNNLWEQFCKILNFEFLNILKRRIIDEAWEEYEVWFEISKNILWEKLENFELNQENKWIIKDFADYSLALYSFWKYFAVEKWRNWDLNIDISDDFYGWEDWYIEKFYNTGYDEIVKPYNLMRNYISKKPWEDNKKWKINFETSSLLSGWDKNLESNWSYIFQKWNKYYLWIINWSKPTNEILEKLYSWDGEKIKRFVCDFQKPDKKNTPRMFIRSKKDSFSPAVEKYNLPINDILEIYDNWLFKTENKDNPNYKESLRKLIDYFKLGFSKHESFKHFNFVWKDSKSYENIADFYRDVEKSCYKIDFEFLNFEELKKLTFEKHLYLFQIYNKDFELDESLQEKWYNFKGEWQKNIHTKYFEALFLEENISRKSWAVFKLSWGWEVFFRKKSIEVEKEKRNSVEVIKNKRYTECKYFLHFPIQVNFKEEISWNFNQEINKFLANNPDINVIWIDRWEKHLAYFSIINQKWEILESWSFNKIENYNKNWEKLLFPEREIKEIHKDWSLIDLELVETWRKVDYVDYKLLLEYKERKRLLQRQSWKEVEQIKDLKKWYISALVRKIADLIIKHNAIVIFEDLNFRFKQIRGWIEKSIYQQLEKALIDKLNFLVNKNEINLEKAGSILKAYQLTVPVDSLKEIWKQTWVIFYTEAAYTSKIDPITGWRPNLYLKKNNSKINKENILKFNNIVFNSKENRFEFTYDLKKFFWKDSKFPAKTVNTVCSCVERFKWNRNLNNNKWGYIHYENLTDWKLANKEQKEDEFSNFKELFEKYFIDINWNILEQIKNLDTKNNEKFFSSFIDLFTLVCQIRNTNQNAKWDENDFILSPVEPFFDSRKSQNFWKSLPKNWDENWAFNIARKGLIILNRISENPEKPDLLIFNADWDNFARNI

SEQ ID NO: 1473 - protein, 372 aa, unidentified
  REGION 1..372: note = Description of Unknown: uncultivated organism sequence
  REGION 1..372: note = Category: MG70 effectors
  REGION 1..372: note = Description: MG70-1 effector
MNYNTVYVGMDVHKESFTLCAYTIDAEKGSHFQRTEADYKNVLKYLEFLRTVYGNDANFICGYEAGCLGYTLYHQLTEHDVNCVILAPTTMLEQRSKRRIKTDRRDAEIIGKCLAQHNYSPVHIPTATDEETKEFLRMRDDHKLALKKVKQQILAFCLRHNYRYDGNSHWTAAHIKWLKSLNPEALYKEILDEYLLTYTTLSDKVERLDKRIEELASKDEYRESVKKLCCFIGIKTHTALSVLVEVGDFQRFASAQNFASYLGLVPGEDSSGDGQTRLGITKAGNRHVRMLLTEASQCYARGQIGFKSKELKSRQAGNSPQVIAYADKANERLRRRYYKMVLGKSKKHNVAKTAIARELACFMWGMMTEHIA

SEQ ID NO: 1474 - protein, 167 aa, unidentified
  REGION 1..167: note = Description of Unknown: uncultivated organism sequence
  REGION 1..167: note = Category: MG70 effectors
  REGION 1..167: note = Description: MG70-2 effector
MEFLRTIYGDDANFICGYEAGCLGYNLYHQLTANNIKCIILAPTTMLEQRSKKRIKTDKRDAEIIAKCLAQHNYSPVHIPTAKDEETKEFLRMRDDHKLALKKVPLLDRYKFYSHVICSGTKIKVITQPIDNRFYSHVICSGTKIHAADNTEAPVFYSHVICSGTKI

SEQ ID NO: 1475 - protein, 50 aa, unidentified
  REGION 1..50: note = Description of Unknown: uncultivated organism sequence
  REGION 1..50: note = Category: MG70 effectors
  REGION 1..50: note = Description: MG70-3 effector
MNNTTVYVGMDVHKESFTLCAYTLEKEKGSYSRRTPADYKEVLKYLEFLR

SEQ ID NO: 1476 - protein, 172 aa, unidentified
  REGION 1..172: note = Description of Unknown: uncultivated organism sequence
  REGION 1..172: note = Category: MG70 effectors
  REGION 1..172: note = Description: MG70-4 effector
MNYNTVYVGIDVHKESFSLCAYTIETKKASHYQKTDADYKNVLKYVEFLRTIYGDDANFICGYEAGCLGYNLYHQLTANNIKCIILAPTTMLEQRSKKRIKTDKRDAEIIAKCLAQHNYSPVHIPTAKDEETKEFLRMRDDHKLALKKVPLLDRYKFYSHVICSGTKIQREV

SEQ ID NO: 1477 - protein, 182 aa, unidentified
  REGION 1..182: note = Description of Unknown: uncultivated organism sequence
  REGION 1..182: note = Category: MG70 effectors
  REGION 1..182: note = Description: MG70-5 effector
MNYNTVYVGIDVHKESFSLCAYTIETKKASHYQKTDADYKNVLKYVEFLRTIYGDDANFICGYEAGCLGYNLYHQLTANNIKCIILAPTTMLEQRSKKRIKTDKRDAEIIAKCLAQHNYSPVHIPTAKDEETKEFLRMRDDHKLALKKVPLLDRYKFYSHVICSGTKIRILCNPIIISFTVT

SEQ ID NO: 1478 - protein, 172 aa, unidentified
  REGION 1..172: note = Description of Unknown: uncultivated organism sequence
  REGION 1..172: note = Category: MG70 effectors
  REGION 1..172: note = Description: MG70-6 effector
MNYNTVYVGIDVHKESFSLCAYTIETKKASHYQKTDADYKNVLKYVEFLRTIYGDDANFICGYEAGCLGYNLYHQLTANNIKCIILAPTTMLEQRSKKRIKTDKRDAEIIAKCLAQHNYSPVHIPTAKNEETKEFLRMRDDHKLALKKVPLLDRYKFYSHVICSGTKIQREV

SEQ ID NO: 1479 - protein, 183 aa, unidentified
  REGION 1..183: note = Description of Unknown: uncultivated organism sequence
  REGION 1..183: note = Category: MG70 effectors
  REGION 1..183: note = Description: MG70-7 effector
MNYNTVYVGIDVHKESFSLCAYTIETKKASHYQKTEADYKNVLKYVEFLRTIYGDDANFICGYEADCLDYNLYHQLTANNIKCIILAPTTMLEQRSKKKRIKTDKRDSEIIAKCLAQHNYSPVHIPTAKDEETKEFLRLRDDHKLALKKVPLLDRYKFYSHVICSGTKICTDTWVMMSCFTVT

SEQ ID NO: 1480 - protein, 198 aa, unidentified
  REGION 1..198: note = Description of Unknown: uncultivated organism sequence
  REGION 1..198: note = Category: MG70 effectors
  REGION 1..198: note = Description: MG70-8 effector
MNYNTVYVGIDVHKESFSLCAYTIETKKASHYQKTEVDYKNVLKYVEFLRTIYGDDANFICGYETGYLGYNLYHQLTANNIKCIILAPTTMLEQRSKKRIKTDKRDAEIIAKCLAQHNYSPVHIPTAKDEETKEFLRMRDDHKLALKKVPLLDRYKFYSHVICSGTKIESEEVTRLGQFYSHVICSGTKINCCIAVLH

SEQ ID NO: 1481 - protein, 173 aa, unidentified
  REGION 1..173: note = Description of Unknown: uncultivated organism sequence
  REGION 1..173: note = Category: MG70 effectors
  REGION 1..173: note = Description: MG70-9 effector
MNYNTVYVGMDVHKESFSLCAYTIEAEKASQYQRTEADYKKVLNYLEFLRTIYGDDANFICGYETGYLGYNLYHQLTANNIKCIILAPTTMLEQRSKKRIKTDKRDAEIIAKCLAQHNYSPVHIPTAKDEETKEFLRMRDDHKLALKKVPLLDRYKFYSHVICSGTKIFSLPG

SEQ ID NO: 1482 - protein, 173 aa, unidentified
  REGION 1..173: note = Description of Unknown: uncultivated organism sequence
  REGION 1..173: note = Category: MG70 effectors
  REGION 1..173: note = Description: MG70-10 effector
MNYNTVYVGMDVHKESFSLCAYTIETEKASHYQKTEVDYKNVLKYVEFLRTIYGDDANFICGYETGYLGYNLYHQLTANNIKCIILAPTTMLEQRSKKRIKTDKRDAEIIAKCLAQHNYSPVHIPTAKDEETKEFLRMRDDHKLALKKVPLLDRYKFYSHVICSGTKIFSLPG

SEQ ID NO: 1483 - protein, 198 aa, unidentified
  REGION 1..198: note = Description of Unknown: uncultivated organism sequence
  REGION 1..198: note = Category: MG70 effectors
  REGION 1..198: note = Description: MG70-11 effector
MNYNTVYVGMDVHKESFSLCAYTIETEKASHYQKTEVDYKNVLKYVEFLRTIYGDDANFICGYETGYLGYNLYHQLTANNIKCIILAPTTMLEQRSKKRIKTDKRDAEIIAKCLAQHNYSPVHIPTAKDEETKEFLRMRDDHKLALKKVPLLDRYKFYSHVICSGTKIIGGFVKHHDLFYSHVICSGTKICMPSFRTT

SEQ ID NO: 1484 - protein, 151 aa, unidentified
  REGION 1..151: note = Description of Unknown: uncultivated organism sequence
  REGION 1..151: note = Category: MG70 effectors
  REGION 1..151: note = Description: MG70-12 effector
MNYNTVYVGMDVHKESFSLCAYTIETEKASHYQKTEVDYKNVLKYVEFLRTIYGDDANFICGYETGYLGYNLYHQLTANNIKCIILAPTTMLEQRSKKRIKTDKRDAEIIAKCLAQHNYSPVHIPTAKDEETKEFLRMRDDTSWLSKKYLF

SEQ ID NO: 1485 - protein, 199 aa, unidentified
  REGION 1..199: note = Description of Unknown: uncultivated organism sequence
  REGION 1..199: note = Category: MG70 effectors
  REGION 1..199: note = Description: MG70-13 effector
MNYNTVYVGMDVHKESFSLCAYTIETEKASHYQKTEVDYKNVLKYVEFLRTIYRDDANFICGYETGYLGYNLYHQLTANNIKCIILAPTTMLEQRSKKRIKTDKRDAEIIAKCLAQHNYSPVHIPTAKDEETKEFLRMRDDHKLALKKVPLLDRYKFYSHVICSGTKIAPQAVYHGCWFYSHVICSGTKILNVHVKHLH

SEQ ID NO: 1486 - protein, 218 aa, unidentified
  REGION 1..218: note = Description of Unknown: uncultivated organism sequence
  REGION 1..218: note = Category: MG70 effectors
  REGION 1..218: note = Description: MG70-14 effector
MNYNTVYVGMDVHKESFSLCAYTIETEKASHYQKTEVDYKNVLKYVEFLRTIYRDDANFICGYETGYLGYNLYHQLTANNIKCIILAPTTMLEQRSKKRIKTDKRDAEIIAKCLAQHNYSPVHIPTAKDEETKEFLRMRDDHKLALKKVPLLDRYKFYSHVICSGTKIAPQAVYHGCWFYSHVICSGTKMQGLISPSTLGFYRHVICSGTKIGNTADS

SEQ ID NO: 1487 - protein, 214 aa, unidentified
  REGION 1..214: note = Description of Unknown: uncultivated organism sequence
  REGION 1..214: note = Category: MG70 effectors
  REGION 1..214: note = Description: MG70-15 effector
MNYNTVYVGMDVHKESFSLCAYTIETEKASHYQKTEVDYKNVLKYVEFLRTIYRDDANFICGYETGYLGYNLYHQLTANNIKCIILAPTTMLEQRSKKRIKTDKRDAEIIAKCLAQHNYSPVHIPTAKDEETKEFLRMRDDHKLALKKVPLLDRYKFYSHVICSGTKIAPQAVYHGCWFYSHVICSGTKMQGLISPSTLGFYRHVICSGTKIKV

SEQ ID NO: 1488 - protein, 172 aa, unidentified
  REGION 1..172: note = Description of Unknown: uncultivated organism sequence
  REGION 1..172: note = Category: MG70 effectors
  REGION 1..172: note = Description: MG70-16 effector
MNYNTVYVGMDVHKESFSLCAYTIETKKASHYQKTEADYKNVLKYVEFLRTIYGDDANFICGYEAGCLGYNLYHQLTANNIKCIILAPTTMLEQRSKKRIKTDKRDAEIIAKCLAQHNYSPVHIPTAKDEETKEFLRMRDDHKLALKKVPLLDRYKFYSHVICSGTKIVPSQ

SEQ ID NO: 1489 - protein, 372 aa, unidentified
  REGION 1..372: note = Description of Unknown: uncultivated organism sequence
  REGION 1..372: note = Category: MG70 effectors
  REGION 1..372: note = Description: MG70-17 effector
MNYNTVYVGMDVHKESFTLCSCKYEDEKASHYQRTPASYKNVLRYLAFLRTIYGEDTRFVCGYEAGCLRYSLYHQLENFNVECVILAPTTMLEQRSKRRIKTDKRDAEIIAKSLAQHNYSPVHIPTKMDNQTKEFIRMRDDHKAELKKIKQQILSFCLRQGYQYDGSGNWTAKHVKWLRSLKPAGLYKEILDEYLLTYTILTDKLNRLDQRIEELASKEEYKESVSKLTCFLGIKIHTALSVIVEVGDFQRFVSARKFAGYLGLVPGQHSSGDDRNGLGITKAGNTHVRRLLVESAQSYTRGKIGYKSRVLRSRQAGNSPQIINYADRANERLRRRYYQMVLKDGKKYNIAKIAVARELACFIWGMMTDNIY

SEQ ID NO: 1490 - protein, 414 aa, unidentified
  REGION 1..414: note = Description of Unknown: uncultivated organism sequence
  REGION 1..414: note = Category: MG70 effectors
  REGION 1..414: note = Description: MG70-18 effector
MQFGFLGIDYKNADLTIRDEISFTDQKKLEFFHKAEEIGVEQVMILSTCNRSEIYYFFDDEQQIKKIQNIYCDMFDKAEIEQYIRHCEEDKAVSYLFQVTAGLESMVLGEDQILGQVKDALDFSRTMGFSKKELNKVVRDAITCAKKVKTTFRISEKPVSVGYIGICELQKICDIKDKMVLVIGSGDTAVLALRYLQEYEAGKIYLCSRTLAHAGNVQKEFQEIEIISYEQRYEIMKQCDIVVSATSAPHVVVKQEYYTPEKQVTFLDLATPRDIDPKLSDDSKVNLINLDTIKEISKANQSEREELCRQSNTMISKAKEETMQWLFQAPMEETIRSLQEKCTEIVEDSYSYLSRKIDFGTREQKLLKKVLNASLQRMIKEPIQELKHLETRQEQADYKKMVEQLFGIETKKGK

SEQ ID NO: 1491 - protein, 372 aa, unidentified
  REGION 1..372: note = Description of Unknown: uncultivated organism sequence
  REGION 1..372: note = Category: MG70 effectors
  REGION 1..372: note = Description: MG70-19 effector
MYYNTIYVGMDVHKSSFTLCSYTIEAEKVSHFQRTEADYKKVLKYLEFLRTVYGDDARFVCGYEAGCLGYTLYHQLTEHHVECVILAPTTMLEQRSRKRIKTDKRDAEVIARCLAQHNYSAVHIPTATDEETKEYLRMRNDHKLALKRIKQQILAFCLRHGHIYGGKSNWTISHLKWLKELELNSMHREILDEYLLTYTTLTDKLERLDSRIEEIASKPEYNESVKKLSCFIGIKTHTALSTLVEVGDFHRFATASKFASYLGLVPGEDSSGDDQTRLGITKAGNRHLRLLLTEAAQCYARGQIGYKSKALKARQSGNPPEIIAYADKANERLRRKYYKMVLQERKTHNVAKTAITRELACFIWGMMTDRIA

SEQ ID NO: 1492 - protein, 198 aa, unidentified; identical to SEQ ID NO: 1480
  REGION 1..198: note = Description of Unknown: uncultivated organism sequence
  REGION 1..198: note = Category: MG70 effectors
  REGION 1..198: note = Description: MG70-20 effector

SEQ ID NO: 1493 - protein, 373 aa, unidentified
  REGION 1..373: note = Description of Unknown: uncultivated organism sequence
  REGION 1..373: note = Category: MG70 effectors
  REGION 1..373: note = Description: MG70-21 effector
MNYSIVYLGIDAHMQSFSLCCYTNEKEKAEYPQKVDGHYSKVINYIEAMRFHFGDDALFICGYEAGSLGFTLYHQLTDHGVKCVILAPTTMPTQKGGKRIKTDKRDAALIARCLAHRDYSPVHIPTEQDEQTKEYIRMRDDHKLALKKVKQQILSFCLRHNYRFDGTKHYWTQAHLNWLRALKPEGLYAEILMEYLLTYDNLTNKIERLDKRIEELAAGDAYRQNVHKLSCFLGVKTITALSVLTEVGDFKRFASAQHFSSYIGLTPGEDSSGNDKKRLGITKAGNRHVRTLLVEAAQNYSRGRIGVKSKALMARQEGNAPEVIAYADKANERLRRKYYRMVLKNNKKTNVAKTAVARELACFMWGMVTGNVV

SEQ ID NO: 1494 - protein, 373 aa, unidentified
  REGION 1..373: note = Description of Unknown: uncultivated organism sequence
  REGION 1..373: note = Category: MG70 effectors
  REGION 1..373: note = Description: MG70-22 effector
MEYSTVYVGMDVHKNSFSLCCFTNEKEEAEYPQKVTAHYSKVINYIEAMRFHYGNDALFICGYEAGCLGYTLYHQLTDHNIKCVILAPTTMAQQRGKKKVKTDKRDAALIARCLAHHDYSAVHIPTDQDEQTKEYIRMRDDHKLALKKIKQQILSFCLRHNCHYDGTKTHWTQTHLNWLRSLKLDGLYQEILDEYLLTYDRLSEKLERLENRIEELASGEAYADNVHKLSCFIGVKTTTALAALTEVGDFKRFETAQQFSSFLGLTPGEDSSGDDQNRLGITKAGNRHLRMLLIEAAQCYSRGAIGSKSKALKQRQEGNKPEVISYADKANERLRRKYYRMVLHNSKKANVAKTAVARELACFVWGMMVEDFA

SEQ ID NO: 1495 - protein, 372 aa, unidentified
  REGION 1..372: note = Description of Unknown: uncultivated organism sequence
  REGION 1..372: note = Category: MG70 effectors
  REGION 1..372: note = Description: MG70-23 effector
MNYNTVYVGMDVHKESFTFCAYTIDAEKGSHFQRTEADYKNVLKYLEFLRTVYGNDANFICGYEAGCLGYTLYHQLIEHHVNCVILAPTTMLEQCSRRRIKTDRRDAEIIAKCLAQHNYSPVHIPTATDEETKEFLRMRDDHKLALKKVKQQILAFCLRHNYRYDGNSHWTAAHIKWLKSLKPEALYKEILDEYLLTYTTLSDKLERLDKRIEELASKDEYRESVKKLCCFIGIKTHTALSVLIEVGDFQRFASAQKFASYLGLVPGEDSSGDEQTRLGITKAGNRHVRMLLTEASQCYARGQIGFKSKELKSRQAGNSPQVIAYADKANERLRRRYYKMVLGKSKKHNVAKTAIARELACFMWGMMTDHIT

SEQ ID NO: 1496 - protein, 376 aa, unidentified
  REGION 1..376: note = Description of Unknown: uncultivated organism sequence
  REGION 1..376: note = Category: MG70 effectors
  REGION 1..376: note = Description: MG70-24 effector
MNTNTIYVGMDVHKESFSLCCYSIEKDEASHQQKIGADYRLILKYLGSMRGVFGEDTEFVCGYEAGCLGFTLYRQLTDLNVKCIILAPTTMMAEQGRKRIKTDKRDAVLIARCLAYHTYHAVHIPTEQDEQIKEYIRMRDDHRLALKKDKQQILSFCLRHGFQYTETNSRWTQAHINWLRKLELEGLYQETMAEYLMTFDRLTEVIERLDKRIAGLAEQDTYRSNVKKLTCFMGVKTQTALAVLVEVGDFNRFARAENIAAYIGLVPGEDSSGGDKQRLSITKAGNTHVRRLLIEAAQSYSRGVVGYKSKALKERQEGNPPEVIAYADKANTRLRRRYYHMILQNGRKANVAKTAIARELMCFMWGMVTGNIEARI

SEQ ID NO: 1497 - protein, 379 aa, unidentified
  REGION 1..379: note = Description of Unknown: uncultivated organism sequence
  REGION 1..379: note = Category: MG70 effectors
  REGION 1..379: note = Description: MG70-25 effector
MKRIIKIGMDVHSTNYTLCALEPVIGAEDKIFAQIQVTPDYKNILMFINKLMLKLEPSDDYSIECGYEAGCLGYSLYNQLTSAGVKCTILAPTTMLTPKNKRVKTDSRDALMIAQCLAYGGYHPVYVPTEEDNSVKEYLRMRDDHKLALKKVKQQIISFCMRHGHQYSGTNWTGRHIAWLRKADFSALFREALNEYLVTYEELTSKIERFDKRIEEISSQKAYQEKVKKLSCFLGIRTHTALSLIVETGDFYRYKKGNIYSSFLGMAPGENSSGDHIKRTGITKAGNSHLRRLLIESARGICKGTIGYKSKDLKSRQAGNSAEVIAYADKANQRLRSRYYKMIRHGKKKNVAVVAIARELACFVWGMMTDNIYSASSAT

SEQ ID NO: 1498 - protein, 388 aa, unidentified
  REGION 1..388: note = Description of Unknown: uncultivated organism sequence
  REGION 1..388: note = Category: MG70 effectors
  REGION 1..388: note = Description: MG70-26 effector
MESLVAIGIDVHKEKFALVAILLVLGAQDQILGEIEVGSDYKEILAFIESIKQKALPGQTYSFVCGYEAGCLGYVLYHQLTAAGVRCVIMAPTTMLSEQGKRIKTDRRDARLIAKCLCCNGYHQVYIPTAEDEDVRDYLRMRDDHQGALKKLKQQINAFVLRHGCSYVGTKWTARHIGWLMDLQNKLDEMQAETLKEYMLSYAEQKDKIERFDEKIEEIARMDRYSKLVSKLVCFLGVKTHTALSLIVETGDFMRFAKGNIFAAFLGLAPGEHSSGSGVHRLGITKAGNTHLRTLLIEAASGICKGAVGHKSKALKARQAGQESEVIAYADKANTRLRSKYYRMMRHGKKRNVAVAAVARELACFIWGMATGNTGLTRQAQASAKAGI

SEQ ID NO: 1499 - protein, 372 aa, unidentified
  REGION 1..372: note = Description of Unknown: uncultivated organism sequence
  REGION 1..372: note = Category: MG70 effectors
  REGION 1..372: note = Description: MG70-27 effector
MNYNTVYVGMDVHKESFSLCAYTIEAEKASHYQRTEADYKKVLNYLEFLRTIYGDDANFICGYEAGCLGYTLYHQLTANNVKCIILAPTTMLEQRSKKRIKTDKRDAEIIAKCLAQHNYSPVHIPTAKDEETKEFLRMRDDHKLALKKVKQQILAFCLRHNYRYDGNSHWTAAHLKWLKALTPEALYKEILDEYLLTYQTLSDKLERLDKRIEELSTQDEYKEAVKKLCCFIGVKTHTALSVLVEVGDFNRFASAQHFASYLGLVPGEDSSGNDQNRLGITKAGNRHVRLLLTEASQCYARGQVGFKSKELKARQSGNTPAVIAYADKANERLRRRYYKMVLNKCKKHNVAKTAIARELACFMWGMMTDNIA

SEQ ID NO: 1500 - protein, 372 aa, unidentified
  REGION 1..372: note = Description of Unknown: uncultivated organism sequence
  REGION 1..372: note = Category: MG70 effectors
  REGION 1..372: note = Description: MG70-28 effector
MNYNTVYVGMDVHKESFTFCAYTIDAEKGSHFQRTEADYKNVLKYLEFLRTVYGNDANFICGYEAGCLGYTLYHQLTEYHVNCVILAPTTMPEQCSKRRIKTDRRDAEIIAKCLAQHNYSPVHIPTATDEETKEFLRMRDDHKLALKKLKQQILAFCLRHNYRYDGNSHWTAAHIKWLKSLKPEALYKEILDEYLLTYTTLSDKLERLDKRIEELASKDEYRESVKKLCCFIGIKTHTALSVLVEVGDFQRFASAQKFASYLGLVPGEDSSGDEQTRLGITKAGNRHVRMLLTEASQCYARGQIGFKSKELKSRQAGNSPQVIAYADKANERLRRRYYKMVLGKSKKHNVAKTAIARELACFMWGMMTDHIA

SEQ ID NO: 1501 - protein, 371 aa, unidentified
  REGION 1..371: note = Description of Unknown: uncultivated organism sequence
  REGION 1..371: note = Category: MG70 effectors
  REGION 1..371: note = Description: MG70-29 effector
MKSIIYLGMDVHTTNYTLCCYTLEDDRMCHLQQIAPDYRLILKYMDQVRRLYNNDVEFLCGYEAGCLGYSLYHQLTAHQVRCVILAPTTMGAVLGIRKVKTDKRDAMLIAKCLAFHTYHPVHIPTPEEEQVKEFIRMRDDHKLALKRIKQQISAFCLRHGFHYTATKSKWTQAHWKWLKSLKPDGLHQETLNEYLLTCSSLSDKLERLDRRIEELAAQEPFQERVRQLTCLVGVKTHTALSIIVEVGDFNRFPTAGKFASFLGLTPGEASSSDKQNRFGITKAGNTHVRRLLVEAAQSYARGQTGRKSKDLKARQAGNKEQVIAYADKGSERLRRRFRQLLYKGKQHNVIKTAIARELSCFIWGMMTDRIA

SEQ ID NO: 1502 - protein, 378 aa, unidentified
  REGION 1..378: note = Description of Unknown: uncultivated organism sequence
  REGION 1..378: note = Category: MG70 effectors
  REGION 1..378: note = Description: MG70-30 effector
MNRIIKIGMDVHTSNYTLCIFEPSFEHDGTVHCITQVKPEVKNIIHVIETFKKKHENEELNIVCGYEAGCLGYSLYHELKEKGIECVILAPTTMKTEKGGRKLKNDYRDAKMIAECLAYGGYSAVHIPTELDNSVKEFIRMRDDIKENLKSIKQQIIAFLTRNGKQFEGKSFWTRKHIDWINTVSFSEPLLQDTLKEYMIEYNHLCNRIETLDRQIEEISLKEEYVEKVQQLQCLIGIKTHTALSLIVETSDFNRFKKGNMYSAYLGLIPGDDSSGGHENKLGITKAGNSHLRRLLVEAAQGYTRGRVGFKSKDLKSRQEKCSSEVVAYADRANERLRRKYYRMTLRGKKFNVAKTAIARELACFVWGIMTDHIDLCN

SEQ ID NO: 1503 - protein, 405 aa, unidentified
  REGION 1..405: note = Description of Unknown: uncultivated organism sequence
  REGION 1..405: note = Category: MG70 effectors
  REGION 1..405: note = Description: MG70-31 effector
MQLGYVGINYKNSDLSVRDKITFTDSGIADFMQQAEEAGVNQCMCLSTCNRCEVFYLYEDETFVQVMSDLFNDYFGLTDTKLAGVKCGEEALVYLFCIAAGLESMVLGEDQILGQLKDAADLSRTLGHSGKELNYIVREAVSCAKRIKTEYKVSEKPVSVCYVGIQELDRVCGISGKHALVIGSGKTAALAIRYLAEYGADVTVCSRTYQHAKALLKEFPDIQVIAYDKKTEALKSSDIVVSATSSPHLVIKCAELSGGKKMTLLDLAAPRDIEKSAGDICGVTLIDLDRIGGIVKSNQNERAHLLKESQCVIDEYIAETKKWLTSSRMDTTIQSLGKKCDEIVQDSYDYLNRKIDLSDHDRVILKKILKSSLHRLLKEPIEELKNVEENEQQQYKDMVERLFGL

SEQ ID NO: 1504 - protein, 204 aa, unidentified
  REGION 1..204: note = Description of Unknown: uncultivated organism sequence
  REGION 1..204: note = Category: MG70 effectors
  REGION 1..204: note = Description: MG70-32 effector
MNYNTVYVGMDVHKESFSLCAYTIETKKASHYQKTEADYKNVLKYVEFLRTIYGDDANFICGYEAGCLGYNLYHQLTANNIKCIILAPTTMLEQRSKKRIKTDKRDAEIIAKCLAQHNYSPVHIPTAKDEETKEFLRMRDDHKLALKKVPLLDRYKFYSHVICSGTKIKVITQPIDNRFYSHVICSGTKIAWDYENCMNGFTVT

SEQ ID NO: 1505 - protein, 193 aa, unidentified
  REGION 1..193: note = Description of Unknown: uncultivated organism sequence
  REGION 1..193: note = Category: MG70 effectors
  REGION 1..193: note = Description: MG70-33 effector
MNYNTVYVGMDVHKESFSLCAYTIETKKASHYQKTEADYKNVLKYVEFLRTIYGDDANFICGYEAGCLGYNLYHQLTANNIKCIILAPTTMLEQRSKKRIKTDKRDAEIIAKCLAQHNYSPVHIPTAKDEETKEFLRMRDDHKLALKKVPLFDRYKFYSHVICSGTKIMFAGVAVYFGFYSHVICSGTKIVLH

SEQ ID NO: 1506 - protein, 415 aa, unidentified
  REGION 1..415: note = Description of Unknown: uncultivated organism sequence
  REGION 1..415: note = Category: MG70 effectors
  REGION 1..415: note = Description: MG70-34 effector
MIFGYVGICYKEAPLALRGQVALPDSKKIELWERLSVIGLKQCVIVSTCNRSEIFYFSHSDAVTGEQVQSCYQDIFPNVSFGDYCKKKEGSEAVSYLFRVAAGLESLVVGEDQILGQVVEAMDFARTMGHSGKELERIVRDAVTCAKWIKTNYRISEKPLSVSYIGVKELHRAGGVSGKNILVIGSGKTAALALTYLFEYGAKKIYLCSRTLAHAKELLAVHENLTVVDYHERYDAMKRCETVVSATSSPHLVVLYDKWKETGVTQMQFLDLASPRDIDSRLQEVPGVQLIDMDTLQKITEKNQNEREKLAADCEQVIEEKVQETMEWLLLSRVDGTIETLQKRCLQIETDSYEYLNRKISLNHREQKLLKKVLHASLQRLIREPIQELKQLEDEEKQKEYQNILKTLFRMYEDE

SEQ ID NO: 1507 - protein, 405 aa, unidentified
  REGION 1..405: note = Description of Unknown: uncultivated organism sequence
  REGION 1..405: note = Category: MG70 effectors
  REGION 1..405: note = Description: MG70-35 effector
MQLGYVGINYKNTDLSVRDKITFTDSGIADFMQQAEEAGVNQCMCLSTCNRCEVFYLYEDETFVQVMSDLFNDYFGLTDTKLAGVKCGEEALVYLFCIAAGLESMVLGEDQILGQLKDAADLSRTLGHSGKELNYIVREAVSCAKRIKTEYKVSEKPVSVCYVGIQELDRVCGISGKHALVIGSGKTAALAIRYLAEYGADVTVCSRTYQHAKALLKEFPDIQVIAYDKKTEALKNSDIVVSATSSPHLVIRASELSEGKKMTLLDLAAPRDIEKSAGDICGVTLIDLDRIGGIVKSNQNERAHLLKESQCVIDEYIAETKKWLTSSRMDTTIQSLGKKCDEIVQDSYDYLNRKIDLSDHDRVILKKILKSSLHRLLKEPIEELKNVEENEQQQYKDMVERLFGL

SEQ ID NO: 1508 - protein, 377 aa, unidentified
  REGION 1..377: note = Description of Unknown: uncultivated organism sequence
  REGION 1..377: note = Category: MG70 effectors
  REGION 1..377: note = Description: MG70-36 effector
MNRIIKIGMDVHTTNYTLCIFEPSFEHDGTVHCITQVKPEVKNILRVIETFKNKHPEESFKITCGYEAGCLGYSLYHDLKAKGIECVILAPTTMKVEKGGRKIKNDYRDARMIAECLAYGGYSAVHVPTQLDNSVKEYIRMRDDVQSNLKSIKQQIIGFMTRNGKFYDGKSYWTQKHLDWIRQTTFHDPLLREVLDEYMIEYSRLKERVETLDKRIEELSTKEEYVEKVKQLQCLIGIKTHTALSLIVETSDFKRFRKGDMYAAYLGLIPGEDSSAEHENRLGITKAGNRHLRRLLVEAAQGYTRGQIGFKSKALKERQEKCDHEVVAYADRANERLRRKYYRMIGRGKKYNVAKTAIARELACFVWGIMTDHIELQ

SEQ ID NO: 1509 - protein, 388 aa, unidentified
  REGION 1..388: note = Description of Unknown: uncultivated organism sequence
  REGION 1..388: note = Category: MG70 effectors
  REGION 1..388: note = Description: MG70-37 effector
MNRIIKIGMDVHSTNYTLCAMEPTIGAEDRVYGEVQVAPDYKEVVTFIASLKQKLGLDHDYSIECGYEAGCLGYTLYHQLSNAGIKCVILAPTTMLTQQGQRIKTDKRDAHLIAQCLCYGGYHPVYIPTGEDDSVKEYLRMRDDHKLALKKLKQQINAFVLRHGNQFTGTKWTIKHITWLKKLELDPMYRETLDEYLSSYEEQEAKIERYDKRIEEIADEARYQENTKKLGCFLGIRTHTALSLIVETGDFKRFAKGNTYAAFLGLAPGEHSSSKSVNRLGISKAGNTHLRCLLIEAAKGICKGAIGHKSRELRSRQSGQSAEVITYADKANTRLRSKYYRMIRHGKKKNVAVAAVARELACFIWGMMTGNISTAYSAGASNPAVSQG

SEQ ID NO: 1510 - protein, 373 aa, unidentified
  REGION 1..373: note = Description of Unknown: uncultivated organism sequence
  REGION 1..373: note = Category: MG70 effectors
  REGION 1..373: note = Description: MG70-38 effector
MKYSTVYVGMDVHKESFSLCCYTNEKEQAEYPQKVDAHYSKVINYIEAMRFHYGDDTLFICGYEAGCLGFTLYHQLMDHGVKCVILAPTTMLQQKGRKKVKTDKRDAALIARCLAHHDYSPVHIPTEQDEQTKEYIRMRDDHKLALKKVKQQILSFCLRHNYRFDGTANHWTQAHLKWLRSLKPEGLYAEILQEYLLTYDSLIDKLKRFDKRIEELAADEVYQENVRKLSCFIGVKTVTALAVLTEVGDFKRFASAQHFASYIGLTPGEDSSGDDQHRLGITKAGNRHVRSLLVEAAQSYSRGQIGFKSKALKARQDGNPPEVIAYADKANERLRRKYYHMVLKNNKKTNVAKTAVARELACFMWGMITGNVA

SEQ ID NO: 1511 - protein, 384 aa, unidentified
  REGION 1..384: note = Description of Unknown: uncultivated organism sequence
  REGION 1..384: note = Category: MG70 effectors
  REGION 1..384: note = Description: MG70-39 effector
MVTGITAYNRRSHMNSIVYVGMDVHKESYTLCCYCFDTDKVEFKQTIPSDYKLILKYIEAMRGKYGEDSKFVCGYEAGCLGYSLYHQLKEHSVDCRILAPTTMAITNTNHVKTDRRDAANIARCLAFHTYSEVYVPDDEDNSVKEYIRMRDDQKLMLKKTKQQILAFVLRQGKKFEGGKTYWTIAHMKWLKSLELDGLNKETLSEYLITYEYLTEKIARLDDRIEELASGEKYKEKVKNMGCFLGVKTHTALSMVVEIGDFNRFEKAPKFAGFLGLVPSEDSSGGNVNRYSITKAGNSHLRRLMVEAAQSYTRGNVGHKSVALKARQKGCNAEVIAYADKANERLRRRFYKMTLNKGVNRNVATTAIARELACFMWGMATGNIS

SEQ ID NO: 1512 - protein, 372 aa, unidentified
  REGION 1..372: note = Description of Unknown: uncultivated organism sequence
  REGION 1..372: note = Category: MG70 effectors
  REGION 1..372: note = Description: MG70-40 effector
MNYNTVYVGMDVHKESFSLCAYTIEAEKASHYQRTEADYKKVLNYLEFLRTIYGDDANFICGYEAGCFGYTLYHQLTANNVKCIILAPTTMLEQRSKKRIKTDRRDAEIIAKCLAQHNYSPVHIPTAKDEETKEFLRMRDDHKLALKKVKQQILAFCLRHNYRYDGKSHWTAAHLKWLKALTPEALYKEILDEYLLTYQTLSDKIERLDKRIEELATQDEYKEAVKKLCCFIGVKTHTALSVLVEVGDFKRFASAQHFASYLGLVPGEDSSGDDQNRLGITKAGNRHVRLLLTEASQCYARGQVGFKSKELKSRQSGNTPAVIAYADKANERLRRRYYKMVLNKYKKHNVAKTAIARELACFMWGMMTDNIA

SEQ ID NO: 1513 - protein, 382 aa, unidentified
  REGION 1..382: note = Description of Unknown: uncultivated organism sequence
  REGION 1..382: note = Category: MG70 effectors
  REGION 1..382: note = Description: MG70-41 effector
MNRIIKIGMDVHSTNFTLCALEPKIDGEDRIFANIKVEPDYKYILRFIEKLKEKLGSSDNYSIECGYEAGCLGYSLYRQLTKAGVKCVILAPTTMLTQQGKRVKTDTRDAVMIAQCLAYNGYHAVHVPTEKDNSVKEYLRMRDDHKIALKKLKQQINAFCLRNGHQYCGNKWTISHLTWLRKLELPELYRETLNEYLATYDEETAKIERFDKRIEELASDTDYKDHVRNLGALLGIKTHTALSLIVETGDFNRFAKGNTYAAFLGLAPGESSSGEHICRTGISKAGNAHLRTLLIEASRGICKGAVGYKSRALRARQAECSAEIIAYADRANTRLRSKYYRLIRHDKKKNVAVAAIARELACFIWGIMTDHTEIKTNGQKTA

SEQ ID NO: 1514 - protein, 392 aa, unidentified
  REGION 1..392: note = Description of Unknown: uncultivated organism sequence
  REGION 1..392: note = Category: MG70 effectors
  REGION 1..392: note = Description: MG70-42 effector
MNRIVYIGMDVHTSNYTLCSLDPGYGVEKDNYFAEVQFTNNFVTNVVNYVSNLKKKLKDCEFVCGYEAGCLGYSTYKDLTKVGIKCVLMAPSTMAVQKGGKKVKNDRRDARVIAQCLAYQTYKEVYVLSEHDEAVRGYLRMRDSHNKALKRIKQQIIAFCTGHGLFSPTKSNWTVAHLKWLKDLKFNDPVEQEILNEYLSSLTFLSDKIKAMDVRIEELASEKQYCENVKKLRCIKGIETNVALTLLAEIGDFNRFSKPTDFASYLGLIPGEQSSGDKVRGTGITKAGNSTLRRKLTESAKGYWRGRIGIKSATFKKLEKELPKEVTEYALKANTRLQRKFFNMTHVKGKNMNVAASACAREMACFVWGLITNHYDKAPAVPKTDEELLDLN

SEQ ID NO: 1515 - protein, 1272 aa, unidentified
  REGION 1..1272: note = Description of Unknown: uncultivated organism sequence
  REGION 1..1272: note = Category: MG75 effectors
  REGION 1..1272: note = Description: MG75-1 effector
MKFEEFTHLYQRSITIRMGLKPIGNTLEQIKEKHFLEKDEHRANSYKRVKNIIDEYYKDYIEKRLSDFSHSHHSDTDSSWNKLLKEYNGLYHSKRAENTEKSRFAEIQQTLRKEISKALNDKAQSLSGKELIQKDLISFLKTRKDLSKDEINDRLIPLVNEFEKFSTYFTGFSQNRENIFSSKEKSSSASYRLINENLPKFIDNMGTYGKLHSIPEISEMQDKLYEAFKKQIHYLKLGISSIDEMFQLEYFNNVLTQSQIDLYNAIIGGKTEGDLHIDGINQYVNRYNQTHKDERLPKLKTLFKQILSDRASLSAIPEKIENDDQAVKAVTGIYETIEQQVLAEDKLKNMLVSLSDYNLEGIFISNGQQLTQISKNMLGRREFISDAIVKCYQKSLPQKKRENYEDYLNRIRNNVRSIGSFSIADINQYIAKQPNGKDDYPKENPSTTIQDYFAKLDASDHTADIFSRISKAHQALLPALGKQNTGNISSFKDKNTLLLIKNLLDAILDLVHFVKPLLGTGDEIGKDERFYGDFSPLWNELKKFMSVYDMIRNYATQKPYKKDKIKINFENVQLLQGWDQNKEKEYASIILRRDGKYYLAIMDKDSKKLLGKAMPSDGDCYEKMVYKFIPDAKKMFPKVFLSKKGQETFKPTPLLIDNYNRGTHKKGKNFNLKDCHDLIDYFKHSIGMHEDWGKFGFNFSDTSSYEDISEFYNEVNQQSYKLTFTKVSVHFIDKLVDEGKMYMFQIYNKDFSEYSKGTPNIHTLYWKALFDERNLADVVYKLNGKAELFYRKKSIGHTHPTHPANQPIKNKSKDNEKAESTFGYDLIKDRRYTVDMFQFHVPITMNFKCGEKEKINLQVAEYLHTADDIHIIGVDRGERNLLYLVVIDIHGNIKEQFTLNDIVNEHNGNTYHTNYHDLLGEREEERIKARQSWQAIENIKELKEGYLSQVIHKITQLMMKYHAIVVLEDLNFGFKRSRQKVEKSVYQKFEKQLINKLQFLVNKQQSDPQAPGGVFNAYQLADKFESFQKLGKQSGFIFYIPAWNTSNIDPVTGFVNLFDTHYANVEKSKEFFKKFDTIRYNAEKDWFEFSFDYNHFTKKAEGSRTNWTLYTYGTRIKTFRNDKRNNEWDNEEMNLTDSFKTFFADNYVDINSNLQEAITNQNDKGFFVKLFELFKLLLQMRNSKIKSDVDFLLSPVADENGVFFDSRKYKGSRKCSGVVLPENADANGAFNIARKGLMLVRQMRIAKDEPFKPDLSNRQWLKFAQDKPYLND

SEQ ID NO: 1516 - protein, 1245 aa, unidentified
  REGION 1..1245: note = Description of Unknown: uncultivated organism sequence
  REGION 1..1245: note = Category: MG75 effectors
  REGION 1..1245: note = Description: MG75-2 effector
METFSGFTNLYPLSKTLRFRLIPVGETLKHFIDSGILEEDQHRAESYVKVKAIIDDYHRAYIENSLSGFELPLESTGKFNSLEEYYLYHNIRNKTEEIQNLSSKVRTNLRKQVVAQLTKNEIFKRIDKKELIQSDLIDFVKNEPDANEKIALISEFRNFTVYFKGFHENRRNMYSDEEKSTSIAFRLIHENLPKFIDNMEVFAKIQNTSISENFDAIQKELCPELVTLCEMFKLGYFNKTLSQKQIDAYNTVIGGKTTSEGKKIKGLNEYINLYNQQHKQEKLPKMKLLFKQILSDRESASWLPEKFENDSQVVGAIVNFWNTIHDTVLAEGGLKTIIASLGSYGLEGIFLKNDLQLTDISQKATGSWGKISSEIKQKIEVMNPQKKKESYETYQERIDKIFKSYKSFSLAFINECLRGEYKIEDYFLKLGAVNSSSLQKENHFSHILNTYTDVKEVIGLYSESTDTKLIQDNDSIQKIKQFLDAVKDLQAYVKPLLGNGDETGKDERFYGDLIEYWSLLDLITPLYNMVRNYVTQKPYSVDKIKINFQNPTLLNGWDLNKETDNTSVILRRDGKYYLAIMNNKSRKVFLKYPSGTDRNCYEKMEYKLLPGANKMLPKVFFSKSRINEFMPNERLLSNYEKGTHKKSGTCFSLDDCHTLIDFFKKSLDKHEDWKNFGFKFSDTSTYEDMSGFYKEVENQGYKLSFKPIDATYVDQLVDEGKIFLFQIYNKDFSEHSKGTPNMHTLYWKMLFDETNLGDVVYKLNGEAEVFFRKASINVSHPTHPANIPIKKKNLKHKDEERILKYDLIKDKRYTVDQFQFHVPITMNFKADGNGNINQKAIDYLRSASDTHIIGIDRGERNLLYLVVIDGNGKICEQFSLNEIEVEYNGEKYSTNYHDLLNVKENERKQARQSWQSIANIKDLKEGYLSQVIHKISELMVKYNAIVVLEDLNAGFMRGRQKVEKQVYQKFEKKLIEKLNYLVFKKQSSDLPGGLMHAYQLANKFESFNTLGKQSGFLFYIPAWNTSKMDPVTGFVNLFDVKYESVDKAKSFFSKFDSIRYNVERDMFEWKFNYGEFTKKAEGTKTDWTVCSYGNRIITFRNPDKNSQWDNKEINLTENIKLLFERFGIDLSSNLKDEIMQRTEKEFFIELISLFKLVLQMRNSWTGTDIDYLVSPVCNENGEFFDSRNVDETLPQNADANGAYNIARKGMILLDKIKKSNGEKKLALSITNREWLSFAQGCCKNG

SEQ ID NO: 1517 - protein, 1254 aa, unidentified
  REGION 1..1254: note = Description of Unknown: uncultivated organism sequence
  REGION 1..1254: note = Category: MG75 effectors
  REGION 1..1254: note = Description: MG75-3 effector
MRFEDFTGLYPVSKTLRFEARPVGNTLKYLIKSGLLEQDTHRADSYQKVKKLIDEYHKAFIDSVMSGFMFSNETLEEYFVLYANKSVDEESRNKYVELQKKMRESVSNALKGDERFKNIDKKELIKEDLYAFVRKADESQLAGLTLEQAEELLLEFKDFTTYFGGFHQNRANMYVPDEKSTSIAYRLVNENLPRFVDNIYVFKKIYSIPELRDNVKTVYDAFKEHLNVVELSDIFDVTFYSEVLTQKHIDLYNSIIGGRTDKESSKKIQGLNEYINLYNQTHKDEKLPKFKVLYKQILSDRVAVSWLPEAFSNDNETLCAIRDCYSGLEEHILGEKDLKILLESLDKYDLCGVFISNNKQLLSEISQKLYGNWGTIENAVRRHFEEVSPQRGKKETEEKYRERIAKSTKRYESFSIADLNEWVKQSNPDEARRIEDYFTSLGVVNSEDEQKEDLFRRVENAYTDVTDLLSSDYPEGKKLAQDSKAVEKIKNLLDAIKELQWFVKPLNGSGDENNKDERFYGEFSMLWAELDSFSLLYDKVRNYMTRKPYSQDKIKLNFANATLLKGWDRNKEVDNACVILRRNGLYYLGIMDKEHRRSFEGNYPCNGDVYEKMVYKLLPDPKKMLPKVFFSESREKDFNPTDSIRQLYKGNTYKAGPQFKIEDCRELIDFYKKSISLHEDWKNFGFQFSDTSTYEDLNGFFREVEQQGYKMTFKNVSVSYVEKLVDEGKLYLFQLYNKDFSAYSKGTPNIHTLYWKAVFDEKNLLNVVYKLNGEAELFFRKKSINITNPTHPANVSVANKNKLNQKRESVFDYDLVKDRRYTVDKFLFHVPITMNFKSKGKPQIEQQVRSYLHSAENTHIIGIDRGERHLLYVSVIDSYGNIKEQFSLNEIVNENAGNIYVTDYHALLDTKEAERKEARQSWQTIENIKELKEGYLSQAVHKVTQLMIKYNAIVVLEDLNMGFMRGRQKVEKQVYQKFEKMLIDKLNYMVDKKICVDEPGGIFHAYQLASKFESFTKLGKQSGFLFYIPAWNTSKIDPVTGFVNLFDLRYESIERTKLFFSKFKFVRYNQSSDWFEFAFDYNDFTDKATGTRTEWNITTHGTRIITFRNPEKNSQWDSREVVLTDEFKVLFSKYSIALNGNLKESIAIQTDRLFFETLLNCFKLTLQMRNSITGTDIDYLISPVADENGVFYDSRNCSNSLPKNADANGAYNIARKGLMLIDQIKHSDDFKTVKFDITNKAWLEFAQKKPYLND

SEQ ID NO: 1518 - protein, 1245 aa, unidentified
  REGION 1..1245: note = Description of Unknown: uncultivated organism sequence
  REGION 1..1245: note = Category: MG75 effectors
  REGION 1..1245: note = Description: MG75-4 effector
METFSGFTNLYPLSKTLRFRLIPVGETLKYFIGSGILEEDQHRAESYVKVKAIIDDYHRAYIENSLSGFELPLESTGKFNSLEEYYLYHNIRNKTEEIQNLSSKVRTNLRKQVVAQLTKNEIFKRIDKKELIQSDLIDFVKNEPDANEKIALISEFRNFTVYFKGFHENRRNMYSDEEKSTSIAFRLIHENLPKFIDNMEVFAKIQNTSISENFDAIQKELCPELVTLCEMFKLGYFNKTLSQKQIDAYNTVIGGKTTSEGKKIKGLNEYINLYNQQHKQEKLPKMKLLFKQILSDRESASWLPEKFENDSQVVGAIVNFWNTIHDTVLAEGGLKTIIASLGSYGLEGIFLKNDLQLTDISQKATGSWGKISSEIKQKIEVMNPQKKKESYETYQERIDKIFKSYKSFSLAFINECLRGEYKIEDYFLKLGAVNSSSLQKENHFSHILNTYTDVKEVIGLYSESTDTKLIQDNDSIQKIKQFLDAVKDLQAYVKPLLGNGDETGKDERFYGDLIEYWSLLDLITPLYNMVRNYVTQKPYSVDKIKINFQNPTLLNGWDLNKETDNTSVILRRDGKYYLAIMNNKSRKVFLKYPSGTDRNCYEKMEYKLLPGANKMLPKVFFSKSRINEFMPNERLLSNYEKGTHKKSGTCFSLDDCHTLIDFFKKSLDKHEDWKNFGFKFSDTSTYEDMSGFYKEVENQGYKLSFKPIDATYVDQLVDEGKIFLFQIYNKDFSEHSKGTPNMHTLYWKMLFDETNLGDVVYKLNGEAEVFFRKASINVSHPTHPANIPIKKKNLKHKDEERILKYDLIKDKRYTVDQFQFHVPITMNFKADGNGNINQKAIDYLRSASDTHIIGIDRGERNLLYLVVIDGNGKICEQFSLNEIEVEYNGEKYSTNYHDLLNVKENERKQARQSWQSIANIKDLKEGYLSQVIHKISELMVKYNAIVVLEDLNAGFMRGRQKVEKQVYQKFEKKLIEKLNYLVFKKQSSDLPGGLMHAYQLANKFESFNTLGKQSGFLFYIPAWNTSKMDPVTGFVNLFDVKYESVDKAKSFFSKFDSIRYNVERDMFEWKFNYGEFTKKAEGTKTDWTVCSYGNRIITFRNPDKNSQWDNKEINLTENIKLLFERFGIDLSSNLKDEIMQRTEKEFFIELISLFKLVLQMRNSWTGTDIDYLVSPVCNENGEFFDSRNVDETLPQNADANGAYNIARKGMILLDKIKKSNGEKKLALSITNREWLSFAQGCCKNG

SEQ ID NO: 1519 - protein, 1245 aa, unidentified
  REGION 1..1245: note = Description of Unknown: uncultivated organism sequence
  REGION 1..1245: note = Category: MG75 effectors
  REGION 1..1245: note = Description: MG75-5 effector
METFSGFTNLYPLSKTLRFRLIPVGETLKHFIDSGILEEDQHRAESYVKVKAIIDDYHRAYIENSLSGFELPLESTGKFNSLEEYYLYHNIRNKTEEIQNLSSKVRTNLRKQVVVQLTKNEIFKRIDKKELIQSDLIDFVKNEPDANEKIALISEFRNFTVYFKGFHENRRNMYSDEEKSTSIAFRLIHENLPKFIDNMEVFAKIQNTSISENFDAIQKELCPELVTLCEMFKLGYFNKTLSQKQIDAYNTVIGGKTTSEGKKIKGLNEYINLYNQQHKQEKLPKMKLLFKQILSDRESASWLPEKFENDSQVVGAMVNFWNTIHDTVLAEGGLKTIIASLGSYGLEGIFLKNDLQLTDISQKATGSWSKISSEIKQKIEVMNPQKKKESYESYQERIDKLFKSYKSFSLAFINECLRGEYKIEDYFLKLGAVNSSSLQKENHFSHILNAYTDVKEAIGFYSESTDTKLIQDNDSIQKIKQFLDAVKDLQAYVKPLLGNGDETGKDERFYGDLIEYWSLLDLITPLYNMVRNYVTQKPYSVDKIKINFQNPTLLNGWDLNKETDNTSVILRRDGKYYLAIMNNKSRKVFLKYPSGTDGNCYEKMEYKLLPGANKMLPKVFFSKSRINEFMPNERLLSNYEKGTHKKSGICFSLDDCHTLIDFFKKSLDKHEDWKNFGFKFSDTSTYEDMSGFYKEVENQGYKLSFKPIDATYVDQLVDEGKIFLFQIYNKDFSEHSKGTPNMHTLYWKMLFDETNLGDVVYKLNGEAEVFFRKASINVSHPTHPANIPIKKKNLKHKDEERILKYDLIKDKRYTVDQFQFHVPITMNFKADGNGNINQKAIDYLCSASDTHIIGIDRGERNLLYLVVIDGNGKICEQFSLNEIEVEYNGEKYSTNYHDLLNVKENERKQARQSWQSIANIKDLKEGYLSQVIHKISELMVKYNAIVVLEDLNAGFMRGRQKVEKQVYQKFEKKLIEKLNYLVFKKQSSDLPGGLMHAYQLANKFESFNALGKQSGFLFYIPAWNTSKMDPVTGFVNLFDVKYESVDKAKSFFSKFDSMRYNVERDMFEWKFNYGEFTKKAEGTKTDWTVCSYGNRIITFRNPDKNSQWDNKEINLTENIKLLFERFGIDLSSNLKDEIMQRTEKEFFIELISLFKLVLQMRNSWTGTDIDYLVSPVCNENGEFFDSRNVDETLPQNADANGAYNIARKGMILLDKIKKSNGEKKLALSITNREWLSFAQGCCKNG

SEQ ID NO: 1520 - protein, 1245 aa, unidentified
  REGION 1..1245: note = Description of Unknown: uncultivated organism sequence
  REGION 1..1245: note = Category: MG75 effectors
  REGION 1..1245: note = Description: MG75-6 effector
METFSGFTNLYPLSKTLRFRLIPVGETLKHFIGSGILEEDQHRAESYVKVKAIIDDYHRAYIENSLSGFELPLESTGKFNSLEEYYLYHNIRNKTEEIQNLSSKVRTNLRKQVVTQLTKNEIFKRIDKKELIQSDLIDFVKNEPDANEKIALISEFRNFTVYFKGFHENRRNMYSDEEKSTSIAFRLIHENLPKFIDNMEVFAKIKNTSISENFEAIQKELCPELVTLCEMFKLGYFNKTLSQKQIDAYNTVIGGKTTSEGKKIKGLNEYINLYNQQHKQEKLPKMKLLFKQILSDRESASWLPEKFENDSQVVGAMVNFWNTIHDTVLAEGGLKTIIVSLGSYGLEGIFLKNDLQLTDISQKATGSWSKISSEIKQKIEVMNPQKKKESYESYQERIDKLFKSYKSFSLAFINECLRGEYKIEDYFLKLGAVNSSSLQKENHFSHILNTYTDVKEVIGFYSESTDTKLIQDNDSIQKIKQFLDAVKDLQAYVKPLLGNGDETGKDERFYGDLIEYWSQLDLITPLYNMVRNYVTQKPYSVDKIKINFQNPTLLNGWDLNKEMDNTSVILRRDGKYYLAIMNNKSRKVFLKYPSGTDRNCYEKMEYKLLPGANKMLPKVFFSKSRINEFMPNERLLSNYEKGTHKKSGTCFSLDDCHTLIDFFKKSLNKHEDWKNFGFKFSDTSTYEDMSGFYKEVENQGYKLSFKPIDATYVDQLVDEGKIFLFQIYNKDFSEHSKGTPNMHTLYWKMLFDETNLGDVVYKLNGEAEVFFRKASINVSHPTHPANIPIKKKNLKHKDEERILKYDLIKDKRYTVDQFQFHVPITMNFKADGNGNINQKAIDYLCSASDTHIIGIDRGERNLLYLVVIDGNGKICEQFSLNEIEVEYNGEKYSTNYHDLLNVKENERKQARQSWQSIANIKDLKEGYLSQVIHKISELMVKYNAIVVLEDLNAGFMRGRQKVEKQVYQKFEKKLIEKLNYLVFKKQSSDLPGGLMHAYQLANKFESFNALGKQSGFLFYIPAWNTSKMDPVTGFVNLFDVKYESVDKAKSFFSKFDSMRYNVERDMFEWKFNYGEFTKKAEGTKTDWTVCSYGNRIITFRNPDKNSQWDNKEINLTENIKLLFERFGIDLSSNLKDEIMQRTEKEFFIELISLFKLVLQMRNSWTGTDIDYLVSPVCNENGEFFDSRNVDETLPQNADANGAYNIARKGMILLDKIKKNNGEKKLALSITNREWLSFAQGCCKNG

SEQ ID NO: 1521 - protein, 1236 aa, unidentified
  REGION 1..1236: note = Description of Unknown: uncultivated organism sequence
  REGION 1..1236: note = Category: MG75 effectors
  REGION 1..1236: note = Description: MG75-7 effector
METFSGFTNLYPLSKTLRFRLIPVGETLKHFIDSGILEEDQHRAESYVKVKAIIDDYHRAYIENSLSGFELPLESTGKFNSLEEYYLYHNIRNKTEKNQKSLSTVRFNLRKQMVKQLTKNELYKRIYKQNLIKKDLIDFVKNEPDANEKIALISEFRNFTVYFKGFHENRRNMYLDEEKSTSIAFRLIHENLPKFIDNMEVFAKIQNTSISENFDVIQKELCPELVTLCEMFKLGYFNKTLSQKQINAYNTVIGELNKYLNHYNQQHKQEKLPKMKLLFKQILSDRESTSWLPERFANDGQVVGAMVNFWNTIHDTVLAEGGLKTIIASLGSYGLEGIFLKNDLQLTDISQKATGSWSKISSEIKQKIEVMNPQKKKESYESYQERIDKLFKSYKSFSLAFINECLRGEYKIEDYFLKLGAVNSSSLQKENHFSHILNTYTDVKEVIGFYSESTDTKLIRDNGSIQKIKLFLDAVKDLQAYVKPLLGNGDETGKDERFYGDLIEYWSLLDLITPLYNMVRNYVTQKPYSVDKIKLNFRNPTLLDGWDLNRETANTSVILRRDGKYYLAIMNNKSRKVFLKYPSGTGKDCYEKMEYKLIPGAYKMLPKAFFSKSKINKFMPDEHLLSNYKKGTHKKNNANFDLDDCHTLIDFFKKSLNKHEDWKNFDFKFSDTSTYTDINNFYKEIDNQAYKLSFRPVPSDFVDKLVEEGKIFLFWIYNKDFSGHSKGTPNMHTLYWRMLFDERNLEDVVYSLNGGAEVFFRKASINVSHPTHPANIPIKKKNLKHKDEERILKYDLIKDKRYTIDQFQFHVPITMNFKVAGNGNININQKAIDYLRSASDTHIIGIDRGERNLLYLVVIDGNGKICEQFSLNEIEVEYNGEKYSTNYHDLLNVKENERKQARQSWQSIANIKDLKEGYLSQVIYKISELIVKYNAIVVLEDLNAGFMRGRQKVEKQVYQKFEKKLIEKLNYLVFKKQSSDLPGGLMHAYQLANKFESFNTLGKQSGFLFYIPAWNTSKMDPVTGFVNLFDVKYESVDKAKSFFSKFDSIRYNVERDMFEWKFNYGEFTKKAEGAKTDWTVCSYGNRIITFRNPDKNSQWDNKEINLTENVKLLFERFGIDLSSNLKDEIMERTEKEFFIELISLFKLVLQMRNSWTGTDIDYLVSPVCNENGEFFDSRNVDETLPQNADANGAYNIARKGMILLDKIKKNNGEKKLALSITNREWLSFAQGCCKNG

SEQ ID NO: 1522 - protein, 1248 aa, unidentified
  REGION 1..1248: note = Description of Unknown: uncultivated organism sequence
  REGION 1..1248: note = Category: MG75 effectors
  REGION 1..1248: note = Description: MG75-8 effector
METFSGFTNLYPLSKTLRFRLIPVGETLKHFIDSGILEEDQHRAESYVKVKAIIDDYHRAYIENSLSGFELPLESTGKFNSLEEYYLYHNIRNKTEEIQNLSSKVRTNLRKQVVTQLTKNEIFKRIDKKELIQSDLIDFVKNEPDANEKIALISEFRNFTVYFKGFHENRRNMYSDEEKSTSIAFRLIHENLPKFIDNMEVFAKIQNTSISENFDAIQKELCTELVTLCEMFKLGYFNKTLSQKQIDAYNTVIGGKTTSEGKKIKGLNEYINLYNQQHKQEKLPKMKLLFKQILSDRESASWLPEKFENDSQVVGAMVNFWNTIHDTVLAEGGLKTIIASLGSYGLEGIFLKNDLQLTDISQKATGSWSKISSEIKQKIEVMNPQKKKESYESYQERIDKLFKSYKSFSLAFINECLRGEYKIEDYFLKLGAVNSSSLQKENHFSHILNTYTDVKEVIGFYSESTDTKLIRDNGSIQKIKLFLDAVKDLQAYVKPLLGNGDETGKDERFYGDLIEYWSLLDLITPLYNMVRNYVTQKPYSVDKIKLNFRNPTLLDGWDLNRETANTSVILRRDGKYYLAIMNNKSRKVFLKYPLGTGKDCYEKMEYKLIPGAYKMLPKAFFAKSKINKFMPDEHLLSNYKKGTHKKNNANFDLDDCHTLIDFFKKSLNKHEDWKNFDFKFSDTSTYTDINNFYKEIDNQAYKLSFRPVPSDFVDKLVEEGKIFLFWIYNKDFSGHSKGTPNMHTLYWRMLFDERNLEDVVYSLNGGAEVFFRKASINVSHPTHPANIPIKKKNLKHKDEERILKYDLIKDKRYTVDQFQFHVPITMNFKADGNGNINQKAIDYLCSASDTHIIGIDRGERNLLYLVVIDGNGKICEQFSLNEIEVEYNGENYSTNYHDLLNVKENERKQARQSWQSIANIKDLKEGYLSQVIHKISELMVKYNAIVVLEDLNAGFMRGRQKVEKQVYQKFEKKLIEKLNYLVFKKQSSDLPGGLMHAYQLANKFESFNTLGKQSGFLFYIPAWNTSKMDPVTGFVNLFDVKYESVDKAKSFFSKFDSMRYNVERDMFEWKFNYGEFTKKAEGTKTDWTVCSYGNRIITFRNPDKNSQWDNKEINLTENIKLLFERFGIDLSSNLKDEIMQRTEKEFFIELISLFKLVLQMRNSWTGTDIDYLVSPVCNENGEFFDSRNVDETLPQNADANGAYNIARKGMILLDKIKKSNGEKKLALSITNREWLSFAQGCCKKWMIT

SEQ ID NO: 1523 - protein, 1250 aa, unidentified
  REGION 1..1250: note = Description of Unknown: uncultivated organism sequence
  REGION 1..1250: note = Category: MG75 effectors
  REGION 1..1250: note = Description: MG75-9 effector
MKTLSDFTNLFPLSKTLRFKLIPIGNTLKNIEASGILDEDRHRAESYVKVKAIIDEYHKAFIDRVLSDTCLQTESIGKHNSLEEFFFYYQIGAKSEQQKKTFKKIQDALRKQIADSLTKDKHFSRIDKKELIQEDLIQFVRDGEDAAEKTSLISEFQNFTVYFTGFHENRQNMYSPDEKSTAIAYRLINENLPKFVDNMKVFDRIAASELASCFDELYHNFEEYLQVERLHDIFSLDYFNLLLTQKHIDVYNALIGGKATETGEKIKGLNEYINLYNQRHKQEKLPKFKMLFKQILTDREAISWLPRQFDDNSQLLSAIEQCYNHLSTYTLKDGSLKYLLENLHTYDTEKIFIRNDSLLTEISQRHYGSWSILPEAIKRHLERANPQKRRETYEAYQSRIEKAFKAYPGFSIAFLNGCLTETGKESPSIESYFESLGAVETETSQQENWFARIANAYTDFREMQNRLHATDVPLAQDAEAVARIKKLLDALKGLQLFIKPLLDTGEEAEKDERFYGDFTEFWNELDTITPLYNMVRNYLTRKPYSEEKIKLNFQNPTLLNGWDLNKEVDNTSVILRRNGRYYLAIMHRNHRRVFSQYPGTERGDCYEKMEYKLLPGANKMLPKVFFSKSRIDEFNPSEELLARYQQGTHKKGENFNLHDCHALIDFFKDSIEKHEEWRNFHFKFSDTSSYTDMSGFYREIETQGYKLSFVPVACEYIDELVRDGKIFLFQIYNKDFSTYSKGKPNMHTLYWEMLFDERNLMNVVYKLNGQAEIFFRKASLSARHPEHPAGLPIKKKQAPTEESCFPYDLIKNKRYTVDQFQFHVPITINFKATGTSNINPSVTDYIRTADDLHIIGIDRGERHLLYLVVIDSQGRICEQFSLNEIVTQYQGHQYRTDYHALLQKKEDERQKARQSWQSIENIKELKEGYLSQVVHKVSELMIKYKAIVVLEDLNAGFKRSRQKVEKQVYQKFEKMLIDKLNYLVFKTAEADQPGGLLHAYQLTNKFESFKKMGKQSGFLFYIPAWNTSKIDPTTGFVNLFDTRYENVDKSRAFFGKFDSIRYRADKGTFEWTFDYNNFHKKAEGTRSSWCLSSHGNRVRTFRNPAKNNQWDNEEIDLTQAFRDLFEAWGIEITSNLKEAICNQSEKKFFSELFELFKLMIQLRNSVTGTNIDYMVSPVENHYGTFFDSRTCDSSLPANADANGAYNIARKGLMLARRIQATPENDPISLTLSNKEWLRFAQGLDETTTYE

SEQ ID NO: 1524 - protein, 1246 aa, unidentified
  REGION 1..1246: note = Description of Unknown: uncultivated organism sequence
  REGION 1..1246: note = Category: MG75 effectors
  REGION 1..1246: note = Description: MG75-10 effector
MMETFSDFTNLYPLSKTLRFRLIPVGETLRHFIDSGILEEDQHRAESYVKVKAIIDDYHRTYIENSLSGFELPVESTGKANSLEEYYLYHNIRNKTEDIQNALSKVRNNLRKQIVTQLTKNEMFKRIDKKELIQTDLIDFVKNDPDANEKIALISEFRNFTVYFKGFHENRKNMYSDEEKSTSIAFRLIHENLPKFIDNMEVFAKIQNTSISENFEAIQKDLCPETIAFADMFKLGYFNKTLSQKQIDAYNTVISGRTTAEGEKIKGLNEYINLYNQQHKQEKLPKMKLLFKQILSDRESASWLPEKLENDKQVVGALVDFWNAIHDTVLAEGGLKTVISSLVSYSLEGIFLKNDLQLTDVSQKATGSWSKIPAAIKQKLEAMNPQKKKESYEGYQERIDKIFKSYKSFSLAFINECLHGEYKIEDYFIKLGAINTDLLQKENHFSHILNTYTDIKEMIESYFESTDTKLIRDNGSIQKIKQFLDAVKDLQVYVKPLLGNGDETGKDERFYGDFVEYWNLLDLITPLYNMVRNYVTQKPYSIEKIKINFQNPTLLNGWDLNKETDNTSVILRRDGKYYLAIMNSKFRKVFLKYPSGSDRNCYEKMEYKLLPGANKMLPKVFFSKSRIQEFMPDERLLSNYEKGTHKKTGNCFSLTDCHALIDFFKKSLNKHEDWKNFGFKFSDTSTYTDMSGFYKEVENQGYKLSFKPIDAVYVDQLVDEGKIFLFQIYNKDFSGHSKGTPNMHTLYWKMLFDETNLGDVVYKLNGEAEVFFRKASIKVSSPTHPANVPIKKKNPKHKDEERILKYDLIKDKRYTVDQFQFHVPITMNFKSDGNGNINQKVIEYLRSASNIHIMGIDRGERNLLYLVVIDGSGNICEQFSLNEIKVEHNGETYSTNYHDLLDIKENERKQARQSWQSIANIKELKEGYLSQVIHKISELMVKYNAIVVLEDLNTGFMRGRQKVEKQVYQKFEKMLIEKLNYLVFKKQPSNLCGGLMHAYQLTNKFEGFNKLGKQSGFLFYIPTWNTSKMDPVTGFVNLFDLKYESIDKAKSFFSKFDSIRYNEERDMFEWKFNYDEFTKKAEGTKTNWTVCSYGNRIITFRNPNKNSQWDNKEINLTENIKLLFERFGIDLSSNLKDEIMQRTEKEFFIELISLFKLVLQMRNSWTGTDIDYLVSPVCNEKGEFFDSRNVDKALPQNADANGAYNIARKGLILLDRIKESTSDKKLNFSITNKEWLSFAQGCCKNG

SEQ ID NO: 1525 - protein, 1319 aa, unidentified
  REGION 1..1319: note = Description of Unknown: uncultivated organism sequence
  REGION 1..1319: note = Category: MG75 effectors
  REGION 1..1319: note = Description: MG75-11 effector
MAKNFEDFKRLYPLSKTLRFEAKPIGATLDNIVKSGLLDEDEHRAASYVKVKKLIDEYHKVFIDRVLDNGCLPLKNEGHNNSLTEYYDSYVSKSQNEDAKKAFEENQQNLRSIIAKKLTEDKAYANLFGKNLIESYKDKEDKTKIIDSDLIKFINTAESTQLDSMSQDEVKELVKEFWGFITYFYGFFDNRKNMYTSEEKSTGIAYRLINENLPKFIDNMEAFNTAITRPEIQANMDELYSNFSEYLNVESIQEMFQLDYYNMLLTQKQIDVYNAIIGGKTDDEHDVKIKGINEYINLYNQQHKDDKLPKLKALFKQILSDRNAISWLPEEFNSDQEVLNAIKDCYERLAENVLGDKVLKSLLGSLADYSLDGIFIRNDLQLTDISQKMFGNWGVIQNAIMQNIKRVAPARKHKESEEDYEKRIAGIFKKADSFSISYINDCLNEADPNNAYFVENYFATFGAVNTPTMQRENLFALVQNAYTEVAALLHSDYPTVKHLAQDKANVSKIKALLDAIKSLQHFVKPLLGKGDESDKDERFYGELASLWAELDTVTPLYNMIRNYMTRKPYSQKKIKLNFENPQLLGGWDANKEKDYATIILRRNGLYYLAIMDKDSKNLLGKAMPSDGECYEKMVYKQFDISKQLPKCTTELKHVRKALVEDAKRSCLLSDFNNWNKPLNVTRKLWELNNFVWDKKREDWVLRKKDNETRPKKFHKKYLELTSDKKGYNQAKNDWIKFTKEFLSSYKKVEAYDIHYKKRYNSVDELYKQLNGDLYAISFTYVSVSFIEQLVSEGKMYLFQIYNKDFSEYSKGTPNMHTLYWKALFDERNLADVVYKLNGQAEMFYRKKSIENTHPTHPANHPILNKNKDNKKKESLFEYDLIKDRRYTVDKFMFHVPITMNFKSSGSENINQDVKAYLRHADDMHIIGIDRGERHLLYLVVIDLQGNIKEQFSLNEIVNDYNGNTYHTNYHDLLDVREDERLKARQSWQTIENIKELKEGYLSQVIHKITQLMVKYHAIVVLEDLNMGFMRGRQKVEKQVYQKFEKMLIEKLNYLVDKKADASVSGGLLNAYQLTSKFDSFQKLGKQSGFLFYIPAWNTSKIDPVTGFVNLLDTRYQNVEKAKVFFSKFDAIRYNKDKDWFEFNLDYDKFGKKAEGTRTKWTLCTRGMRIDTFRNKEKNSQWDNQEVDLTAEMKSLLEHYYIDIHGNLKDAISAQTDKAFFMGLLHILKLTLQMRNSITGTETDYLVSPVADENGIFYDSRSCGDELPENADANGAYNIARKGLMMIEQIKEAKDLDNLKFDISNKSWLNFAQQKPYKNG

SEQ ID NO: 1526 - protein, 1245 aa, unidentified
  REGION 1..1245: note = Description of Unknown: uncultivated organism sequence
  REGION 1..1245: note = Category: MG75 effectors
  REGION 1..1245: note = Description: MG75-12 effector
METFSGFTNLYPLSKTLRFRLIPVGETLKHFIDSGILEEDQHRAESYVKVKAIIDDYHRAYIENSLSGFELPLESTGKFNSLEEYYLYHNIRNKTEEIQNLSSKVRTNLRKQVVVQLTKNEIFKRIDKKELIQSDLIDFVKNEPDANEKIALISEFRNFTVYFKGFHENRRNMYSDEEKSTSIAFRLIHENLPKFIDNMEVFAKIQNTSISENFDAIQKELCPELVTLCEMFKLGYFNKTLSQKQIDAYNTVIGGKTTSEGKKIKGLNEYINLYNQQHKQEKLPKMKLLFKQILSDRESASWLPEKFENDSQVVGAMVNFWNTIHDTVLAEGGLKTIIASLGSYGLEGIFLKNDLQLTDISQKATGSWSKISSEIKQKIEVMNPQKKKESYESYQERIDKLFKSYKSFSLAFINECLRGEYKIEDYFLKLGAVNSSSLQKENHFSHILNTYTDVKEVIGFYSESTDTKLIQDNDSIQKIKLFLDAVKDLQAYVKPLLGNGDETGKDERFYGDLIEYWSLLDLITPLYNMVRNYVTQKPYSIDKIKINFQNPTLLNGWDLNKETDNTSVILRRDGKYYLAIMNNKSRKVFLKYPSGTDRNCYEKMEYKLLPGANKMLPKVFFSKSRINEFMPNERLLSNYEKGTHKKSGTCFSLDDCHTLIDFFKKSLDKHEDWKNFGFKFSDTSTYEDMSGFYKEVENQGYKLSFKPIDATYVDQLVDEGKIFLFQIYNKDFSEHSKGTPNMHTLYWKMLFDETNLGDVVYKLNGEAEVFFRKASINVSHPTHPANIPIKKKNLKHKDEERILKYDLIKDKRYTVDQFQFHVPITMNFKADGNGNINQKAIDYLRSASDTHIIGIDRGERNLLYLVVIDGNGKICEQFSLNEIEVEYNGEKYSTNYHDLLNVKENERKQARQSWQSIANIKDLKEGYLSQVIHKISELMVKYNAIVVLEDLNAGFMRGRQKVEKQVYQKFEKKLIEKLNYLVFKKQSFDLPGGLMHAYQLANKFESFNALGKQSGFLFYIPAWNTSKMDPVTGFVNLFDVKYESVDKAKSFFSKFDSIRYNVERDMFEWKFNYGEFTKKAEGTKTDWTVCSYGNRIITFRNPDKNSQWDNKEINLTENIKLLFERFGIDLSSNLKDEIMQRTEKEFFIELISLFKLVLQMRNSWTGTDIDYLVSPVCNENGEFFDSRNVDETLPQNADANGAYNIARKGMILLDKIKKSNGEKKLALSITNREWLSFAQGCCKNG

SEQ ID NO: 1527 - protein, 1275 aa, unidentified
  REGION 1..1275: note = Description of Unknown: uncultivated organism sequence
  REGION 1..1275: note = Category: MG75 effectors
  REGION 1..1275: note = Description: MG75-13 effector
MAKNFEDFKRLYSLSKTLRFEAKPIGATLDNIVKSGLLDEDEHRAASYVKVKKLIDEYHKVFIDRVLANGCLPLKNEGHNNSLTEYYDNYVSKSQNEDAKKTFEENQQNLRSIIAKKLTEDKAYANLFGKNLLESYKDKTDKTKIIDSDLFKFINTAESTQLDSMSQDEAKELVKEFWGFITYFYGFFDNRKNMYTSEDKSTGIAYRLINENLPKFIDNMEAFNTAVTRPEIQANMDELYSNFSEYLNVESIQEMFQLDYYNMLLTQKQIDVYNAIIGGKTDDEHDVKIKGINEYINLYNQKHKDDKLPKLKALFKQILSDRNAISWLPEEFNSDQEVLNAIKDCYERLSENVLGDKVLKSLLGSLADYSLDGIFIRNDLQLTDISQKMFGNWGVIQNAIMQDIKHVAPARKHKESEEDYEKRIAGIFKKADSFSISYINDCLNEADPNNAYFVENYFATLGAVDTPTMQRENLFALVQNAYTEITALLHSDYPTEKNLAQDKANVAKIKALLDAIKSLQHFVKPLLGKGDESDKDERFYGELASLWTELDTVTPLYNMIRNYMTRKPYSQKKIKLNFENPQLLGGWDVNKKKDYATIILRRNGLYYLAIMNKDSKKLLGKAMPSDGECYEKMVYKLLPGANKMLPKVFFAKSRMEDFKPSKELVEKYNNGTHKKGKNFNIQDCHNLIDYFKQSIDKHEDWSKFGFKFSDTSTYEDFSGFYREVEQQGYKLSFARVSVSYINQLVEEGKMYLFQIYNKDFSEYSKGTPNMYTLYWKALFDERNLADVVYKLNGQAEMFYRKKSIENTHPTHPANHPILNKNKDNKKKESLFDYDLIKDRRYTVDKFMFHVPITMNFKSVGSENINQDVKAYLRHADDMHIIGIDRGERHLLYLVVIDLQGNIKEQYSLNEIVNEYNGNTYHTNYHDLLDVREEERLKARQSWQTIENIKELKEGYLSQVIHKITQLMVGYHAIVVLEDLSKGFMRSRQKVEKQVYQKFEKMLIDKLNYLVDKKTDVSTPGGLLNAYQLTCKSDSSQKLGKQSGFLFYIPAWNTSKIDPVTGFVNLLDTHSLNSKEKIKAFFSKFDAIRYNKDKKWFEFNLDYDKFGKKAEDTRTKWTLCTRGMRIGTFRNKEKNSQWDNQEVDLTTEMKSLLEHYYIDIHGNLKDAISTQTDKAFFTGLLHILKLTLQMRNSITGTETDYLVSPVADENGIFYDSRSCGDQLPENADANGAYNIARKGLMLIEQIKNAEDLNNVKFDISNKAWLNFAQQKPYKNG

SEQ ID NO: 1528 - protein, 1245 aa, unidentified
  REGION 1..1245: note = Description of Unknown: uncultivated organism sequence
  REGION 1..1245: note = Category: MG75 effectors
  REGION 1..1245: note = Description: MG75-14 effector
METFSGFTNLYPLSKTLRFRLIPVGETLKYFIGSGILEEDQHRAESYVKVKAIIDDYHRAYIENSLSGFELPLECTGKFNSLEEYYLYHNIRNKTEEIQNLSSKVRTNLRKHVVAQLTKNEIFKRIDKKELIQSDLIDFVKNEPDANEKIALISEFRNFTVYFKGFHENRRNMYSDEEKSTSIAFRLIHENLPKFIDNMEVFAKIQNTSISENFDAIQKELCPELVTLCEMFKLGYFNKTLSQKQIDAYNTVIGGKTTSEGKKIKGLNEYINLYNQQHKQEKLPKMKLLFKQILSDRESASWLPEKFENDSQVVGAIVNFWNTIHDTVLAEGGLKTIIASLGSYGLEGIFLKNDLQLTDISQKATGSWGKISSEIKQKIEVMNPQKKKESYETYQERIDKIFKSYKSFSLAFINECLRGEYKIEDYFLKLGAVNSSSLQKENHFSHILNTYTDVKEVIGLYSESTDTKLIQDNDSIQKIKQFLDAVKDLQAYVKPLLGNGDETGKDERFYGDLIEYWSLLDLITPLYNMVRNYVTQKPYSVDKIKINFQNPTLLNGWDLNKETDNTSVILRRDGKYYLAIMNNKSRKVFLKYPSGTDRNCYEKMEYKLLPGANKMLPKVFFSKSRINEFMPNERLLSNYEKGTHKKSGTCFSLDDCHTLIDFFKKSLDKHEDWKNFGFKFSDTSTYEDMSGFYKEVENQGYKLSFKPIDATYVDQLVDEGKIFLFQIYNKDFSEHSKGTPNMHTLYWKMLFDETNLGDVVYKLNGEAEVFFRKASINVSHPTHPANIPIKKKNLKHKDEERILKYDLIKDKRYTVDQFQFHVPITMNFKADGNGNINQKAIDYLRSASDTHIIGIDRGERNLLYLVVIDGNGKICEQFSLNEIEVEYNGEKYSTNYHDLLNVKENERKQARQSWQSIANIKDLKEGYLSQVIHKISELMVKYNAIVMLEDLNAGFMRGRQKVEKQVYQKFEKKLIEKLNYLVFKKQSSDLPGGLMHAYQLANKFESFNTLGKQSGFLFYIPAWNTSKMDPVTGFVNLFDVKYESVDKAKSFFSKFDSIRYNVERDMFEWKFNYGEFTKKAEGTKTDWTVCSYGNRIITFRNPDKNSQWDNKEINLTENIKLLFERFGIDLSSNLKDEIMQRTEKEFFIELISLFKLVLQMRNSWTGTDIDYLVSPVCNENGEFFDSRNVDETLPQNADANGAYNIARKGMILLDKIKKSNGEKKLALSITNREWLSFAQGCCKNG

SEQ ID NO: 1529 - protein, 1302 aa, unidentified
  REGION 1..1302: note = Description of Unknown: uncultivated organism sequence
  REGION 1..1302: note = Category: MG75 effectors
  REGION 1..1302: note = Description: MG75-15 effector
MEFNDFKRLYPLSKTLRFEAKPIGATLKNIIKSGLLEEDEHRAQSYVKVKKLIDEYHKVFIDRVLNEGCLTIENKGKKNSLEEYYESYMSKSNDENVSKTFKEIQENLRSVIAKKLTDDNAYANLFGNKLIESYKDKEEKNKIIDSDLIQFINSAEPSQLDSMSQDEANELVKEFWGFTTYFVGFFDNRKNMYTSEEKSTGIAYRLINENLPKFIDNMEAFKKAVAKPEIQANMEELYSNFAEYLNVESIQEMFQLDYYNMLLTQKQIDVYNAIIGGKTDEEHDVKIKGINEYINLYNQQHKDEKLPKLKALFKQILSDRNAISWLPEEFNSDQEVLNAIKDCYERLSENVLGDKVLKSLLCSLSDYNLNGIFVRNDLQLTDISQKMFGNWSVVQDAIMQNIKNVAPARKRKESEEDYEKRISDIFKKADSFSIQYINDCLNEMDDNNLHAVDGYFATLGAVNTPTMQRENLFALIQNAYTDISDMLDTPYPKNMNLAQDKTNVAKVKALLDAIKSLQHFVKPLLGKGDESDKDERFYGELASLWTELDTVTPLYNMIRNYMTRKPYSEKKIKLNFENPQLLGGWDANKEKDYATIILRRNGMYYLAIMNKDSKRLLGKSMPSDGEYYEKMVYKFFKDVTTMIPKCSTQLKDVQAFFKVNTDDFVLNSKAFNKPLTITKEVFDLNNVLYGKFKKFQKGYLSATGDTAGYTHAVNVWIKFCMDFLNSYESTCMYDFSLLKFESYLSLDAFYQDANLLLYKLSFTNVSVSFIDKLVDEGKMYLFQIYNKDFSDFSKGTPNMHTLYWKALFDERNLADVVYKLNGKAEIFYRKKSINNTHPTHPANHTIQNKNKDNKKKESVFEYDLIKDRRYTVDKFLFHVPITMNFKSVGSENINQQVREYLQQAEDTHIIGIDRGERHLLYLVVIDMQGEIKEQFTLNEIVNEYNGNTYRTNYHDLLDTREEERLKARPSWQTIENIKDLKEGYLSQAIHKITQLMVKYHAVVVLEDLNKGFMRGRQKVEKQVYQKFEKMLIDKLNYLVDKKADAAQSGGLLNAYQLTSKFDSFQKLGKQSGFLFYIPAWNTSKIDPVTGFVNLLDTRYQNIEKAKAFFSKFDAIRYNANKDWFEFNLDYDKFGTKAEGTRTKWILCTQGNRICTFRNAEKNSQWDNLKIDLTREMKSLFEHYHINICGNLKEEICSQTDKAFFTGLLHMLKLTLQMRNSITETETDYLVSPVADENGVFYDSRSCGDTLPKNADANGAYNIARKGLMLIGQIKETKDLANFKYDISNKAWLNFAQQKPYKK

SEQ ID NO: 1530 - protein, 1274 aa, unidentified
  REGION 1..1274: note = Description of Unknown: uncultivated organism sequence
  REGION 1..1274: note = Category: MG75 effectors
  REGION 1..1274: note = Description: MG75-16 effector
MAKNFEDFKRLYPLSKTLRFEAKPIGATLDNIVKSGLLDEDEHRAASYVKVKKLIDEYHKVFIDRVLDNGCLPLEDKGDNNSLAEYYDSYVSKSQNEDAKKAFKEIQQNLRSIIAKKLTDDKAYANLFGNKLIESYKDKADKTKIIDSDLIQFIHTAESTQLDSMSQDEAKELVKEFCGFTTYFVGFFDNRKNMYTAEEKSTGIAYRLINENLPKFIDNMEAFKKAIARPEIQANMEELYSDFSEYLNVESILEMFQLDYYNMLLTQKQIDVYNAIIGGKTDDEHDVKIKGINEYINLYNQQHKDDKLPKLKALFKQILSDRNAISWLPEEFNSDQEVLNAIKDCYERLAENVLGDKVLKSLLGSLADYSLDGIFIRNDLQLTDISQKMFGNWGVIQNAIMQNIKHVAPARKHKESEEDYEKRIAGIFKKADSFSISYINDCLNEEEPNNAYFVENYFATFGAVNTPTMQRENLFALVQNAYTEVAALLHSDYPTVKHLAQDKANVSKIKALLDAIKSLQHFVKPLLGKGDESDKDERFYGELASLWAELDTVTPLYNMIRNYMTRKPYSQKKIKLNFENPQLLGGWDANKEKDYATIILRRNGLYYLAIMNKDSKKLLGKAMPSDGECYEKMVYKLLPGANKMLPKVFFAKSRMEDFKPSKELVEKYNNGTHKKGKNFCIQDCHNLIDYFKQSIDKHEDWSKFGFNFSETSTYEDLSGFYREVEQQGYKLSFARVSVSYINQLVEEGKMYLFQIYNKDFSEYSKGTPNMHTLYWKALFDERNLADVVYKLNGQAEMFYRKKSIENTHPTHPANHPILNKNKDNKKKESLFEYDLIKDRRYTVDKFMFHVPITMNFKSSGSENINQDVKAYLRYADDMHIIGIDRGERHLLYLVVIDLQGNIKEQFSLNEIVNDYNGNTYHTNYHDLLDVREDERLKARQSWQAIENIKELKEGYLSQVIHKITQLMVKYHAIVVLEDLNMGFMRGRQKVEKQVYQKFEKMLIEKLNYLVDKKVDVSVSGGLLNAYQLTSKFDSFQKLGKQSGFLFYIPAWNTSKIDPVTGFVNLLDTRYQNVEKAKCFFSKFDAIRYIEDKEWFEFNLDYDKFGKKAEGTRTKWTLCTRGMRIDTFRNKEKNSQWDNQEVDLTAEMKSLLEHYYIDIHGNLKDAISAQTDKAFFTGLLHILKLTLQMRNSITGTETDYLVSPVADENGIFYDSRSCGDQLPENADANGAYNIARKGLMLIEQIKNAEDLNNVKFDISNKAWLNFAQQKPYKNG

SEQ ID NO: 1531 - protein, 1246 aa, unidentified
  REGION 1..1246: note = Description of Unknown: uncultivated organism sequence
  REGION 1..1246: note = Category: MG75 effectors
  REGION 1..1246: note = Description: MG75-17 effector
MMETFSDFTNLYPLSKTLRFRLIPVGKTLRHFIDSGILEEDQHRAESYVKVKAIIDDYHRSYIESSLSGFELPVESMGKSNSLEEYYLYHNIRNKTEDIQNALSKVRNNLRKQIVAQLTKNEMFKRIDKKELIQNDLIDFVKNEPDANEKIALISEFRNFTVYFKGFHENRKNMYSDEEKSTSIAFRLIHENLPKFIDNMEVFAKIQNTSISEKFDAIQKELCPDSVAFVDMFKLGYFNRTLSQKQIDAYNTVISGRTTAEGEKIKGLNEYINLYNQQHKQEKLPKMKLLFKQILSDRESASWLPEKLENDKQVVGALVDFWNTIHDTVLAEGGLKTVISLLVSYSLEGIFLKNDLQLTDVSQKATGSWSKIPTAIKQKLKAMNPQKKKESYEGYQERIDKIFKSYKSFSLAFINECLHGEYKIEDYFIKLGAINTDLLQKENHFSHILNTYTDIKEVIESYSESTDTKLIRDNGSIQKIKQFLDSVKDLQAYVKPLLGNGDETGKDERFYGDFVEYWNLLDLITPLYNMIRNYVTQKPYSVEKIKINFQNPTLLNGWDLNKETDNTSVILRRDDKYYLAIMTSKFRKVFLEYPSGSDRSCYEKMEYKLLPGANKMLPKVFFSKSRIQEFMPDERLLSNYEKGTHKKTGNCFSLTDCHALIDFFKKSLNKHEDWRNFGFKFSDTSTYTDMSGFYKEVENQGYKLSFKPIDAVYVDQLVDEGKIFLFQIYNKDFSEHSKGTPNMHTLYWKMLFDETNLGDVVYKLNGEAEVFFRKASIKVSSPTHPASVPIKKKNPKHMDEERILKYDLIKDKRYTVDQFQFHVPITMNFKSDGNGNINQKVVEYLRSASNIHIIGIDRGERNLLYLVVIDGSGKICEQFSLNEIKVEHNGETYSTNYHDLLDIKENERKQARQSWQSIANIKELKEGYLSQVIHKISELMVKYNAIVVLEDLNTGFMRGRQKVEKQVYQKFEKMLIEKLNYLVFKKQSLNLCGGLMHAYQLTNKFEGFNKLGKQSGFLFYIPAWNTSKMDPVTGFVNLFDLKYESIDKAKSFFSKFDSIRYNVERDMFEWKFNYDKFTKKAEGTKTNWTVCSYGNRIITFRNPNKNSQWDNKEINLTENIKLLFERFGIDLSSNLKDEIIQRTEKEFFIELISLFKLVLQMRNSWTGTDIDYLVSPVCNEKGEFFDSRNVDKALPQNADANGAYNIARKGLIFLDRIKESTSDKKLNCSITNKEWLLFVQNCCKNG

SEQ ID NO: 1532 - protein, 1270 aa, unidentified
  REGION 1..1270: note = Description of Unknown: uncultivated organism sequence
  REGION 1..1270: note = Category: MG75 effectors
  REGION 1..1270: note = Description: MG75-18 effector
MNFEQFTHLYPLSKTLRFELRPVGATLARIKEGGFLENDNHRAESYKKVKKLIDEYHKHFIEQALGDFSLTENETEGSKCLNSYLETYIQLYRSSRIEDAEKKAFEKVQAEMRKFIAKTLKGSEAYKRLFKKELIKEDLPAFLRTHADKELVAEFKNFTTYFKGFYKNRKNMYSEEEKSTAISYRLVNENLPKFVDNMAAFAIIAQVPEVRAMLDVLQKDLGAELDGTTIDELFTLPFFNKVLTQKQIAVYNAVIGGKVSDSHSKEESHIKGINQIVDCYNQQHKDARLPKLKKLYKQILSDREALSWIPEKFDKDADLLKAIHDGYERLASDRALEKLRTLLESMADYQTEGIFITNDQQLTRISQKMFGEWSFISEAILCALKKEVSQKRNECDEKYEKRIDKMLKNHGGFSIRFIDDCVAAYVNTLDDEEQKKRFIPTVEAYFATLGAFDTEKGQTINFFSRIQNARVALRGLLDSAYPEGRSLIQDKENGALLKELLDAILALMHFIKPLLGKNENGKDERFYGELIQIWDEFDTFVPLYNMSRNYLTQKAYSEEKYKLNFENSQLLNGWDLNKEVANTSIILRKDGLFYLAIMNKKHNKLFTRELPTDGDCYDKMTYKFLSGYRDLPHVFFSKSRKAEFVPSEHIMDVYEKGAFKKGDTFNLQDCHDLIDFYKASILKHEDWRQFDFKFSETEQYDDISGFYREVEAQGYKVTFRQVSVSYIDRLVKEGKLYLFQIYNKDFSPYSKGTPNMHTLYWRALFDERNLSDVVYKLNGEAEVFYRKKSIEAHPTHPANRPIKNKNKLNDKEESLFAYDLIKDRRYSEDKFSLHVPITMNFKSVGGPNINDDVVEFLRTNENLHFIGIDRGERHLLYLTVIDSHGHILEQRTLNDVVNNYQGKDYHTDYHDLLKTRERQRQEERSSWKVIENIKDLKEGYLAQVVHQIAQLMVKYHAIVVLEDLNGGFMRERQKKAERSVYQQFEKKLIDKLNYLVDKKTDAHAPGGLMNAYQLANQVESSKNKSSRNKNFKSMGRQSGFIFYIPAWNTSNIDPVTGFTNLFDTRYKNAHDAQQFFSTFKSIRYNKTADRFEFRFSYSDFTRKAEGSRTDWTVCTYGTRIKTFRDPQKNNEWTSKEVVLTEEFKKFFAAYHVDIHSNLKDSIAAHGEKAFFKQLLALMRLTLQIRNSKSGTDIDYLLSPVADENGVFFDSRSCGNSLPQDADANGAYNIARKGLMLVRQMREAKDLKKFKADMTNRNWLKFVQEKPYLND

SEQ ID NO: 1533 - protein, 1121 aa, unidentified
  REGION 1..1121: note = Description of Unknown: uncultivated organism sequence
  REGION 1..1121: note = Category: MG75 effectors
  REGION 1..1121: note = Description: MG75-19 effector
MVQFINTANLKQRLNLSKEEAKDLVQEFCGFTTYFGDFYQNRENMYSAEEKSTGIAYRLINENLPKFIDNMETFKKIAAIPEMEDNLKEIHDNLSEHLNVENIQDMFQLNYYNQLLTQKQIDVYNAIIGGKTDDEHKEKIKGINEYVNLYNQAHKDAKLPKLKTLFKQILSDRNAISWLPEEFDNDQETLNAIKDCYAHLSGNILKDENLKRLLCSLSEYDTKGIFLRNDSQLTSISKKMSGSWTDIPSAIKNDMKDGVPAKKRKESEEDYEKRIDNLFKKQDSFSIDYMDACLNKFVENNPYTIEGYFKELGAKDTQSEDIFKQIENAYTDVKPLLNSTYPKNKNLSQDKENVAKIKRFLDTLMSLVHFVKPLLGKGDERNKDEKFYGELSLLWTELETIVPLYNMVRNYMTRKPYSNSKIKLNFDNSQLLGGWDANKESDYSSILLYRDGKYYLAIFDKDSKKLLGKSMPSDGECYEKMVYKLLPGANKMLPKVFFAKSRIKDFKPSEQLLEKYNKGTHKKGKNFSISDCHALIDFFKQSINKHEDWKNFDFNFSETSTYEDLNSFYREVELQGYKITFTKVSASFIDKLVEEGKVYLFQIYNKDFSEYSKGTPNMHTLYWKALFDDRNLKDVVYKLNGQAEMFFRKKSINCNHPTHPANQPIQNKNKDNKKKESVFEYDLIKDHRYTVDKFMFHVPITMNFKSTNEKDINLHVREYLQTSNDTHIIGIDRGERHLLYLVVIDLHGNIVEQYTLNDIVNEYNGNTYRTNYHDLLDAREEDRLKQRQSWQTIENIKELKEGYLSQVIHKITQLMIKYHAIIVLEDLNIGFMRGRQKVEKQEYQKFEKMLIDKLNYLVDKKADIESTGGLLNAYQLTNKFASFKKLGKQSGFLFYIPAWNTSKIDPVTGFVNLLDTRYQNVDKAKAFFAKFDSIRYNKDKDWFEFALDYNNFGSKAEGTRTKWTLCTQGKRIKTSFNKMSSKWNNQEIDLTKDLKQLFVQYDIDINGNLKEAISKQTKYTFFVELMGLLKLTLQMRNSITGTETDYLVSPVADENGNFYDSRTCGPSLPENADANGAFNIARKGLMIIEQIKASDDLSKLKFDISNKSWLNFAQKKPYKHE

SEQ ID NO: 1534 - protein, 1235 aa, unidentified
  REGION 1..1235: note = Description of Unknown: uncultivated organism sequence
  REGION 1..1235: note = Category: MG75 effectors
  REGION 1..1235: note = Description: MG75-20 effector
METFSGFTNLYPLSKTLRFRLIPVGETLKHFIGSGILEEDQHRAESYVKVKAIIDDYHRAYIENSLSGFELPLESTGKFNSLEEYYLYHNIRNKTEKNQKSLSTVRFNLRKQIVKQLTKNELYKRIYKQNLIKKDLIDFVKNEPDANEKIALISEFRNFTVYFKGFHENRRNMYLDEEKSTSIAFRLIHENLPKFIDNMEVFAKIQNTSISENFDVIQKELCPELVTLCEMFKLGYFNKTLSQKQINAYNTVIGELNKYLNHYNQQHKQEKLPKMKLLFKQILSDRESTSWLPERFANDGQVIGAIVNFWNTIHDTVLAEGGLKTIIASLGSYSLEGIFLKNDLQLTDVSQKATGSWSKITAAIKQKLEDMNPQTKKESYETYQGRIDKLFKFYKSFSLAFINECLRGEYKIEDYFLKLGAVNSSSLQKENHFSHILNTYTDVKEVIGFYSESTDTKLIRDNGSIQKIKLFLDAVKDLQAYVKPLLGNGDETGKDERFYGDLIEYWSQLDLITPLYNMVRNYVTQKPYSVDKIKLNFRNPTLLDGWDLNQETANTSVILRRDGKYYLAIMNNKSRKVFLKPSGTGKDCYEKMEYKLIPGAYKMLPKVFFAKSKINKFMPDEYLLSNYKKGTHKKNNANFDLDDCHTLIDFFKRSLNKHEDWKNFDFKFSDTSTYTDINNFYKEIDNQAYKLSFRPVPSDFVDKLVEEGKIFLFWIYNKDFSGHSKGTPNMHTLYWRMLFDERNLEDVVYSLNGGAEVFFRKASINVSHPTHPANIPIKKKNLKHKGEERILKYDLIKDKRYTIDQFQFHVPITMNFKVAGNGNININQKAIDYLRSASDTHIIGIDRGERNLLYLVVIDGNGKICEQFSLNEIEVEYNGEKYSTNYHDLLNVKENERKQARQSWQSIANIKDLKEGYLSQVIHKISELIVKYNAIVVLEDLNAGFMRGRQKVEKQVYQKFEKKLIEKLNYLVFKKQSSDLPGGLMHAYQLANKFESFNTLGKQSGFLFYIPAWNTSKMDPVTGFVNLFDVKYESVDKAKSFFSKFDSIRYNVERDMFEWKFNYGEFTKKAEGAKTDWTVCSYGNRIITFRNPDKNFQWDNKEINLTENIKLLFERFGIDLSSNLKDEIMERTEKEFFIELISLFKLVLQMRNSWTGTDIDYLVSPVCNENGEFFDSRNVDETLPQNADANGAYNIARKGMILLDKIKKNNGEKKLALSITNREWLSFAQGCCKNG

SEQ ID NO: 1535 - protein, 1245 aa, unidentified
  REGION 1..1245: note = Description of Unknown: uncultivated organism sequence
  REGION 1..1245: note = Category: MG75 effectors
  REGION 1..1245: note = Description: MG75-21 effector
METFSGFTNLYPLSKTLRFRLIPVGETLKHFIDSGILEEDQHRAESYVKVKAIIDDYHRAYIENSLSGFELPLESTGKFNSLEEYYLYHNIRNKTEEIQNLSSKVRTNLRKQVVAQLTKNEIFKRIDKKELIQSDLIDFVKNEPDANEKIALISEFRNFTVYFKGFHENRRNMYSDEEKSTSIAFRLIHENLPKFIDNMEVFAKIQNTSISENFDAIQKELCPELVTLCEMFKLGYFNKTLSQKQIDAYNTVIGGKTTSEGKKIKGLNEYINLYNQQHKQEKLPKMKLLFKQILSDRESASWLPEKFENDSQVVGAMVNFWNTIHDTVLAEGGLKTIIASLGSYGLEGIFLKNDLQLTDISQKATGSWSKISSEIKQKIEVMNPQKKKESYETYQERIDKIFKSYKSFSLAFINECLRGEYKIEDYFLKLGAVNSSSLQKENHFSHILNAYTDVKEAIGFYSESTDTKLIQDNDSIQKIKQFLDAVKDLQAYVKPLLGNGDETGKDERFYGDLIEYWSLLDLITPLYNMVRNYVTQKPYSIDKIKINFQNPTLLNGWDLNKETDNTSVILRRDGKYYLAIMNNKSRKVFLKYPSGTDRNCYEKMEYKLLPGANKMLPKVFFSKSRINEFMPNERLLSNYEKGTHKKSGTCFSLDDCHTLIDFFKKSLDKHEDWKNFGFKFSDTSTYEDMSGFYKEVENQGYKLSFKPIDATYVDQLVDEGKIFLFQIYNKDFSEHSKGTPNMHTLYWKMLFDETNLGDVVYKLNGEAEVFFRKASINVSHPTHPANIPIKKKNLKHKDEERILKYDLIKDKRYTVDQFQFHVPITMNFKADGNGNINQKAIDYLRSASDTHIIGIDRGERNLLYLVVIDGNGKICEQFSLNEIEVEYNGEKYSTNYHDLLNVKENERKQARQSWQSIANIKDLKEGYLSQVIHKISELMVKYNAIVVLEDLNAGFMRGRQKVEKQVYQKFEKKLIEKLNYLVFKKQSSDLPGGLMHAYQLANKFESFNALGKQSGFLFYIPAWNTSKMDPVTGFVNLFDVKYESVDKAKSFFSKFDSMRYNVERDMFEWKFNYGEFTKKAEGTKTDWTVCSYGNRIITFRNPDKNSQWDNKEINLTENIKLLFERFGIDLSSNLKDEIMQRTEKEFFIELISLFKLVLQMRNSWTGTDIDYLVSPVCNENGEFFDSRNVDETLPQNADANGAYNIARKGMILLDKIKKSNGEKKLALSITNREWLSFAQGCCKNG

SEQ ID NO: 1536 - protein, 1245 aa, unidentified
  REGION 1..1245: note = Description of Unknown: uncultivated organism sequence
  REGION 1..1245: note = Category: MG75 effectors
  REGION 1..1245: note = Description: MG75-22 effector
METFSGFTNLYPLSKTLRFRLIPVGETLKHFIDSGILEEDQHRAESYVKVKAIIDDYHRAYIENSLSGFELPLESTGKFNSLEEYYLYHNIRNKTEEIQDLSSKVRTNLRKQVVVQLTKNEIFKRIDKKELIQSDLIDFVKNEPDANEKIALISEFRNFTVYFKGFHENRRNMYSDEEKSTSIAFRLIHENLPKFIDNMEVFAKIQNTSISENFDAIQKELCPELVTLCEMFKLGYFNKTLSQKQIDAYNTVIGGKTTSEGKKIKGLNEYINLYNQQHKQEKLPKMKLLFKQILSDRESASWLPEKFENDSQVVGAMVNFWNTIHDTVLAEGGLKTIIASLGSYGLEGIFLKNDLQLTDISQKATGSWSKISSEIKQKIEVMNPQKKKESYESYQERIDKLFKSYKSFSLAFINECLRGEYKIEDYFLKLGAVNSSSLQKENHFSHILNAYTDVKEAIGFYSESTDTKLIQDNDSIQKIKQFLDAVKDLQAYVKPLLGNGDETGKDERFYGDLIEYWSLLDLITPLYNMVRNYVTQKPYSVDKIKINFQNPTLLNGWDLNKETDNTSVILRRDGKYYLAIMNNKSRKVFLKYPSGTDGNCYEKMEYKLLPGANKMLPKVFFSKSRINEFMPNERLLSNYEKGTHKKSGICFSLDDCHTLIDFFKKSLDKHEDWKNFGFKFSDTSTYEDMSGFYKEVENQGYKLSFKPIDATYVDQLVDEGKIFLFQIYNKDFSEHSKGTPNMHTLYWKMLFDETNLGDVVYKLNGEAEVFFRKASINVSHPTHPANIPIKKKNLKHKDEERILKYDLIKDKRYTVDQFQFHVPITMNFKADGNGNINQKAIDYLCSASDTHIIGIDRGERNLLYLVVIDGNGKICEQFSLNEIEVEYNGEKYSTNYHDLLNVKENERKQARQSWQSIANIKDLKEGYLSQVIHKISELMVKYNAIVVLEDLNAGFMRGRQKVEKQVYQKFEKKLIEKLNYLVFKKQSSDLPGGLMHAYQLANKFESFNALGKQSGFLFYIPAWNTSKMDPVTGFVNLFDVKYESVDKAKSFFSKFDSMRYNVERDMFEWKFNYGEFTKKAEGTKTDWTVCSYGNRIITFRNPDKNSQWDNKEINLTENIKLLFERFGIDLSSNLKDEIMQRTEKEFFIELISLFKLVLQMRNSWTGTDIDYLVSPVCNENGEFFDSRNVDETLPQNADANGAYNIARKGMILLDKIKKSNGEKKLALSITNREWLSFAQGCCKNG

SEQ ID NO: 1537 - protein, 1264 aa, unidentified
  REGION 1..1264: note = Description of Unknown: uncultivated organism sequence
  REGION 1..1264: note = Category: MG75 effectors
  REGION 1..1264: note = Description: MG75-23 effector
MNFEQFTHLYPLSKTLRFELRPVGATLAKIKEGGFLENDNHRAESYKKVKKLIDEYHKHFIEQALGDFSLTKNETEGSKCLNSYLETYIQLYRSSRIEDAEKKAFEKVQAEMRKFIAKTLKGSEAYKRLFKQELIKEDLTAFLRTHGGTVADEELVAEFKNFTTYFTGLYENRENMYSEEEKSTAISYRLVNENLPKFVDNMAAFAIIAQVPEVRAMLDVMQKDLGAELDGTTIDELFTLPFFNKVLTQKQIAVYNAVIGGKVSDSHSKGESHIKGINQIVNLYNQQHKDARLPKLKMLYKQILSDREALSWLPEKFDKDADLLKAIHDGYERLASDGVLENLRTLLESMADYQAEGIFITNDQQLTRISQKMFGEWSFISEAILCALKKDVPQKRNECDEKYEERIDKMLKNHGGFSIRFIDDCVAAYVNTLDDEEQKKRFIPTVEAYFATLGAFDTEEEQTINFFSRIQNARDALQGLLDSAYPEGRALIQDKENGALLKELLDAILALMHFVKPLLGKNENGKDERFYGELMQIWDEFDSFVPLYNMSRNYLTQKPYSEEKYKLNFENSQLLKGWDLNKEADNTSIILRKDGLFYLAIMNKKHNKLFTRELPTDGDCYDKMDYKLLPGPNKMFPKVFFSKSRKAEFAPSEHIMDVYKKGSFKKGDTFNLQDCHDLIDFFKASILKHEDWRQFEFKFSETEQYDDISGFYREVEAQGYKVTFRQVSVSYIDRLVNEGKLYLFQIYNKDFSSYSKGTPNMHTLYWRALFDERNLSDVVYKLNGEAEVFYRKKSIEAHPTHPANRPIKNKNKLNDKEKSLFAYDLIKDRRYSEDKFSLHVPITMNFKSVGGPNINDDVVEFLRTNENLHFIGIDRGERHLLYLTVIDSHGHILEQRTLNDVVNNYQGKDYHTDYHDLLETRERQRQEARSSWKAIENIKDLKEGYLAQVVHQIAQLMVKYHAIVVLEDLNGGFMRGRQKVERSVYQQFEKKLIDKLNYLVDKKTDAHAPGGLMNAYQLANQFKSFKSMGRQSGFIFYIPAWNTSKIDPVTGFTNLFDTRYKNVHDAQQFFSAFKSIRYNETADRFEFKFSYSDFTRKAEGSRTDWTVCTYGTRIKTFRDPQKNNEWTSKEVVLTEEFKKFFAAYHVDIHSNLKDSIAAHDEKAFFEQLLALMRLTLQIRNSKSGTDVDYLLSPVADENGVFFDSRSCGNSLPQDADANGAYNIARKGLMLVRQMREAKDLKKFKADMTNRNWLKFAQEKPYLND

SEQ ID NO: 1538 - protein, 1274 aa, unidentified
  REGION 1..1274: note = Description of Unknown: uncultivated organism sequence
  REGION 1..1274: note = Category: MG75 effectors
  REGION 1..1274: note = Description: MG75-24 effector
MAKNFEDFKRLYSLSKTLRFEAKPIGATLDNIVKSGLLDEDEHRAASYVKVKKLIDEYHKVFIDRVLDDGCLPLENKGNNNSLAEYYESYVSRAQDEDAKKKFKEIQQNLRSVIAKKLTEDKAYANLFGNKLIESYKDKEDKKKIIDSDLIQFINTAESTQLDSMSQDEAKELVKEFWGFVTYFYGFFDNRKNMYTAEEKSTGIAYRLVNENLPKFIDNIEAFNRAITRPEIQENMGVLYSDFSEYLNVESIQEMFQLDYYNMLLTQKQIDVYNAIIGGKTDDEHDVKIKGINEYINLYNQKHKDDKLPKLKSLFKQILSDRNAISWLPEEFNSDQEVLNAIKDCYERLSENVLGDKVLKSMLGSLADYSLDGIFIRNDLQLTDISQKMFGNWSVIQNAIMQNIKHVAPARKHKESEEEYENRIAGIFKKADSFSISYIDACLNETDPNNAYFVENYFATLGAVDTPTMQRENLFALVQNAYTEITALLHSDYPTEKNLAQDKANVAKIKALLDAIKSLQHFVKPLLGKGDESDKDERFYGELASLWAELDTMTPLYNMIRNYMTRKPYSQKKIKLNFENPQLLGGWDANKEKDYATIILRRNGLYYLAIMNKDSKKLLGKAMPSDGECYEKMVYKLLPGANKMLPKVFFAKSRMEDFKPSKELVEKYNNGTHKKGKNFNIQDCHNLIDYFKQSIDKHEDWSKFGFKFSDTSTYEDLSGFYREAEQQGYKLSFARVSVSYINQLVEEGKMYLFQIYNKDFSEYSKGTPNMHTLYWKALFDERNLADVVYKLNGQAEMFYRKKSIENTHPTHPANHPILNKNKDNNKKESLFEYDLIKDRRYTVDKFMFHVPITMNFKSSGSENINQDVKAYLCHADDMHIIGIDRGERHLLYLVVIDLQGNIKEQFSLNEIVNDYNGNTYHTNYHDLLDVREDERLKARQSWQTIENIKELKEGYLSQVIHKITQLMVKYHAIVVLEDLNMGFMRGRQKVEKQVYQKFEKMLIEKLNYLVDKKADASVSGGLLNAYQLTSKFDSFQKLGKQSGFLFYIPAWNTSKIDPVTGFVNLLDTRYQNVEKAKSFFSKFDAIRYNKDKEWFEFNLDYDKFGKKAEGTRTKWTLCTRGMRIDTFRNKEKNSQWDNQEVDLTAEMKSLLEHYYIDIHGNLKDAISAQTDKAFFTGLLHILKLTLQMRNSITGTETDYLVSPVADENGIFYDSRSCGNQLPENADANGAYNIARKGLMLIEQIKNAEDLNNVKFDISNKAWLNFAQQKPYKNG

SEQ ID NO: 1539 - protein, 1274 aa, unidentified
  REGION 1..1274: note = Description of Unknown: uncultivated organism sequence
  REGION 1..1274: note = Category: MG75 effectors
  REGION 1..1274: note = Description: MG75-25 effector
MAKNFEDFKRLYPLSKTLRFEAKPIGATLDNIIKSGLLDEDEHRAASYVKMKKLIDEYHKVFIDRVLDNGCLPLEDKGDNNSLAEYYESYVSKAQDEDAIKKFKEIQQNLCSIIAKKLTDDKAYANLFGNKLIESYKDKADKTKIIDSDLIQFINTAESTQLVSMSQDEAKELVKEFWGFTTYFEGFFKNRKNMYTPEEKSTGIAYRLINENLPKFIDNMEAFKKAIARPEIQANMEELYSDFSEYLNVESIQEMFQLDYYNMLLTQKQIDVYNAIIGGKTDDEHDVKIKGINEYINLYNQQHKDDKLPKLKALFKQILSDRNAISWLPEEFNSDQEVLNAIKDCYERLAENVLGDKVLKSLLCSLSDYTLDGIFIRNDLQLTDISQKMFGNWGVIQNAIMQNIKRVAPARKHKESEEDYEKRIAGIFKKADSFSISYINDCLNEADPNNAYFVENYFATFGAVNTPTMQRENLFALVQNAYTEVASLLHSDYPTAKHLAQDKANVAKIKALLDAIKSLQHFVKPLLGKGDESDKDERFYGELASLWAELDTVTPLYNMIRNYITRKPYSQKKIKLNFENPQLLGGWDANKEKDYATIILRRNGLYYLAIMNKESKKLLGKAMPSDGECYEKMVYKLLPGANKMLPKVFFAKSRMEDFKPSKELVEKYNNGTHKKGKNFNIQDCHNLIDYFKQSISKHEDWGKFGFNFSDTSTYEDLSGFYREVEQQGYKLSFARVSVSYINQLVEEGKMYLFQIYNKDFSEYSKGTPNMHTLYWKALFDERNLADVVYKLNGQAEMFYRKKSIENTHPTHPANHPILNKNKDNKKKESLFEYDLIKDRRYTVDKFMFHVPITMNFKSVGSENINQGVKEYLHHADDMHIIGIDRGERHLLYLVVIDLQGNIKEQYSLNEIVNEYNGNTYHTNYHDLLDVREDERLKARQSWQTIENIKELKEGYLSQVIHKITQLMVKYHAIVVLEDLNMGFMRGRQKVEKQVYQKFEKMLIDKLNYLVDKKADASVSGGWLNAYQLTSKFDSFQKLGKQSGFLFYIPAWNTSKIDPVTGFVNLLDARYQNVEKAKAFFSKFDAIRYNKDKDWFEFNLDYDKFGKKAEGTRTKWTLCTRGMRIDTFRNKEKNSQWDNQEVDLTAEMKSLLEHYYIDIHGNLKDAISAQTDKAFFTGLLHILKLTLQMRNSITGTETDYLVSPVADENGIFYDSRSCGEELPENADANGAYNIARKGLMLIEQIKGAEDLGNLKFDMSNKAWLNFAQKKPYKNG

SEQ ID NO: 1540 - protein, 1274 aa, unidentified
  REGION 1..1274: note = Description of Unknown: uncultivated organism sequence
  REGION 1..1274: note = Category: MG75 effectors
  REGION 1..1274: note = Description: MG75-26 effector
MAKNFEDFKRLYPLSKTLRFEAKPIGATLDNIIKSGLLDEDEHRAASYVKMKKLIDEYHKVFIDRVLDNGCLPLKNEGQNNSLTEYYESYVSKSQNEDAKKAFEENQQNLRSIVAKKLTDDKAYANLFGKNLIESYKDKEDKKKIIDSDLIQFICTAEATQLDSMSQDEAKEIVKEFWGFTTYFVGFFDNRKNMYTAEEKSTGIAYRLINENLPKFIDNMEAFKKAIARPEIQANMEELYSNFSEYLNVESIQEMFLLDYYNMLLTQKQIDVYNAIIGGKTDDEHDVKIKGINEYINLYNQQHKDDKLPKLKALFKQILSDRNAISWLPEEFNSDQEVLNAIKDCYERLSENVLGDKVLKSLLGSLSDYTLDGIFIRNDLQLTDISQKMFGNWGVIQNAIMQNIKRVAPARKHKESEEDYEKRIAGIFKKADSFSISYINDCLNEADPNNAYFVENYFATFGAVNTPTMQRENLFALVQNAYTEVASLLHSDYPTAKHLAQDKANVAKIKALLDAIKSLQHFVKPLLGKGDESDKDERFYGELASLWAELDTVTPLYNMIRNYITRKPYSQKKIKLNFENPQLLGGWDANKEKDYATIILRRNGLYYLAIMNKDSKKLLGKAMPSDGECYEKMVYKLLPGANKMLPKVFFAKSRMEDFKPSKELVEKYNNGTHKKGKNFNIQDCHNLIDYFKQSINKHEDWGKFGFNFSDTSTYEDLSGFYREVEQQGYKLSFARVSVSYINQLVEEGKMYLFQIYNKDFSEYSKGTPNMHTLYWKALFDERNLADVVYKLNGQAEMFYRKKSIENTHPTHPANHPILNKNKDNKKKESLFDYDLIKDRRYTVDKFMFHVPITMNFKSSGSENINQDVKAYLRHADDMHIIGIDRGERHLLYLVVIDLQGNIKEQYSLNEIVNEYNGNTYHTNYHDLLDVREEERLKARQSWQTIENIKELKEGYLSQVIHKITQLMVKYHAIVVLEDLNMGFMRGRQKVEKQVYQKFEKMLIDKLNYLVDKKADASVSGGWLNAYQLTSKFDSFQKLGKQSGFLFYIPAWNTSKIDPVTGFVNLLDARYQNVEKAKAFFSKFDAIRYNKDKDWFEFNLDYDKFGKKAEGTRTKWTLCTRGMRIDTFRNKEKNSQWDNQEVDLTAEMKSLLEHYYIDIHGNLKDAISAQTDKAFFTGLLHILKLTLQMRNSITGTETDYLVSPVADENGIFYDSRSCGEELPENADANGAYNIARKGLMLIEQIKGAEDLGNLKFDISNKAWLNFAQQKPYKNG

SEQ ID NO: 1541 - protein, 1274 aa, unidentified
  REGION 1..1274: note = Description of Unknown: uncultivated organism sequence
  REGION 1..1274: note = Category: MG75 effectors
  REGION 1..1274: note = Description: MG75-27 effector
MAKNFEDFKRLYPLSKTLRFEAKPIGATLDNIIKSGLLDEDEHRAASYVKMKKLIDEYHKVFIDRVLDNGCLPLEDKGDNNSLAEYYESYVSKAQDEDAIKKFKEIQQNLCSIIAKKLTDDKAYANLFGNKLIESYKDKADKTKIIDSDLIQFINTAESTQLVSMSQDEAKELVKEFWGFTTYFEGFFKNRKNMYTPEEKSTGIAYRLINENLPKFIDNMEAFKKAITRPEIQANMEELYSDFSEYLNVESIQEMFQLDYYNMLLTQKQIDVYNAIIGGKTDDEHDVKIKGINEYINLYNQQHKDDKLPKLKALFKQILSDRNAISWLPEEFNSDQEVLNAIKDCYERLAENVLGDKVLKSLLGSLADYSLDGIFIRNDLQLTDISQKMFGNWGVIQNAIMQNIKHVAPARKHKESEEDYEKRIAGIFKKADSFSISYINDCLNEADPNNAYFVENYFATFGAVNTPTMQRENLFALIQNAYTEVAALLHSDYPTAKHLAQDKANVAKIKALLDAIKSLQHFVKPLLGKGDESDKDERFYGELASLWAELDMVTPLYNMIRNYMTRKPYSQKKIKLNFENPQLLGGWDANKEKDYATIILRRDGLYYLAIMNKESKKLLGKAMPSDGECYEKMVYKLLPGANKMLPKVFFAKSRMEDFKPSKELVEKYNNGTHKKGKNFNIQDCHNLIDYFKQSISKHEDWGKFGFNFSDTSTYEDLSGFYREVEQQGYKLSFARVSVSYISQLVEEGKMYLFQIYNKDFSEYSKGTPNMHTLYWKALFDERNLADVVYKLNGQAEMFYRKKSIENTHPTHPANHPILNKNKDNKKKESLFDYDLIKDRRYTVDKFMFHVPITMNFKSSGSENINQNVKTYLRHADDMHIIGIDRGERHLLYLVVIDLQGNIKEQYSLNEIVNEYNGNTYHTNYHDLLDVREEERLKARQSWQTIENIKELKEGYLSQVIHKITQLMVKYHAIVVLEDLNMGFMRGRQKVEKQVYQKFEKMLIDKLNYLVDKKADASVSGGLLNAYQLTSKFDSFQKLGKQSGFLFYIPAWNTSKIDPVTGFVNLLDTRYQNVEKAKVFFSKFDAIRYNKDKDWFEFNLDYDKFGKKAEGTRTKWTLCTRGMRIDTFRNKEKNSQWDNQEVDLTAEMKSLLEHYYIDIHGNLKDAISAQTDKAFFTGLLHILKLTLQMRNSITGTETDYLVSPVADENGIFYDSRSCGEELPENADANGAYNIARKGLMLIEQIKGAEDLGNLKFDISNKAWLNFAQKKPYKNG

SEQ ID NO: 1542 - protein, 1274 aa, unidentified
  REGION 1..1274: note = Description of Unknown: uncultivated organism sequence
  REGION 1..1274: note = Category: MG75 effectors
  REGION 1..1274: note = Description: MG75-28 effector
MAKNFEDFKRLYPLSKTLRFEAKPIGATLDNIVKSGLLDEDEHRAASYVKVKKLIDEYHKVFIDRVLDNGCLPLEDKGDNNSLAEYYDSYVSKSQNEDAKKAFKEIQQNLRSIIAKKLTDDKAYANLFSNKLIESYKDKADKTKIIDSDLIQFIHTAESTQLDSMSQDEAKELVKEFWGFTTYFVGFFDNRKNMYTAEEKSTGIAYRLINENLPKFIDNMEAFKKAIARPEIQANMEELYSIFSEYLNVESIQEMFLLDYYNMLLTQKQIDVYNAIIGGKTDEEHDVKIKGINEYINLYNQQHKDDKLPKLKALFKQILSDRNAISWLPEEFNSDQEVLNAIKDCYERLAENVLGDKVLKSLLGSLADYSLDGIFIRNDLQLTDISQKMFGNWGVIQNAIMQNIKHVAPARKHKESEEDYEKRIAGIFKKADSFSISYINDCLNEADPNNAYFVENYFATFGAINTPTMQRENLFALVQNAYTEVAVLLHSDYPTAKQLAQDKANVSKIKALLDAIKSLQHFVKPLLGKGDESDKDERFYGDLASLWAELDTVTPLYNMIRNYMTRKPYSQKKIKLNFENPQLLGGWDANKEKDYATIILRRNGLYYLAIMNKESKKLLGKSMPSDGECYEKMVYKLLPGANKMLPKVFFAKSRMDDFKPSKELIEKYNNGTHKKGKNFDIQDCHNLIDYFKQSIDKHEDWSKFGFNFSDTSTYEDLSGFYREVEQQGYKLSFARVSVSYINQLVEEGKMYLFQIYNKDFSEYSKGTPNMHTLYWKALFDERNLADVVYKLNGQAEMFYRKKSIENTHPTHPANHPILNKNKDNKKKESLFDYDLIKDRRYTVDKFMFHVPITMNFKSSGSENINQDVKAYLRHADDMHIIGIDRGERHLLYLVVIDLQGNIKEQFSLNEIVNDYNGNTYHTNYHDLLDVREDERLKARQSWQTIENIKELKEGYLSQVIHKITQLMVKYHAIVVLEDLNMGFMRGRQKVEKQVYQKFEKMLIDKLNYLVDKKADVSVSGGLLNAYQLTSKFDSFQKMGKQSGFLFYIPAWNTSKIDPITGFVNLLDTRYQNVEKAKVFFSKFDAIRYNKDKDWFEFNLDYDKFGKKAEGTRTKWALCTRGMRIDTFRNKEKNSQWDNQEVDLTAEMKSLLEHYYIDIHGNLKDAISAQTDKAFFTGLLHILKLTLQMRNSIIGTETDYLVSPVADENGIFYDSSSCGDELPENADANGAYNIARKGLMMIEQIKDAKDLDNLKFDISNKSWLNFAQQKPYKNG

SEQ ID NO: 1543 - protein, 1274 aa, unidentified
  REGION 1..1274: note = Description of Unknown: uncultivated organism sequence
  REGION 1..1274: note = Category: MG75 effectors
  REGION 1..1274: note = Description: MG75-29 effector
MAKNFEDFKRLYPLSKTLRFEAKPIGATLDNIIKSGLLDEDEHRAASYVKMKKLIDEYHKVFIDRVLDNGCLPLKNEGQNNSLTEYYESYVSKSQNEDAKKAFEENQQNLRSIVAKKLTDDKAYANLFGKNLIESYKDKEDKKKIIDSDLIQFICTAEATQLDSMSQDEAKEIVKEFWGFTTYFVGFFDNRKNMYTAEEKSTGIAYRLINENLPKFIDNMEAFKKAIARPEIQANMEELYSNFSEYLNVESIQEMFLLDYYNMLLTQKQIDVYNAIIGGKTDDEHDVKIKGINEYINLYNQQHKDDKLPKLKALFKQILSDRNAISWLPEEFNSDQEVLNAIKDCYERLSENVLGDKVLKSLLGSLSDYTLDGIFIRNDLQLTDISQKMFGNWGVIQNAIMQNIKRVAPARKHKESEEDYEKRIAGIFKKADSFSISYINDCLNEADPNNAYFVENYFATFGAVNTPTMQRENLFALVQNAYTEVASLLHSDYPTAKHLAQDKANVAKIKALLDAIKSLQHFVKPLLGKGDESDKDERLYGELASLWAELDTVTPLYNMIRNYITRKPYSQKKIKLNFENPQLLGGWDANKEKDYATIILRRNGLYYLAIMNKESKKLLGKAMPSDGECYEKMVYKLLPGANKMLPKVFFAKSRMEDFKPSKELVEKYNNGTHKKGKNFNIQDCHNLIDYFKQSINKHEDWGKFGFNFSDTSTYEDLSGFYREVEQQGYKLSFARVSVSYINQLVEEGKMYLFQIYNKDFSEYSKGAPNMHTLYWKALFDERNLADVVYKLNGQAEMFYRKKSIENTHPTHPANHPILNKNKDNKKKESLFDYDLIKDRRYTVDKFMFHVPITMNFKSSGSENINQDVKAYLRHADDMHIIGIDRGERHLLYLVVIDLQGNIKEQYSLNEIVNEYNGNTYHTNYHDLLDVREEERLKARQSWQTIENIKELKEGYLSQVIHKITQLMVKYHAIVVLEDLNMGFMRGRQKVEKQVYQKFEKMLIDKLNYLVDKKADASVSGGWLNAYQLTSKFDSFQKLGKQSGFLFYIPAWNTSKIDPVTGFVNLLDARYQNVEKAKAFFSKFDAIRYNKDKDWFEFNLDYDKFGKKAEGTRTKWTLCTRGMRIDTFRNKEKNSQWDNQEVDLTAEMKSLLEHYYIDIHGNLKDAISTQTDKAFFTGLLHILKLTLQMRNSITGTETDYLVSPVADENGIFYDSRSCGEELPENADANGAYNIARKGLMLIEQIKGAEDLGNLKFDISNKAWLNFAQQKPYKNG

SEQ ID NO: 1544 - protein, 1245 aa, unidentified
  REGION 1..1245: note = Description of Unknown: uncultivated organism sequence
  REGION 1..1245: note = Category: MG75 effectors
  REGION 1..1245: note = Description: MG75-30 effector
METFSGFTNLYPLSKTLRFRLIPVGETLKYFIGSGILEEDQHRAESYVKVKAIIDDYHRAYIENSLSGFELPLESTGKSNSLEEYYLYHNIRNKTEEIQNLSSKVRTNLRKQVVAQLTKNEIFKRIDKKELIQSDLIDFVKNEPDANEKIALISEFRNFTVYFKGFHENRRNMYSDEEKSTSIAFRLIHENLPKFIDNMEVFAKIQNTSISENFDAIQKELCPELVTLCEMFKLGYFNKTLSQKQIDAYNTVIGGKTTSEGKKIKGLNEYINLYNQQHKQEKLPKMKLLFKQILSDRESASWLPEKFENDSQVVGAIVNFWNTIHDTVLAEGGLKTIIASLGSYGLEGIFLKNDLQLTDISQKATGSWGKISSEIKQKIEVMNPQKKKESYETYQERIDKIFKSYKSFSLAFINECLRGEYKIEDYFLKLGAVNSSSLQKENHFSHILNTYTDVKEVIGLYSESTDTKLIQDNDSIQKIKQFLDAVKDLQAYVKPLLGNGDETGKDERFYGDLIEYWSLLDLITPLYNMVRNYVTQKPYSVDKIKINFQNPTLLNGWDLNKETDNTSVILRRDGKYYLAIMNNKSRKVFLKYPSGTDRNCYEKMEYKLLPGANKMLPKVFFSKSRINEFMPNERLLSNYEKGTHKKSGTCFSLDDCHTLIDFFKKSLDKHEDWKNFGFKFSDTSTYEDMSGFYKEVENQGYKLSFKPIDATYVDQLVDEGKIFLFQIYNKDFSEHSKGTPNMHTLYWKMLFDETNLGDVVYKLNGEAEVFFRKASINVSHPTHPANIPIKKKNLKHKDEERILKYDLIKDKRYTVDQFQFHVPITMNFKADGNGNINQKAIDYLRSASDTHIIGIDRGERNLLYLVVIDGNGKICEQFSLNEIEVEYNGEKYSTNYHDLLNVKENERKQARQSWQSIANIKDLKEGYLSQVIHKISELMVKYNAIVVLEDLNAGFMRGRQKVEKQVYQKFEKKLIEKLNYLVFKKQSSDLPGGLMHAYQLANKFESFNTLGKQSGFLFYIPAWNTSKMDPVTGFVNLFDVKYESVDKAKSFFSKFDSIRYNVERDMFEWKFNYGEFTKKAEGTKTDWTVCSYGNRIITFRNPDKNSQWDNKEINLTENIKLLFERFGIDLSSNLKDEIMQRTEKEFFIELISLFKLVLQMRNSWTGTDIDYLVSPVCNENGEFFDSRNVDETLPQNADANGAYNIARKGMILLDKIKKSNGEKKLALSITNREWLSFAQGCCKNG

SEQ ID NO: 1545 - protein, 1274 aa, unidentified
  REGION 1..1274: note = Description of Unknown: uncultivated organism sequence
  REGION 1..1274: note = Category: MG75 effectors
  REGION 1..1274: note = Description: MG75-31 effector
MAKNFEDFKRLYPLSKTLRFEAKPIGATLDNIIKSGLLDEDEHRAASYVKMKKLIDEYHKVFIDRVLDNGCLPLKNEGQNNSLTEYYESYVSKSQNEDAKKAFEENQQNLRSIVAKKLTDDKAYANLFGKNLIESYKDKEDKKKIIDSDLIQFICTAEATQLDSMSQDETKEIVKEFWGFTTYFVGFFDNRKNMYTAEEKSTGIAYRLINENLPKFIDNMEAFKKAIARPEIQANMEELYSNFSEYLNVESIQEMFLLDYYNMLLTQKQIDVYNAIIGGKTDDEHDVKIKGINEYINLYNQQHKDDKLPKLKALFKQILSDRNAISWLPEEFNSDQEVLNAIKDCYERLSENVLGDKVLKSLLGSLSDYTLDGIFIRNDLQLTDISQKMFGNWGVIQNAIMQNIKRVAPARKHKESEEDYEKRIAGIFKKADSFSISYINDCLNEADPNNAYFVENYFATFGAVNTPTMQRENLFALVQNAYTEVASLLHSDYPTAKHLAQDKANVAKIKALLDAIKSLQHFVKPLLGKGDESDKDERFYGELASLWAELDTVTPLYNMIRNYITRKPYSQKKIKLNFENPQLLGGWDANKEKDYATIILRRNGLYYLAIMNKESKKLLGKAMPSDGECYEKMVYKLLPGANKMLPKVFFAKSRMEDFKPSKELVEKYNNGTHKKGKNFNIQDCHNLIDYFKQSINKHEDWGKFGFNFSDTSTYEDLSGFYREVEQQGYKLSFARVSVSYINQLVEEGKMYLFQIYNKDFSEYSKGTPNMHTLYWKALFDERNLADVVYKLNGQAEMFYRKKSIENTHPTHPANHPILNKNKDNKKKESLFDYDLIKDRRYTVDKFMFHVPITMNFKSSGSENINQDVKAYLRHADDMHIIGIDRGERHLLYLVVIDLQGNIKEQYSLNEIVNEYNGNTYHTNYHDLLDVREEERLKARQSWQTIENIKELKEGYLSQVIHKITQLMVKYHAIVVLEDLNMGFMRGRQKVEKQVYQKFEKMLIDKLNYLVDKKADASVSGGWLNAYQLTSKFDSFQKLGKQSGFLFYIPAWNTSKIDPVTGFVNLLDARYQNVEKAKAFFSKFDAIRYNKDKDWFEFNLDYDKFGKKAEGTRTKWTLCTRGMRIDTFRNKEKNSQWDNQEVDLTAEMKSLLEHYYIDIHGNLKDAISAQTDKAFFTGLLHILKLTLQMRNSITGTETDYLVSPVADENGIFYDSRSCGEELPENADANGAYNIARKGLMLIEQIKGAEDLGNLKFDISNKAWLNFAQQKPYKNG

SEQ ID NO: 1546 - protein, 1252 aa, unidentified
  REGION 1..1252: note = Description of Unknown: uncultivated organism sequence
  REGION 1..1252: note = Category: MG75 effectors
  REGION 1..1252: note = Description: MG75-32 effector
MKFEDFTGLYPVSKTLRFEAKPVGATLENVIKSGVLEDDAHRARSYKKVKKLIDEYHKVFIDSVMSKFKFKEEILEEICSLYAAKSMDDKSKDRFVKLQGEMRKDVSVAFASDDRYKTINKKELVKEDLFEFVSHADNGQLAGLTKEEAEELILEFKDFTTYFSGFHKNRSNMYVADEKTTSVAYRLVNENLPRFLYNVSVFQKVVSVPEFENKIRAIYDSFREYLCVDNLASMFETSYYNDVLSQMQIDIYNSVIGGKTDKDSSTKIQGLNECINLYNQTHRNDKLPKFKILYKQIRSDRVAMSWLPDEFSDDKETLEAIRNCYDSLTDHILGERDLKTLLESLGQYDMSGVFIANGPYLADISQKLYGDWRAIEKAIRKQEAVNSPKKAKETEEEYFNRITKHIHNYDSFSIEYLNFCITESYPNDGRRVEDYFATLGAVNTDTSQRENLFSRIDNAYTNVSGLLSSEYPETKKLSQDTENVEKIKDLLDSIKELQRFVKPLMGNGDESDNDKRFYGELSPLWDELETFSLLYDKVRNYVTRKPYSQNKIKLNFNNATLFAGWDQNKEKDNACIILRRGGMYYLGIMNKSYRIVFENNFPCDGDCYEKMVYKLLPGANKMLPKVFFSKSRIREFNPSDRILKNYEEGTHKKGPKFKLEDCHELIDFFKASINLHEDWKKFKFKFSDTSSYEDISDFYKEVEQQGYKITFVNVSVSYIDSLVNDGKLYLFQLYNKDFSQYSKGVPNMHTLYWKALFDKANLADVVYKLNGEAELFFRKKSIDMERPTHRANISVANKNIHNIKKESIFKYDLTKDRRYTVDKFLFHVPITMNFKSEGNIAIEQQVRSYLQSAEDTHVIGIDRGERHLLYVSVIDRRGLIKEQFSLNEIINEHNGSTYATNYHDLLDAKESERRKARQSWQTIENIKDLKEGYLSQAVHKIAQLMVKYHAVVVLEDLNVGFMRGRQKVEKQVYQKFEKMLTDKLNYLVDKKLNANDPGGVFHAYQLSSVFKSAEKRGKQSGFIFYIPAWNTSKIDPVTGFVNLFDLKYENIDKAKSFFSKFQIIRYNSERDWFEFIFDYDSFNSKASGTKVGWTLTTHGDRILSFRNSEKNNQWDSRAVILTDEYKALFDKYGIDYNDNLKEAITNQTEKAFFEDLLKCLRLTLQMRNSVIGTDTDFLISPVADNNGVFYDSRICADSLPKNADANGAYNIARKGLMLIDQIKKASDVRNIKFDIANKSWLDFAQKKPYLDE

SEQ ID NO: 1547 - protein, 1274 aa, unidentified
  REGION 1..1274: note = Description of Unknown: uncultivated organism sequence
  REGION 1..1274: note = Category: MG75 effectors
  REGION 1..1274: note = Description: MG75-33 effector
MAKNFEDFKRLYPLSKTLRFEAKPIGATLDNIIKSGLLDEDEHRAASYVKMKKLIDEYHKVFIDRVLDNGCLPLEDKGDNNSLAEYYESYVSKAQDEDAIKKFKEIQQNLCSIIAKKLTDDKAYANLFGNKLIESYKDKADKTKIIDSDLIQFINTAESTQLVSMSQDEAKELVKEFWGFTTYFEGFFKNRKNMYTPEEKSTGIAYRLINENLPKFIDNMEAFKKAITRPEIQANMEELYSDFSEYLNVESIQEMFQLDYYNMLLTQKQIDVYNAIIGGKTDDEHDVKIKGINEYINLYNQQHKDDKLPKLKALFKQILSDRNAISWLPEEFNSDQEVLNAIKDCYERLAENVLGDKVLKSLLCSLSDYTLDGIFIRNDLQLTDISQKMFGNWGVIQNAIMQNIKRVAPARKHKESEEDYEKRIAGIFKKADSFSISYINDCLNEADSNNAYFVENYFATFGAVNTPTMQRENLFALVQNAYTEVASLLHSDYPTAKHLAQDKANVAKIKALLDAIKSLQHFVKPLLGKGDESDKDERFYGELASLWAELDTVTPLYNMIRNYITRKPYSQKKIKLNFENPQLLGGWDANKEKDYATIILRRNGLYYLAIMNKESKKLLGKAMPSDGECYEKMVYKLLPGANKMLPKVFFAKSRMEDFKPSKELVEKYNNGTHKKGKNFNIQDCHNLIDYFKQSISKHEDWGKFGFNFSDTSTYEDLSGFYREVEQQGYKLSFARVSVSYINQLVEEGKMYLFQIYNKDFSEYSKGTPNMHTLYWKALFDERNLADVVYKLNGQAEMFYRKKSIENTHPTHPANHPILNKNKDNKKKESLFEYDLIKDRRYTVDKFMFHVPITMNFKSVGSEIINQGVKEYLHHADDMHIIGIDRGERHLLYLVVIDLQGNIKEQYSLNEIVNEYNGNTYHTNYHDLLDAREDERLKARQSWQTIENIKELKEGYLSQVIHKITQLMVKYHAIVVLEDLNMGFMRGRQKVEKQVYQKFEKMLIDKLNYLVDKKADASVSGGWLNAYQLTSKFDSFQKLGKQSGFLFYIPAWNTSKIDPVTGFVNLLDARYQNVEKAKAFFSKFDAIRYNKDKDWFEFNLDYDKFGKKAEGTRTKWTLCTRGMRIDTFRNKEKNSQWDNQEVDLTAEMKSLLEHYYIDIHGNLKDAISAQTDKAFFTGLLHILKLTLQMRNSITGTETDYLVSPVADENGIFYDSRSCGEELPENADANGAYNIARKGLMLIEQIKGAEDLGNLKFDISNKAWLNFAQKKPYKNG

SEQ ID NO: 1548 - protein, 1274 aa, unidentified
  REGION 1..1274: note = Description of Unknown: uncultivated organism sequence
  REGION 1..1274: note = Category: MG75 effectors
  REGION 1..1274: note = Description: MG75-34 effector
MAKNFEDFKRLYPLSKTLRFEAKPIGATLDNIIKSGLLDEDEHRAASYVKMKKLIDEYHKVFIDRVLDNGCLPLEDKGDNNSLAEYYESYVSKAQDEDAIKKFKEIQQNLCSIIAKKLTDDKAYANLFGNKLIESYKDKADKTKIIDSDLIQFINTAESTQLVSMSQDEAKELVKEFWGFTTYFEGFFKNRKNMYTPEEKSTGIAYRLINENLPKFIDNMEAFKKAITRPEIQANMEELYSDFSEYLNVESIQEMFQLDYYNMLLTQKQIDVYNAIIGGKTDDEHDVKIKGINEYINLYNQQHKDDKLPKLKALFKQILSDRNAISWLPEEFNSDQEVLNAIKDCYERLAENVLGDKVLKSLLCSLSDYTLDGIFIRNDLQLTDISQKMFGNWGVIQNAIMQNIKRVAPARKHKESEEDYEKRIAGIFKKADSFSISYINDCLNEADPNNAYFVENYFATFGAVNTPTMKRENLFALVQNAYTEVASLLHSDYPTAKHLAQDKANVAKIKALLDAIKSLQHFVKPLLGKGDESDKDERFYGELASLWAELDTVTPLYNMIRNYITRKPYSQKKIKLNFENPQLLGGWDANKEKDYATIILRRNGLYYLAIMNKESKKLLGKAMPSDGECYEKMVYKLLPGANKMLPKVFFAKSRMEDFKPSKELVEKYNNGTHKKGKNFNIQDCHNLIDYFKQSISKHEDWGKFGFNFSDTSTYEDLSGFYREVEQQGYKLSFARVSVSYINQLVEEGKMYLFQIYNKDFSEYSKGTPNMHTLYWKALFDERNLADVVYKLNGQAEMFYRKKSIENTHPTHPANHPILNKNKDNKKKESLFEYDLIKDRRYTVDKFMFHVPITMNFKSVGSENINQGVKEYLHHADDMHIIGIDRGERHLLYLVVIDLQGNIKEQYSLNEIVNEYNGNTYHTNYHDLLDAREDERLKARQSWQTIENIKELKEGYLSQVIHKITQLMVKYHAIVVLEDLNMGFMRGRQKVEKQVYQKFEKMLIDKLNYLVDKKADASVSGGWLNAYQLTSKFDSFQKLGKQSGFLFYIPAWNTSKIDPVTGFVNLLDARYQNVEKAKAFFSKFDAIRYNKDKDWFEFNLDYDKFGKKAEGTRTKWTLCTRGMRIDTFRNKEKNSQWDNQEVDLTAEMKSLLEHYYIDIHGNLKDAISAQTDKAFFTGLLHILKLTLQMRNSITGTETDYLVSPVADENGIFYDSRSCGEELPENADANGAYNIARKGLMLIEQIKGAEDLGNLKFDISNKAWLNFAQKKPYKNG

SEQ ID NO: 1549 - protein, 1271 aa, unidentified
  REGION 1..1271: note = Description of Unknown: uncultivated organism sequence
  REGION 1..1271: note = Category: MG75 effectors
  REGION 1..1271: note = Description: MG75-35 effector
MEFNDFKRLYPLSKTLRFEAKPIGATLKNIIKSGLLEEDEHRTQSYVKVKKLIDEYHKVFIDRVLNDGCLTIENKGKKDSLEEYYESYMSKTNDENANKTYKEIQQNLRSVIVKKLTDDNAYANLFGNKLIESYKDKDDKNKIIDSDLIQFINTADPSQLDYMSQDEAKELVKEFWGFTTYFVGFFDNRKNMYTPEDKSTGIAYRLVNENLPKFIDNMEAFKKAVAKPEIQANMEELYSNFAGYLNVESIQEMFQLDYYNMLLSQKQIDVYNAIIGGKTDEEHDVKIKGINEYINLYNQQHKDEKLPKLKALFKQILSDRNAISWLPEEFNSDQDVLNAIDDCYKRLSENVLGDKVLKSLLCSLSDYNLNVIFVRNDLQLTDISQKMFGNWSVIQDAIMQNIKNVAPARKRKESEEDYEKRISDIFKKADSFSIQYINDCLNEMDDNNLHAVDGYFATLGAVNTPTMQRENLFALIQNAYTDISNLLETPYPEKKNLAQDKTNVAKVKALLDAIKSLQHFVKPLLGKGDESDKDERFYGELASLWTELDTVTPLYNMVRNYMTRKPYSEKKIKLNFENPQLLGGWDANKEKDYATIILRRNGMYYLAIMDKDSKKLLGKTMPSDGECYEKMVYKLLPGANKMLPKVFFAKSRINDFKPSKQIVENYNNGTHKKGKNFNINDCHNLIDYFKQSIGKHEDWSKFGFNFSDTSTYEDLSGFYREVEQQGYKLSFTNVSVSFIDKLVDEGKMYLFQIYNKDFSDYSKGTPNMHTLYWKALFDERNLADVVYKLNGQAEMFYRKKSINNTHPTHPANHPIQNKNKDNKKKESVFEYDLIKDRRYTVDKFLFHVPITMNFKSVGSENINQQVREYLQQADDTHIIGIDRGERHLLYLVVIDMQGEIKEQFTLNEIVNEYNGNTYRTNYHDLLDTREEERLKARQSWQTIENIKELKEGYLSQVIHKITQLMVKYHAVVVLEDLNKGFMRGRQKVEKQVYQKFEKMLIDKLNYLVDKKADAAQSGGLLNAYQLTSKFDSFQKLGKQSGFLFYIPAWNTSKIDPVTGFVNLLDTRYQNTEKAKAFFSKFDAIRYNANKDWFEFNLDYDKFGTKAEGTRTKWILCTQGNRICTFRNTEKNSQWDNQEVDLTREMKSLFEYYHINICGNLKEEICSQTDKAFFTGLLHMLKLTLQMRNSITGTETDYLVSPVADENGVFYDSRSCGDALPKNADANGAYNIARKGLMLIGQIKETKDLANFKYDISNKAWLNFAQQKPYKK

SEQ ID NO: 1550 - protein, 1275 aa, unidentified
  REGION 1..1275: note = Description of Unknown: uncultivated organism sequence
  REGION 1..1275: note = Category: MG75 effectors
  REGION 1..1275: note = Description: MG75-36 effector
MAKNFEDFKRLYYLSKTLRFEAKPIGATLDNIVKSGLLDEDEHRAASYVKVKKLIDEYHKVFIDRVLDDGCLPLENKGNNNSLAEYYESYVSRAQDEDAKKKFKEIQQNLRSVIAKKLTEDKAYANLFGNKLIESYKDKEDKKKIIDSDLIQFINTAESTQLDSMSQDEAKELVKEFWGFVTYFYGFFDNRKNMYTAEEKSTGIAYRLVNENLPKFIDNIEAFNRAITRPEIQENMGVLYSDFSEYLNVESIQEMFQLDYYNMLLTQKQIDVYNAIIGGKTDDEHDVKIKGINEYINLYNQKHKDDKLPKLKSLFKQILSDRNAISWLPEEFNSDQEVLNAIKDCYERLSENVLGDKVLKSMLGSLADYSLDGIFIRNDLQLTDISQKMFGNWSVIQNAIMQNIKHVAPARKHKESEEEYENRIAGIFKKADSFSISYIDACLNETDPNNAYFVENYFATLGAVDTPTMQRENLFALVQNAYTEITALLHSDYPTEKNLAQDKANVAKIKALLDAIKSLQHFVKPLLGKGDESDKDERFYGELASLWAELDTMTPLYNMIRNYMTRKPYSQKKIKLNFENPQLLGGWDANKEKDYATIILRRNGLYYLAIMNKDSKKLLGKAMPSDGECYEKMVYKLLPGANKMLPKVFFAKSRMEDFKPSKELVEKYNNGTHKKGKNFNIQDCHNLIDYFKQSIDKHEDWSKFGFKFSDTSTYEDLSGFYREVEQQGYKLSFARVSVSYINQLVEEGKMYLFQIYNKDFSEYSKGTPNMHTLYWKALFDERNLADVVYKLNGQAEMFYRKKSIENTHPTHPANHPILNKNKDNKKKESLFGYDLIKDRRYTVDKFLFHVPITMNFKSSGSENINQDVKAYLRHADDMHIIGIDRGERHLLYLVVIDLQGNIKEQFSLNEIVNDYNGNTYHTNYHDLLDVREEERLKARQSWQTIENIKELKEGYLSQVIHKITQLMVGYHAIVVLEDLSKGFMRSRQKVEKQVYQKFEKMLIDKLNYLVDKKTDVSTPGGLLNAYQLTCKSDSSQKLGKQSGFLFYIPAWNTSKIDPVTGFVNLLDTHSLNSKEKIKAFFSKFDAIRYNKDKKWFEFNLDYDKFGKKAEDTRTKWTLCTRGMRIDTFRNKEKNSQWDNQEVDLTTEMKSLLEHYYIDIHGNLKDAISTQTDKAFFTGLLHILKLTLQMRNSITGTETDYLVSPVADENGIFYDSRSCGDQLPENADANGAYNIARKGLMLIEQIKNAEDLNNVKFDISNKAWLNFAQQKPYKNG

SEQ ID NO: 1551 - protein, 1276 aa, unidentified
  REGION 1..1276: note = Description of Unknown: uncultivated organism sequence
  REGION 1..1276: note = Category: MG75 effectors
  REGION 1..1276: note = Description: MG75-37 effector
MAKKFEDFTKLYPLSKTLCFEARPIGATKSNIIKNGLLDEDKHRAESYVKVKKLIDEYHKAFIDRVLADGCLCYKNEGNEDSLEEYYEFYSLSSKDKSDDTRKHFATIQQNLRSKIAETLTKDKAYANLFGNKLIESHKDKEDKNNIIDSDLIQFVSTATPDQLDSQSKDDATKLIKEFWGFTTYFTGFFENRKNMYTSEEKSTGIAYRLINENLPKFIDNMESFKKIMEKPEMSANMEELRANLEEYLNVESISEMFELNYYNMLLTQKQIDVYNAVIGGKTDEEQDIKTKGINEYVNLYNQQHKDAKLPKLKTLFKQILSDRNAISWLPEEFDKDQNVLNAIKDCYVRLTANVLGNNVLNSLLSTLSEYNTESIFIRNDIQLTNISQKMAGSWNYIQDAIKQDIKNVAPARKRKESEEDYEERISKNFKKADSYSIKYIDDCLNRAYKNNTYTVEGYFATLGATNTPSLQRENLFAQIANAYTNISSLLSSDYSAEKNLAQDKENVAKIKTLLDCIKSLQHFVKPLLGKGDESDKDERFYGELSMLWKELDTVTPLYNMVRNYMTRKPYSQKKIKLNFENPQLLGGWDANKEKDYASILLRRDGKYYLGIMDKESKKLLGKSMPSDGACYQKMVYKLLPGANKMLPKVFFAKSRLADFNPSKEIIENYNNGTHKKGKNFNLKDCHALIDYFKESIKKHEDWSKFGFKFSESTTYEDLSGFYHEVEQQGYKLSFTNVSASYIDKMVDEGKMYLFQIYNKDFSEYSKGTPNMHTLYWKALFDERNLADVVYKLNGQAELFYREKSIDCTHPTHPANHPILNKNKDNEKKESIFEYDLIKDRRYTVDKFMFHVPITMNFKSTGADNINQLVREHLKDADAPHIIGIDRGERHLLYLVVIDMHGNIKEQFTLNDIVNEYNGNTYRTNYHDLLDAREDARLKARQSWQTIENIKELKEGYLSQVIHKITQLMVKYHAIVVLEDLNMGFMRGRQKVEKQVYQKFEKMLIDKLNYYVDKKANAEQAGGLLNAYQLTSKFDSFQKLGKQSGFLLYIPAWNTSKIDPVTGFVNLLDTRYQNVEKAKAFFCKFEAIRYNSNKNWFEFTIDYNNFGQKAEGTRTKWTLCTQGKRIRTFRNPEKNSEWDNQEIDLTSALKNLFAHYHIDINGNIKEAISAQSDKTFFTELLHLLKLTLQMRNSITGTETDYLISPVADDNGYFYDSRTCNDTLPKNADANGAYNIARKGLMLIEQIKKAKDIANIKFDISNKSWLNFAQQKPYKDE

SEQ ID NO: 1552 - protein, 1273 aa, unidentified
  REGION 1..1273: note = Description of Unknown: uncultivated organism sequence
  REGION 1..1273: note = Category: MG75 effectors
  REGION 1..1273: note = Description: MG75-38 effector
MTKKYNDFNRLYPLSKTLRFEARPIGATLDNIIKSGMLEEDEHRAQSYVKVKKLIDEYHKAFIDRVLNDGCLTIENKGRKDSLEEYYESYMSKFNDENVSKTFKEIQENLRSVIAKKLTDDKAYANLFCKNLIESYKDKDDKKIIIDSDLIQFINTAEPSQLDSMSQEEAKELVKEFWGFTTYFVGFFDNRKNMYTSEEKSTGIAYRLVNENLPKFIDNMQAFKKAVAKPEIQANMEELYSNFAEYLNVESIQEMFQLDYYNMLLTQKQIDVYNAIIGGKTDEDHDVKIKGINEYINLYNQQHKDEKLPKLKALFKQILSDRNAISWLPEEFNRDQEVLDAIKDCYGRLSENVLGDKVLKSLLCSLSDYNLNGIFVRNDQQLTDISQKIFGNWSVIQNAIMQNIKNVAPARKRKESEEDYEKRISDIFKKADSFSIQYINDCLNEMDDNNLHAVDGYFATLGAINTPMQRENLFALIQNAYTDISDLLDTPYPENKNLAQDKTNVAKVKALLDAIKSLQHFVKPLLGKGNESNKDERFYGELDSLWEELDTLTPLYNMTRNYMTRKPYSQKKIKLNFENTQLLAGWDANKEKDNATIILRRNGLYYLAIMNKDSKKFLGKAMPSDGECYEKMVYKLLPGANKMLPKVFFAKSRINDFKPSMQIIENYNNGTHKKGKTFNINDCHDLIDFFKRSIDKHEDWSQFGFNFSDTSTYEDLSGFYREVEQQGYKLSFTNVSAYFIDKLIEEGKMYLFQIYNKDFSNYSKGTPNMHTLYWKALFDERNLADVVYKLNGQAEMFYRKKSIDYTHPTHPANHPIQNKNKDNKKKESVFEYDLIKDRRYTVDKFLFHVPITMNFKSVGSENINQQVREYLQQADDTHIIGIDRGERHLLYLVVIDMQGNIKEQFTLNEIMNEYNGNTYRTNYHDLLDTREEERLTARQSWQTIENIKELKEGYLSQVIHKITQLMVKYHAIVVLEDLNKGFMRGRQKVEKQVYQKFEKMLIDKLNYLVDKKADATQSGGLLNAYQLTSKFDSFQKLGKQSGFLFYIPAWNTSKIDPVTGFVNLLDTRYQNTEKAKAFFSKFDAIRYNADKDWFEFNLDYDKFGTKAEGTRTKWALCTQGMRIDTFRNEEKNSQWDNQEVDLTTEMKSLFEHYHINMDGNLKEEICSQTDKAFFTKLLHILKLTLQMRNSITGTETDYLVSPVADENGRFYDSRSCGDKLPENADANGAYNIARKGLMLIEQIKDADDLGNLKFDISNKAWLNFAQQKPYKNE

SEQ ID NO: 1553 - protein, 1274 aa, unidentified
  REGION 1..1274: note = Description of Unknown: uncultivated organism sequence
  REGION 1..1274: note = Category: MG75 effectors
  REGION 1..1274: note = Description: MG75-39 effector
MAKNFEDFKRLYSLSKTLRFEAKPIGATLNNIVKSGLLDEDEHRAASYVKVKKLIDEYHKVFIDRVLADGCLPLENKGNNNSLAEYYESYVSRAQDEDAKKKFKEIQQNLRSIIAKKLTEDKAYANLFGKNLIESYKDKTDKTKIIDSDLIKFINTAESTQLDSMSQDEAKEIVKEFWGFTTYFVGFFDNRKNMYTAEEKSTGIAYRLINENLPKFIDNMEAFKKAIARPEIQANMEELYSNFSEYLNVESIQEMFLLDYYNMLLTQKQIDVYNAIIGGKTDDEHDFKIKGINEYINLYNQQHKDDKLPKLKALFKQILSDRNAISWLPEEFNSDQEVLNAIKDCYERLAENVLGDKVLKSLLGSLADYSLDGIFIRNDLQLTDISQKMFGNWGVIQNAIMQNIKHVAPARKHKESEEDYEKRIAGIFKKADSFSISYINDCLNEEDPNNAYFVENYFATFGAVNTPTMQRENLFALVQNAYTEVAALLHSDYPTVKNLAQDKANVSKIKALLDAIKSLQHFVKPLLGKGDESDKDERFYGELASLWAELDTVTPLYNMIRNYMTRKPYSQKKIKLNFENPQLLGGWDANKEKDYATIILRRNGLYYLAIMNKDSKKLLGKAMPSDGECYEKMVYKLLPGANKMLPKVFFAKSRMEDFKPSKELVEKYNNGTHKKGKNFCIQDCHNLIDYFKQSIDKHEDWSKFGFNFSETSTYEDLSGFYREVEQQGYKLSFARVSVSYINQLVEEGKMYLFQIYNKDFSEYSKGTPNMHTLYWKALFDERNLADVVYKLNGQAEMFYRKKSIENTHPTHPANHPILNKNKDNKKKESLFGYDLIKDRRYTVDKFMFHVPITMNFKSVGSENINQDVKAYLRHADDMHIIGIDRGERHLLYLVVIDLQGNIKEQFSLNEIVNDYNGNTYHTNYHDLLDVREDERLKARQSWQTIENIKELKEGYLSQVIHKITQLMVKYHAIVILEDLNMGFMRGRQKVEKQVYQKFEKMLIEKLNYLVDKKADASVSGGLLNAYQLTSKFDSFQKLGKQSGFLFYIPAWNTSKIDPVTGFVNLLDTRYQNVEKAKSFFSKFDAIRYNKDKDWFEFNLDYDKFGKKAEGTRTKWTLCTRGMRIDTFRNKEKNSQWDNQKVDLTAEMKSLLEHYYIDIYGNLKDAISAQTDKAFFTGLLHILKLTLQMRNSITGTEIDYLVSPVVDENGIFYDSRSCGDQLPENADANGAYNIARKGLMLVEQIKDAEDLDNVKFDISNKAWLNFAQQKPYKNG

SEQ ID NO: 1554 - protein, 1274 aa, unidentified
  REGION 1..1274: note = Description of Unknown: uncultivated organism sequence
  REGION 1..1274: note = Category: MG75 effectors
  REGION 1..1274: note = Description: MG75-40 effector
MAKIFEDFKRLYPLSKTLRFEAKPIGATLDNIIKSGLLDEDEHRAASYVRVKKLIDEYHKVFIDRVLDNGCLPLKNEGHNNSLTEYYESYVTKSQNEDAKKVFKEIQQNLRSIIAKKLTEDKAYANLFGKNLIESYKDKTDKTKIIDSDLIKFINTAESTQLDSMSQDEAKELVKEFWGFTTYFVGFYDNRKNMYTAEEKSTGIAYRLVNENLPKFIDNMEAFKKAIARPEIQANMEELYSDFSEYLNVESVQEMFQLDYYNMLLTQKQIDVYNAIIGGKTDDEHDVKIKGINEYINLYNQQHKDDKLPKLKALFKQILSDRNAISWLPEEFNGDQEVLNAIKDCYERLSENVLGDKVLKSLLGSLSDYSLDGIFIRNDLQLTDISQKMFGNWCVIQNAIMQNIKHVAPARKHKESEEDYEKRIAGIFKKVDSFSISFINDCLNEADPNNAYFVENYFATFGAVNTPTMQRENLFALVQNAYTEVAALLHSDYPTAKHLAQDKVNVAKIKALLDAIKSLQHFVKPLLGKGDESDKDERFYGELASLWAELDTVTPLYNMIRNYMTRKPYSQKKIKLNFENPQLLGGWDANKEKDYATIILRRDGLYYLAIMNKESKKLLGKAMPSDGECYEKMVYKLLPGANKMLPKVFFAKSRMEDFKPSKELVEKYNNGTHKKGKNFNIQDCHNLIDYFKQSISKHEDWGKFGFNFSDTSTYEDLSGFYREVEQQGYKLSFTRVSVSYISQLVEEGKMYLFQIYNKDFSEYSKGTPNMHTLYWKALFDERNLADVVYKLNGQAEMFYRKKSIENSHPTHPANHPILNKNKDNKKKESLFDYDLIKDRRYTVDKFMFHVPITMNFKSSSSENINQDVKAYLRHADDMHIIGIDRGERHLLYLVVIDLQGNIKEQYSLNEIVNEYNGNTYHTNYHDLLDVREEERLKARQSWQTIENIKELKEGYLSQVIHKITQLMVKYHAIVVLEDLNMGFMRGRQKVEKQVYQKFEKMLIDKLNYLVDKKADASVSGGLLNAYQLTSKFDSFQKLGKQSGFLFYIPAWNTSKIDPITGFVNLLDTRYQNVEKAKVFFSKFDAIRYNKDKDWFEFNLDYDKFGKKAEGTRTKWTLCTRGMRIDTFRNKEKNSQWDNQEVDLTAEMKSLLEHYYIDIHGNLKDAISAQTDKAFFTGLLHILKLTLQMRNSITGTETDYLVSPVADENGIFYDSRSCGDELPENADANGAYNIARKGLMMIEQIKEAKDLDNLKFDISNKSWLNFAQQKPYKNE

SEQ ID NO: 1555 - protein, 1177 aa, unidentified
  REGION 1..1177: note = Description of Unknown: uncultivated organism sequence
  REGION 1..1177: note = Category: MG75 effectors
  REGION 1..1177: note = Description: MG75-41 effector
MQKKAFEENQQNLRSIIAKKLTEDKAYANLFGKNLLESYKDKTDKTKIIDSDLIKFINTAESTQLDSMSQDEAKEIVKEFWGFTTYFVGFFDNRKNMYTAEEKSTGIAYRLINENLPKFIDNMEAFKKAIARPEIQADMEELYSNFSEYLNVESIQEMFLLDYYNMLLTQKQIDVYNAIIGGKTDDEHDVKIKGINEYINLYNQQHKDDKLPKLKALFKQILSDRNAISWLPEEFNSDQEVLNAIKDCYERLSENVLGDKVLKSMLGSLADYSLDGIFIRNDLQLTDISQKMFGNWSVIQNAIMQNIKHVAPARKHKESEEEYENRIAGIFKKADSFSISYIDACLNETDPNNAYFVENYFATLGAVDTPTMQRENLFALVQNAYTEITALLHSDYPTEKNLAQDKANVAKIKALLDAIKSLQHFVKPLLGKGDESDKDERFYGELASLWAELDTMTPLYNMIRNYMTRKPYSQKKIKLNFENPQLLGGWDANKEKDYATIILRRNGLYYLAIMNKDSKKLLGKAMPSDGECYEKMVYKLLPGANKMLPKVFFAKSRMEDFKPSKELVEKYNNGTHKKGKNFNIQDCHNLIDYFKQSIDKHEDWSKFGFKFSDTSTYEDLSGFYREVEQQGYKLSFARVSVSYINQLVEEGKMYLFQIYNKDFSEYSKGTPNMHTLYWKALFDERNLADVVYKLNGQAEMFYRKKSIENTHPTHPANHPILNKNKDNKKKESLFEYDLIKDRRYTVDKFMFHVPITMNFKSVGSENINQDVKAYLRHADDMHIIGIDRGERHLLYLVVIDLQGNIKEQFSLNEIVNDYNGNTYHTNYHDLLDVREDERLKARQSWQTIENIKELKEGYLSQVIHKITQLMVKYHAIVVLEDLNMGFMRGRQKVEKQVYQKFEKMLIEKLNYLVDKKADASVSGGLLNAYQLTSKFDSFQKLRKQSGFLFYIPAWNTSKIDPITGFVNLLDTRYQNVEKAKAFFSKFDAIRYNKDKEWFEFDLDYDKFGRKAEGTRTKWTLCTRGMRIDTFRNKEKNSQWDNQEIDLTAEMKSLLEHYYIDIQGNLKEAICTQTDKAFFTGLLHILKLTLQMRNSITGTQTDYLVSPVADENGIFYDSRSCGDSLPENADANGAYNIARKGLMLIEKIKNAEDLDTIKFDISNKAWLNFAQQKPYKNG

SEQ ID NO: 1556 - protein, 886 aa, unidentified
  REGION 1..886: note = Description of Unknown: uncultivated organism sequence
  REGION 1..886: note = Category: MG75 effectors
  REGION 1..886: note = Description: MG75-42 effector
MFGNWGVIQNAVMQNIKRVAPARKHKESEEDYEKRIAGIFKKADSFSISYINDCLNEADPNNAYFVENYFATFGAVNTPTMQRENLFALVQNAYTEITALLHSDYPTEKNLAQDKANVAKIKALLDAIKSLQHFVKPLLGKGDESDKDERFYGELASLWAELDTMTPLYNMIRNYMTRKPYSQKKIKLNFENPQLLGGWDANKEKDYATIILRRNGLYYLAIMNKDSKKLLGKAMPSDGECYEKMVYKLLPGANKMLPKVFFAKSRMEDFKPSKELVEKYNNGTHKKGKNFNIQDCHNLIDYFKQSIDKHEDWSKFGFKFSDTSTYEDLSGFYREVEQQGYKLSFARVSVSYINQLVEEGKMYLFQIYNKDFSEYSKGTPNMHTLYWKALFDERNLADVVYKLNGQAEMFYRKKSIENTHPTHPANHPILNKNKDNNKKESLFEYDLIKDRRYTVDKFMFHVPITMNFKSSGSENINQDVKAYLCHADDMHIIGIDRGERHLLYLVVIDLQGNIKEQFSLNEIVNDYNGNTYHTNYHDLLDVREDERLKARQSWQTIENIKELKEGYLSQVIHKITQLMVKYHAIVVLEDLNMGFMRGRQKVEKQVYQKFEKMLIEKLNYLVDKKADASVSGGLLNAYQLTSKFDSFQKLGKQSGFLFYIPAWNTSKIDPVTGFVNLLDTRYQNVEKAKSFFSKFDAIRYNKDKEWFEFNLDYDKFGKKAEGTRTKWTLCTRGMRIDTFRNKEKNSQWDNQEVDLTAEMKSLLEHYYIDIHSNLKDAISAQTDKAFFTGLLHILKLTLQMRNSITGTETDYLVSPVVDENGIFYDSRSCGDELPENADANGAYNIARKGLMMIEQIKDAKDLDNLKFDISNKAWLNFAQQKPYKNG

SEQ ID NO: 1557 - protein, 1321 aa, unidentified
  REGION 1..1321: note = Description of Unknown: uncultivated organism sequence
  REGION 1..1321: note = Category: MG75 effectors
  REGION 1..1321: note = Description: MG75-43 effector
MEFDDFKRLYPLSKTLRFEAKPIGATLNNIIKSGLLEEDEHRAQSYVKVKKLIDEYHKVFIDRVLDDGCLTIENKGKKDSLEEYYESYMSKSNDENVSKTFKEIQENLRSVIAKKLTDDNAYANLFGNKLIESYKDKDDKKKIIDSDLIQFINTAEPSKLDSMSQDEAKELVKEFWGFTTYFEGFHKNRKNMYTSEEKSTGIAYRLVNENLPKFIDNMEAFKKAIAKPEIQANMEELYSNFAEYLNVESIQEMFQLDYYNMLLTQKQIDDYNAIIGGKTDEDHDVKIKGINEYINLYNQQHKDEKLPKLKALFKQILSDRNAISWLPEEFNSDQDVLNAIKDCYERLSENVLGDKVLKSLLCSLSDYNLNGIFVRNDLQLTDISQKMFGNWNVIQNAIMQNFFFKKVAPARKRKESEEDYEKRISDIFKKTDSFSIQYINDCLNEMDDNNLHAVDGYFATLGAVNTPTMQRENLFALIQNAYTDISDLLDTPYPENKNLAQDKTNVAKVKALLDAIKSLQHFVKPLLGKGDESDKDERFYGELASLWTELDTVTLLFNMVHNYMTRKPYSQKKIKLNYKNTQLLAGWDANKEKEHAAIILRRNGMYYLAIMDKDSKNLLDKAMPSDGECYEKMVYKQFDISKQLPKCTTELKRVRKALVEDAKRSCLLSDSKDWNKPLNVTRKLWELNNYVWDKKKADWVLRKKENETRPKKFHKKYLELTSDKNGYNQAKNDWIKFTKEFLSSYKKVEDYDIHYKKRYNSVDELYKQLNSDFYTISFTYVSVSFIDKLVNEGKMYLFKIYNKDFSNYSKGTPNMHTLYWKALFDERNLADVVYKLNGEAEMFYRKKSINNTHPTHPANHPIQNKNKDNKKKESVFEYDLVKDYRYTEDKFLFHVPITMNFKSVGSENINQQVKEYLQQADDTHIIGIDRGERHLLYLVVIDMEGNIKEQFSLNEIVNEYNGNTYRTNYHDLLDVCADKRLKASQSWQTIENIKELKEGYLSQAIHKITQLMVKYHAVVVLEDLNKGFMRGRQKVEKQVYQKFEKMLIDKLNYLVDKKADAAQSGGLLNAYQLTSKFDSFQKLGKQSGFLFYIPAWNTSKIDPVTGFVNLFDTRYTNADKALEFFSKFDAIRYNEEKDWFEFEFDYDKFTQKAHGTRTKWTLCTYGMRLRSFKNPAKQYNWDSEVVALTDEFKRILEEAGIDIHENLKDAIRNLKGKKQKYLEPLMQFMKLLLQLRNSKAGTDEDYILSPVADENGIFYDSRSCGDELPENADANGAYNIARKGLMMIEQIKDAKDLDNLKFDISNKAWLNFAQQKPYKNG

SEQ ID NO: 1558 - protein, 1274 aa, unidentified
  REGION 1..1274: note = Description of Unknown: uncultivated organism sequence
  REGION 1..1274: note = Category: MG75 effectors
  REGION 1..1274: note = Description: MG75-44 effector
MAKNFEDFKRLYPLSKTLRFEAKPIGATLDNMVKSGLLDEDEHRAASYVKVKKLIDEYHKVFIDRVLDNGCLPLKNEGHNNSLTEYYESYVTKSQNEDAKKVFKEIQQNLRSIIAKKLTEDKAYANLFGKNLIESYKDKTDKTKIIDSDLIKFINTAESTQLDSMSQDEAKELVKEFWGFTTYFVGFYDNRKNMYTAEEKSTGIAYRLVNENLPKFIDNMEAFKKAIARSEIQANMEELYSDFSEYLNVESVQEMFQLDYYNMLLTQKQIDVYNAIIGGKTDDEHDVKIKGINEYINLYNQQHKDDKLPKLKALFKQILSDRNAISWLPEEFNGDQEVLNAIKDCYERLSENVLGDKVLKSLLGSLSDYSLDGIFIRNDLQLTDISQKMFGNWCVIQNAIMQNIKHVAPARKHKESEEDYEKRIAGIFKKVDSFSISFINDCLNEADPNNAYFVENYFATFGAVNTPTMQRENLFALVQNAYTEVAALLHSDYPTAKHLAQDKVNVAKIKALLDAIKSLQHFVKPLLGKGDESDKDERFYGELASLWAELDTVTPLYNMIRNYMTRKPYSQKKIKLNFENPQLLGGWDANKEKDYATIILRRDGLYYLAIMNKESKKLLGKAMPSDGECYEKMVYKLLPGANKMLPKVFFAKSRMEDFKPSKELVEKYNNGTHKKGKNFNIQDCHNLIDYFKQSISKHEDWGKFGFNFSDTSTYEDLSGFYREVEQQGYKLSFTRVSVSYISQLVEEGKMYLFQIYNKDFSEYSKGTPNMHTLYWKALFDERNLADVVYKLNGQAEMFYRKKSIENTHPTHPANHPILNKNKDNKKKESLFDYDLIKDRRYTVDKFMFHVPITMNFKSSGSENINQDVKAYLRHADDMHIIGIDRGERHLLYLVVIDLQGNIKEQYSLNEIVNEYNGNTYHTNYHDLLDVREEERLKARQSWQTIENIKELKEGYLSQVIHKITQLMVKYHAIVVLEDLNMGFMRGRQKVEKQVYQKFEKMLIDKLNYLVDKKADASVSGGLLNAYQLTSKFDSFQKLGKQSGFLFYIPAWNTSKIDPVTGFVNLLDTRYQNVEKAKVFFSKFDAIRYNKDKDWFEFNLDYDKFGKKAEGTRTKWTLCTRGMRIDTFRNKEKNSQWDNQKVDLTAEMKSLLEHYYIDIHGNLKDAISAQTDKAFFTGLLHILKLTLQMRNSITGTETDYLVSPVADENGIFYDSRSCGDELPENADANGAYNIARKGLMMIEQIKDAKDLDNLKFDISNKSWLNFAQQKPYKNE

SEQ ID NO: 1559 - protein, 1272 aa, unidentified
  REGION 1..1272: note = Description of Unknown: uncultivated organism sequence
  REGION 1..1272: note = Category: MG75 effectors
  REGION 1..1272: note = Description: MG75-45 effector
MKFDDFKKLYSLSKTLRFEAKPVGSTLKNIIESGLLEEDEHRAQSYVKVKKLIDEYHKVFIDRVLNDGCLTIENKGKKDSLEEYYESYMSKSNDENVSKTFKEIQENLRSVIAKKLTDDNAYANLFGNKLIESYKDKDEKNKIIDSDLIQFINTAEPSQLDSMSQDEAKELVKEFWGFTTYFVGFFDNRKNMYTSEEKSTGIAYRLVNENLPKFIDNMEAFKKAIAKPEIQASMEELYSNFAEYLNVESIQEMFQLDYYNMLLTQKQIDVYNAIIGGKTDEEHDVKIKGINEYINLYNQQHKDEKLPKLKALFKQILSDRNAISWLPEEFNSDQEVLNAIDDCYKRLSENVLGDKVLKSLLCSLDDYNLDGIFVRNDLQLTDISQKMFGNWSVIQSAIMQNIKNVAPARKRKESEEDYEKRISDIFKKADSFSIQYINDCLNEMDNNNLHAVDGYFATLGAVNTPTMQRENLFALIQNAYTDISNLLETPYPENKNLAQDKTNVAKVKALLDAIKSLQHFVKPLLGKGDESDKDERFYGELASLWTELDTVTPLYNMIRNYMTRKPYSEKKIKLNFENPQLLGGWDANKEKDYATIILRRNGMYYLAIMDKDSKKLLGKTMPSNGECYEKMVYKLLPGANKMLPKVFFAKSRINDFKPSKLIVENYNNGTHKKGKNFNINDCHNLIDYFKQSIDKHEDWSKFGFNFSDTSTYEDLSGFYREVEQQGYKLSFTNVSVSFIDKLVDEGKMYLFQIYNKDFSDFSKGTPNMHTLYWKALFDERNLADVVYKLNGQAEMFYRKKSINNTHPTHPANHPIQNKNKDNKKKESVFEYDLIKDRRYTVDKFLFHVPITMNFKSVGSENINQQVREYLQQADDTHIIGIDRGERHLLYLVVIDMQGNIKEQFTLNEIVNEYNGNTYRTNYHDLLDTREEERLTARQSWQTIENIKELKEGYLSQVVHKITQLMVKYHAVVVLEDLNKGFMRGRQKVEKQVYQKFEKMLIDKLNYLVDKKADAAQSGGLLNAYQLTSKFDSFQKLGKQSGFLFYIPAWNTSKIDPVTGFVNLLDTRYQNTEKAKAFFSRFDAIRYNANKDWFEFYLDYDKFCTKAEGTRTRWTLCTQGSRISTFRNAEKNSQWDNLEVDLTREMKSLFEHYHINICGNLKEEICLQTDKAFFTGLLHMLKLTLQMRNNITGTETDYLISPVADENGTFYDSRSCGDTLPKNADANGAYNIARKGLMFIGQIKETKDLANFKYDISNKAWLNFAQQKPYKNE

SEQ ID NO: 1560 - protein, 1307 aa, unidentified
  REGION 1..1307: note = Description of Unknown: uncultivated organism sequence
  REGION 1..1307: note = Category: MG75 effectors
  REGION 1..1307: note = Description: MG75-46 effector
MAKKFEDFTKLYPLSKTLCFEARPIGATKSNIIKNGLLDEDKHRAESYVKVKKLIDEYHKAFIDRVLADGCLCYKNEGNEDSLEEYYEFYSLSSKDKSDDTRKHFATIQQNLRSKIAETLTKDKAYANLFGNKLIESHKDKEDKNNIIDSDLIQFVSTATPDQLDSQSKDDATKLIKEFWGFTTYFTGFFENRKNMYTSEEKSTGIAYRLINENLPKFIDNMESFKKIMEKPEMSANMEELRANLEEYLNVESISEMFELNYYNMLLTQKQIDVYNAVIGGKTDEEQDIKTKGINEYVNLYNQQHKDAKLPKLKTLFKQILSDRNAISWLPEEFDKDQNVLNAIKDCYVRLTANVLGNNVLNSLLSTLSEYNTESIFIRNDIQLTNISQKMAGSWNYIQDAIKQDIKNVAPARKRKESEEDYEERISKNFKKADSYSIKYIDDCLNRAYKNNTYTVEGYFATLGATNTPSLQRENLFAQIANAYTNISSLLSSDYSAEKNLAQDKENVAKIKTLLDCIKSLQHFVKPLLGKGDESDKDERFYGELSMLWKELDTVTPLYNMVRNYMTRKPYSQKKIKLNFENPQLLGGWDANKEKDYASILLRRDGKYYLGIMDKESKKLLGKPMPSDGDYYEKMVYKFFKDITTMIPKCSTQLKAVKEHFSKSNADFVLSGKNFNTPLIISKEVFELNNVKYGQFKKFQKDYVATTNDIEGYAHAVKIWIKFCMDFLGTYDSTISYDLSSLASNEYTSLDTFYQDVNRLLYAVSFIKVSVSHIDSLVEEGKMYLFQIYNKDFSEYSKGTPNMHTLYWKALFDERNLADVVYKLNGQAELFYREKSIDCTHPTHPANHPILNKNKDNEKKESIFEYDLIKDRRYTVDKFMFHVPITMNFKSTGADNINQLVREHLKDADAPHIIGIDRGERHLLYLVVIDMHGNIKEQFTLNDIVNEYNGNTYRTNYHDLLDAREDARLKARQSWQTIENIKELKEGYLSQVIHKITQLMVKYHAIVVLEDLSMGFMRGRQKVEKQVYQKFEKMLIDKLNYYVDKKANAEQAGGLLNAYQLTSKFDSFQKLGKQSGFLLYIPAWNTSKIDPVTGFVNLLDTRYQNVEKAKAFFCKFEAIRYNSNKNWFEFTIDYNNFGQKAEGTRTKWTLCTQGKRIRTFRNPEKNSEWDNQEIDLTSALKNLFAHYHIDINGNIKEAISAQSDKTFFTELLHLLKLTLQMRNSITGTETDYLISPVADDNGYFYDSRTCNDTLPKNADANGAYNIARKGLMLIEQIKKAKDIANIKFDISNKSWLNFAQQKPYKDE

SEQ ID NO: 1561 - protein, 1270 aa, unidentified
  REGION 1..1270: note = Description of Unknown: uncultivated organism sequence
  REGION 1..1270: note = Category: MG75 effectors
  REGION 1..1270: note = Description: MG75-47 effector
MEFDDFKRLYPLLKTLRFEAKPIGATLKNIIKSGLLEEDEHRAQSYVKVKKLIDEYHKVFIDRVLNDGCLTIENKGKQDSLEEYFESYISKSNDENANKAFKEIQGNLRSLIANKLTKDKGYANLFGKNLIESYKDKDDTKKIIDSDLIQFINTAEPSKLDSMSQDEAKELVKEFRGFTTYFVGFFDNRKNMYTSEEKSTGIAYRLVNENLPKFIDNMEAFKKAIAKPEIQANMEELYSNFAEYLNVESIQEMFKLDYYNMLLTQKQIDVYNAIIGGKTDEDHDVKIKGINEYINLYNQQHKDEKLPKLKALFKQILSDRNAISWLPEEFNSDQDVLNAIKDCYERLSENVLGDKVLKSLLCSLSDYNLNGIFVRNDLQLTDISQKTFGNWSVIQNAIMQNIKNVAPARKRKESEEDYEKRISDIFKKADSFSIQYINDCLNEMDNNNLHAVDGYFATLGAVNTPTMQRENLFALIQNAYTDISDLLDTPYPENKNLAQDKTNVAKVKALLDAIKSLQHFVKPLLGMGDESDKDERFYGELASLWTELDTVTPLYNMIRNYMTRKPYSEKKIKLNFENPQLLGGWDANKEKDYATIILRRNGMYYLAIMDKDSKKLLGKTMPSDGECYEKMVYKLLPGANKMLPKVFFAKSRINDFKPSKKIVENYNNGTHKKGKNFNINDCHDLIDYFKQSIDKHEDWSKFGFNFSDTSTYEDLSGFYREVEQQGYKLSFTNISVSFIDKLVDEGKMYLFQIYNKDFSDYSKGTPNMHTLYWKALFDERNLADVVYKLNGQAEMFYRKKSIDYTHPTHPANHPIQNKNKDNKKKESVFEYDLVKDRRYTVDKFLFHVPINMNFKSVGSENINQQVREYLQQADDTHIIGIDRGERHLLYLVVIDMQGNIKEQFTLNEIVNEYNGNTYRTNYHDLLDTREEERLTARQSWQTIENIKELKEGYLSQVVHKITQLMVKYHAVVVLEDLNKGFMRGRQKVEKQVYQKFEKMLIDKLNYLVDKKADAAQSGGLLNAYQLTSKFDSFQKLGKQSGFLFYIPAWNTSKIDPVTGFVNLLDTRYQNTEKSKAFFSKFDAIRYNADKDWFEFNLDYDKFGTKAEGTRTKWILCTQGNRICRNADKNPQWDNPKIDLTRELKSLFEHYNINICGNLKEEICSQTDKAFFTGLLHILKLTLQMRNSITGTETDYLVSPVADENGVFYDSRSCGDRLPENADANGAYNIARKGLMLIGQIKETKDLANFKYDISNKAWLNFAQQKPYKNE

SEQ ID NO: 1562 - protein, 1274 aa, unidentified
  REGION 1..1274: note = Description of Unknown: uncultivated organism sequence
  REGION 1..1274: note = Category: MG75 effectors
  REGION 1..1274: note = Description: MG75-48 effector
MAKNFEDFKRLYPLSKTLRFEAKPIGATLDNIIKSGLLDEDEHRAASYVKMKKLIDEYHKVFIDRVLDNGCLPLKNEGQNNSLTEYYESYVSKSQNEDAKKAFEENQQNLRSIVAKKLTDDKAYANLFGKNLIESYKDKEDKKKIIDSDLIQFICTAEATQLDSMSQDEAKEIVKEFWGFTTYFVGFFDNRKNMYTAEEKSTGIAYRLINENLPKFIDNMEAFKKAIARPEIQANMEELYSNFSEYLNVESIQEMFLLDYYNMLLTQKQIDVYNAIIGGKTDDEHDVKIKGINEYINLYNQQHKDDKLPKLKALFKQILSDRNAISWLPEEFNSDQEVLNAIKDCYERLSENVLGDKVLKSLLGSLSDYTLDGIFIRNDLQLTDISQKMFGNWGVIQNAIMQNIKRVAPARKHKESEEDYEKRIAGIFKKADSFSISYINDCLNEADPNNAYFVENYFATFGAVNTPTMQRENLFALVQNAYTEVASLLHSDYPTAKHLAQDKANVAKIKALLDAIKSLQHFVKPLLGKGDESDKDERFYGELASLWAELDTVTPLYNMIRNYITRKPYSQKKIKLNFENPQLLGGWDANKEKDYATIILRRNGLYYLAIMNKESKKLLGKAMPSDGECYEKMVYKLLPGANKMLPKVFFAKSRMEDFKPSKELVEKYNNGTHKKGKNFNIQDCHNLIDYFKQSINKHEDWGKFGFNFSDTSTYEDLSGFYREVEQQGYKLSFARVSVSYINQLVEEGKMYLFQIYNKDFSEYSKGTPNMHTLYWKALFDERNLADVVYKLNGQAEMFYRKKSIENTHPTHPANHPILNKNKDNKKKESLFDYDLIKDRRYTVDKFMFHVPITMNFKSSGSENINQDVKAYLRHADDMHIIGIDRGERHLLYLVVIDLQGNIKEQYSLNEIVNEYNGNTYHTNYHDLLDVREEERLKARQSWQTIENIKELKEGYLSQVIHKITQLMVKYHAIVVLEDLNMGFMRGRQKVEKQVYQKFEKMLIDKLNYLVDKKADASVSGGWLNAYQLTSKFDSFQKLGKQSGFLFYIPAWNTSKIDPVTGFVNLLDARYQNVEKAKAFFSKFDAIRYNKDKDWFEFNLDYDKFGKKAEGTRTKWTLCTRGMRIDTFRNKEKNSQWDNQEVDLTAEMKSLLEHYYIDIHGNLKDAISAQTDKAFFTGLLHILKLTLQMRNSITGTETDYLVSPVADENGIFYDSRSCGEELPENADANGAYNIARKGLMLIEQIKGAEDLGNLKFDISNKAWLNFAQQKPYKNG

SEQ ID NO: 1563 - protein, 1274 aa, unidentified
  REGION 1..1274: note = Description of Unknown: uncultivated organism sequence
  REGION 1..1274: note = Category: MG75 effectors
  REGION 1..1274: note = Description: MG75-49 effector
MAKNFEDFKRLYPLSKTLRFEAKPIGATLDNIVKSGLLDEDEHRAASYVKVKKLIDEYHKVFIDRVLDDGCLPLENKGNNNSLAEYYESYVSRAQDEDAKKKFKEIQQNLRSVIAKKLTEDKAYANLFGNKLIESYKDKEDKKKIIDSDLIQFINTAESTQLDSMSQDEAKELVKEFWGFVTYFYGFFDNRKNMYTAEEKSTGIAYRLVNENLPKFIDNIEAFNRAITRPEIQENMGVLYSDFSEYLNVESIQEMFQLDYYNMLLTQKQIDVYNAIIGGKTDDEHDVKIKGINEYINLYNQKHKDDKLPKLKSLFKQILSDRNAISWLPEEFNSDQEVLNAIKDCYERLSENVLGDKVLKSMLGSLADYSLDGIFIRNDLQLTDISQKMFGNWSVIQNAIMQNIKHVAPARKHKESEEEYENRIAGIFKKADSFSISYIDACLNETDPNNAYFVENYFATLGAVDTPTMQRENLFALVQNAYTEITALLHSDYPTEKNLAQDKANVAKIKALLDAIKSLQHFVKPLLGKGDESDKDERFYGELASLWAELDTMTPLYNMIRNYMTRKPYSQKKIKLNFENPQLLGGWDANKEKDYATIILRRNGLYYLAIMNKDSKKLLGKAMPSDGECYEKMVYKLLPGANKMLPKVFFAKSRMEDFKPSKELVEKYNNGTHKKGKNFNIQDCHNLIDYFKQSIDKHEDWSKFGFKFSDTSTYEDLSGFYREVEQQGYKLSFARVSVSYINQLVEEGKMYLFQIYNKDFSEYSKGTPNMHTLYWKALFDERNLADVVYKLNGQAEMFYRKKSIENTHPTHPANHPILNKNKDNNKKESLFEYDLIKDRRYTVDKFMFHVPITMNFKSSGSENINQDVKAYLCHADDMHIIGIDRGERHLLYLVVIDLQGNIKEQFSLNEIVNDYNGNTYHTNYHDLLDVREDERLKARQSWQTIENIKELKEGYLSQVIHKITQLMVKYHAIVVLEDLNMGFMRGRQKVEKQVYQKFEKMLIEKLNYLVDKKADASVSGGLLNAYQLTSKFDSFQKLGKQSGFLFYIPAWNTSKIDPVTGFVNLLDTRYQNVEKAKSFFSKFDAIRYNKDKEWFEFNLDYDKFGKKAEGTRTKWTLCTRGMRIDTFRNKEKNSQWDNQEVDLTAEMKSLLEHYYIDIHSNLKDAISAQTDKAFFTGLLHILKLTLQMRNSITGTETDYLVSPVVDENGIFYDSRSCGDELPENADANGAYNIARKGLMMIEQIKDAKDLDNLKFDISNKAWLNFAQQKPYKNG

SEQ ID NO: 1564 - protein, 1271 aa, unidentified
  REGION 1..1271: note = Description of Unknown: uncultivated organism sequence
  REGION 1..1271: note = Category: MG75 effectors
  REGION 1..1271: note = Description: MG75-50 effector
MKFDDFKKLYSLSKTLRFESKPVGSTLKNIIESGLLEEDEHRAQSYVKVKKLIDEYHKVFIDRVLNDGCLTIENKGKKDSLEEYYESYMSKSNDENVSKTFKDIQENLRSVIAKKLTDDKAYANLFGKNLIESYKDKDDKNKIIDSDLIQFINTAEPSQLDSMSQDEAKELVKEFWGFTTYFVGFFDNRKNMYTSEEKSTGIAYRLVNENLPKFIDNMEAFKKAIAKPEIQANIEELYSNFAEYLNVESIQEMFQLDYYNMLLTQKQIDVYNAIIGGKTDEDHDVKIKGINEYINLYNQQHKDEKLPKLKALFKQILSDRNAISWLPEEFNSDQEVLDAIKDCYERLSENVLGDKVLKSLLCSLSDYNLNGIFVRNDLQLTDISQKMFGNWSVIQNAIMQNIKNVAPARKRKESEEDYEKRISDIFKKADSFSIQYINDCLNEMDDNNLHAVDGYFATLGAVNTPTMQRENLFALIQNAYTDISDLLDTPYPENKNLAQDKTNVAKVKALLDAIKSLQHFVKPLLGMGDESDKDERFYGELASLWTELDTVTPLYNMIRNYMTRKPYSEKKIKLNFENPQLLGGWDANKEKDYATIILRRNGMYYLAIMDKDSKKLLGKTMPSDGECYEKMVYKLLPGANKMLPKVFFAKSRINDFKPSKKIVENYNNGTHKKGKNFNINDCHDLIDYFKQSIDKHEDWSKFGFNFSDTSTYEDLSGFYREVEQQGYKLSFTNISVSFIDKLVDEGKMYLFQIYNKDFSDYSKGTPNMHTLYWKALFDERNLADVVYKLNGQAEMFYRKKSIDYTHPTHPANHPIQNKNKDNKKKESVFEYDLVKDRRYTVDKFLFHVPITMNFKSVGSENINQQVREYLQQADDTHIIGIDRGERHLLYLVVIDMQGNIKEQFTLNEIVNEYNGSTYRTNYHDLLDTREEERLTARQSWQTIENIKELKEGYLSQVIHKITQLMVKYHAVVVLEDLNKGFMRGRQKVEKQVYQKFEKMLIDKLNYLVDKKADAAQSGGLLNAYQLTSKFDSFQKLGKQSGFLFYIPAWNTSKIDPVTGFVNLLDTRYQNTEKAKAFFSKFDAIRYNADKDWFEFNLDYDKFGTKAEGTRTTWTLCTQGNRICTFRNAEKNSQWDNQEVDLTGELKSLFEHYNINICGNLKEEICSQTEKAFFTGLLHILKLTLQMRNSITGTETDYLVSPVADENGVFYDSRSCGDRLPENADANGAYNIARKGLMLIGQIKETKDLADFKYDISNKAWLNFAQQKPYKK

SEQ ID NO: 1565 - protein, 1219 aa, unidentified
  REGION 1..1219: note = Description of Unknown: uncultivated organism sequence
  REGION 1..1219: note = Category: MG75 effectors
  REGION 1..1219: note = Description: MG75-51 effector
MIDEYHKVFIDRVLNDGCLTIENKGKQDSLEEYFESYISKSNDENANKAFKEIQGNLRSLIANKLTKDKGYANLFGKNLIESYKDKDDTKKIIDSDLIQFINTAEPSKLDSMSQDEAKELVKEFRGFTTYFVGFFDNRKNMYTSEEKSTGIAYRLVNENLPKFIDNMEAFKKAIAKPEIQANMEELYSNFAEYLNVESIQEMFKLDYYNMLLTQKQIDVYNAIIGGKTDEDHDVKIKGINEYINLYNQQHKDEKLPKLKALFKQILSDRNAISWLPEEFNSDQDVLNAIKDCYERLSENVLGDKVLKSLLCSLSDYNLNGIFVRNDLQLTDISQKTFGNWSVIQNAIMQNIKNVAPARKRKESEEDYEKRISDIFKKADSFSIQYINDCLNEMDNNNLHAVDGYFATLGAVNTPTMQRENLFALIQNAYTDISDLLDTPYPENKNLAQDKTNVAKVKALLDAIKSLQHFVKPLLGMGDESDKDERFYGELASLWTELDTVTPLYNMIRNYMTRKPYSEKKIKLNFENPQLLGGWDANKEKDYATIILRRNGMYYLAIMDKDSKKLLGKTMPSDGECYEKMVYKLLPGANKMLPKVFFAKSRINDFKPSKKIVENYNNGTHKKGKNFNINDCHDLIDYFKQSIDKHEDWSKFGFNFSDTSTYEDLSGFYREVEQQGYKLSFTNISVSFIDKLVDEGKMYLFQIYNKDFSDYSKGTPNMHTLYWKALFDERNLADVVYKLNGQAEMFYRKKSIDYTHPTHPANHPIQNKNKDNKKKESVFEYDLVKDRRYTVDKFLFHVPINMNFKSVGSENINQQVREYLQQADDTHIIGIDRGERHLLYLVVIDMQGNIKEQFTLNEIVNEYNGNTYRTNYHDLLDTREEERLTARQSWQTIENIKELKEGYLSQVVHKITQLMVKYHAVVVLEDLNKGFMRGRQKVEKQVYQKFEKMLIDKLNYLVDKKADAAQSGGLLNAYQLTSKFDSFQKLGKQSGFLFYIPAWNTSKIDPVTGFVNLLDTRYQNTEKSKAFFSKFDAIRYNADKDWFEFNLDYDKFGTKAEGTRTKWILCTQGNRICRNADKNPQWDNPKIDLTRELKSLFEHYNINICGNLKEEICSQTDKAFFTGLLHILKLTLQMRNSITGTETDYLVSPVADENGVFYDSRSCGDRLPENADANGAYNIARKGLMLIGQIKETKDLANFKYDISNKAWLNFAQQKPYKNE

SEQ ID NO: 1566 - protein, 1235 aa, unidentified
  REGION 1..1235: note = Description of Unknown: uncultivated organism sequence
  REGION 1..1235: note = Category: MG75 effectors
  REGION 1..1235: note = Description: MG75-52 effector
METFSGFTNLYPLSKTLRFRLIPVGETLKHFIGSGILEEDQHRAESYVKVKAIIDDYHRAYIENSLSGFELPLESTGKFNSLEEYYLYHNIRNKTEKNQKSLSTVRFNLRKQIVKQLTKNELYKRIYKQNLIKKDLIDFVKNEPDANEKIALISEFRNFTVYFKGFHENRRNMYLDEEKSTSIAFRLIHENLPKFIDNMEVFAKIQNTSISENFDVIQKELCPELVTLCEMFKLGYFNKTLSQKQINAYNTVIGELNKYLNHYNQQHKQEKLPKMKLLFKQILSDRESTSWLPERFANDGQVIGAIVNFWNTIHDTVLAEGGLKTIIASLGSYSLEGIFLKNDLQLTDVSQKATGSWSKITAAIKQKLEDMNPQTKKESYETYQGRIDKLFKFYKSFSLAFINECLRGEYKIEDYFLKLGAVNSSSLQKENHFSHILNTYTDVKEVIGFYSESTDTKLIRDNGSIQKIKLFLDAVKDLQAYVKPLLGNGDETGKDERFYGDLIEYWSQLDLITPLYNMVRNYVTQKPYSVDKIKLNFRNPTLLDGWDLNQETANTSVILRRDGKYYLAIMNNKSRKVFLKPSGTGKDCYEKMEYKLIPGAYKMLPKVFFAKSKINKFMPDEYLLSNYKKGTHKKNNANFDLDDCHTLIDFFKRSLNKHEDWKNFDFKFSDTSTYTDINNFYKEIDNQAYKLSFRPVPSDFVDKLVEEGKIFLFWIYNKDFSGHSKGTPNMHTLYWRMLFDERNLEDVVYSLNGGAEVFFRKASINVSHPTHPANIPIKKKNLKHKGEERILKYDLIKDKRYTIDQFQFHVPITMNFKVAGNGNININQKAIDYLRSASDTHIIGIDRGERNLLYLVVIDGNGKICEQFSLNEIEVEYNGEKYSTNYHDLLNVKENERKQARQSWQSIANIKDLKEGYLSQVIHKISELIVKYNAIVVLEDLNAGFMRGRQKVEKQVYQKFEKKLIEKLNYLVFKKQSSDLPGGLMHAYQLANKFESFNTLGKQSGFLFYIPAWNTSKMDPVTGFVNLFDVKYESVDKAKSFFSKFDSIRYNVERDMFEWKFNYGEFTKKAEGAKTDWTVCSYGNRIITFRNPDKNSQWDNKEINLTENIKLLFERFGIDLSSNLKDEIMERTEKEFFIELISLFKLVLQMRNSWTGTDIDYLVSPVCNENGEFFDSRNVDETLPQNADANGAYNIARKGMILLDKIKKNNGEKKLALSITNREWLSFAQGCCKNG

SEQ ID NO: 1567 - protein, 1275 aa, unidentified
  REGION 1..1275: note = Description of Unknown: uncultivated organism sequence
  REGION 1..1275: note = Category: MG75 effectors
  REGION 1..1275: note = Description: MG75-53 effector
MAKNFEDFKRLYPLSKTLRFEAKPIGATLDNIVKSGLLDEDEHRAASYVKVKKLIDEYHKVFIDRVLADGCLPLENEGHNNSLTEYYDSYVSKSQNEDAKKVFEENQQNLRSIIAKKLTEDKAYSNLFGTKLIESYKDKADKAKIIDSELIQFINTAESTQLDSMSQDEAKKLVKEFWGFTTYFVGFFDNRKNMYTAEEKSTGIAYRLVNENLPKFIDNMEAFKKAIARPEIQANMGELYSNFSEYLNVESVPEMFQLDYYNMLLTQKQIDVYNAIIGGKTDDEHDVKIKGINEYINLYNQQHKDDKLPKLKALFKQILSDRNAISWLPEEFNSDQEVLNAIKDCYERLSENVLGDKVLKSLLGSLADYSLDGIFIRNDLQLTDISQKMFGNWGVIQNAIMQNIKHVAPARKHKESEEDYEKRIAGIFKKADSFSISYINDCLNEADPNNAYFVENYFATLGAVDTPTMQRENLFALVQNAYTEMTALLHSDYPTEKKLAQDKANVAKIKALLDAIKSLQHFVKPLLGKGDESDKDERFYGELALLWAELETVTPLYNMIRNYMTRKPYSQKKIKLNFENPQLLGGWDANKEKDYATIILRRNGLYYLAIMNKDSKKLLGKAMPSDGECYEKMVYKLLPGANKMLPKVFFAKSRMEDFKPSKELVEKYNNGTHKKGKNFNIQDCHNLIDYFKQSIDKHEDWSKFGFNFSDTSTYEDLSGFYREVEQQGYKLSFTRVSVSFIDQLVEEGKMYLFQIYNKDFSEYSKGTPNMHTLYWKALFDERNLADVVYKLNGQAEMFYRKKSIENTHPTHPANHPILNKNKDNKKKESLFGYDLIKDRRYTVDKFMFHVPITMNFKSSGSENINQDVKAYLRHADDMHIIGIDRGERHLLYLVVIDLQGNIKDQFSLNEIVNDYNGNTYHTNYHDLLDVREEERLKARQSWQTIENIKELKEGYLSQVIHKITQLMVRYHAIVVLEDLSKGFMRSRQKVEKQVYQKFEKMLIDKLNYLVDKKTDVSTPGGLLNAYQLTCKSDSSQKLGKQSGFLFYIPAWNTSKIDPVTGFVNLLDTHSLNSKEKIKAFFSKFDAIRYNKDKKWFEFNLDYDKFGKKAEDTRTKWTLCTRGMRIDTFRNKEKNSQWDNQEVDLTTEMKSLLEHYYIDIHGNLKDAISTQTDKAFFTGLLHILKLTLQMRNSITGTETDYLVSPVADENGIFYDSRSCGDQLPENADANGAYNIARKGLMLIEQIKNAEDLNNVKFDISNKAWLNFAQQKPYKNG

SEQ ID NO: 1568 - protein, 1274 aa, unidentified
  REGION 1..1274: note = Description of Unknown: uncultivated organism sequence
  REGION 1..1274: note = Category: MG75 effectors
  REGION 1..1274: note = Description: MG75-54 effector
MIKEFEDFKRLYPIQKTLRFEAKPIGSTLEHLVKSGILDEDEHRAASYVRVKKLIDEYHKAFIDRVLNDGCLPFKNKGEKNSIEEYYESYTSKDKEEDSKKRFKEIQQNLRSIIVNKLTKDKAYANLFGNYLIESHKDKEDKKTMIDSDLIQFIKDADSLELGSMSKDEAIELVKEFWSFTTYFVGFYDNRKNMYSAEEKSTAIAYRLINENLPKFIDNMEAFKKIISRPEIQANTEQLYSDFAEYLNVESIQEMFQLDYYDLLLTQKQIDVYNAIIGGKTDEKHDIKTKGINEYINLYNQQHKEDKLPKLKVLFKQILSDRNAISWLPEEFNSDQEMLISIKDCYERLCINVLGDKVLKSLLSSLDDYELEGIFLQNDQQLTNISQKIFGSWSVIQEAITRNIKNTAPARKHKETEEDYEKRIFSIFKQASSFSIKYIDDCLYDLDKNNINTIENYFATLGAENTPEIQRENLFAIIKNAYTDVAGLLCSAYPTEKNLSQDENHVAKIKALLDAIKSLQHFVKPLLGNGDEHDKDERFYGELVSLWTELDTVTPLYNMVRNRITQKPYSQKKIKLNFENPQLLGGWDANKEKDYSCIILRREGMYYLAIMDKDSRKLLGKEMPSDGECYEKMVYKLLPGANKMLPKVFFAKSRIEEFMPSEQIIEKYNNGTHKKGKDFNITDCHNLIDYFKQSINKHEDWSKFGFTFSETSTYEDLSGFYREVEQQGYKLSFTNVSASYINSLVDEGKMYLFQIYNKDFSEYSKGTPNMHTLYWKALFDEQNLADVIYKLNGQAEIFYRKKSIDATHPTHPANRPVQNKNKDNKKKESLFEYDLIKDRRYSVDKFMFHVPITMNFKSSGSENINQQVKEYLQLANDTHIIGIDRGERHLLYLVVIDMHGNIKEQFSLNEIVNTYKGNIYHTNYHDLLEAREEERLKARQSWQTIENIKELKEGYLSQVVHKITQLMVKYHAIVVLEDLNMGFMRGRQKVEKQVYQKFEKMLIDKLNYLVNKQANITEAGGLLNAYQLTSKFDSFQKLGKQSGFLFYIPAWNTSKIDPVTGFVNLLDTRYQNVEKAKAFFSKFDAIRFNQDKDWFEFNLDYNKFGEKAEGTRTRWTLCTQGKRIYTFRNEDKNSQWDNIEIDLTSEMKSLLELYHIDIQGNLKEAINSQTDKSFFTKLIHLLKLTLQIRNSITRTETDYLISPVADEDGEFYDSRSCGPELPKNADANGAYNIARKGLMLIRQIKEAKELDKIKFDISNKAWLNFAQQKPYKND

SEQ ID NO: 1569 - protein, 957 aa, unidentified
  REGION 1..957: note = Description of Unknown: uncultivated organism sequence
  REGION 1..957: note = Category: MG75 effectors
  REGION 1..957: note = Description: MG75-55 effector
MAKNFEDFKRLYSLSKTLRFEAKPIGATLDNIVKSGLLDEDEHRAASYVKVKKLIDEYHKVFIDRVLANGCLPLKNEGHNNSLTEYYDNYVSKSQNEDAKKTFEENQQNLRSIIAKKLTEDKAYANLFGKNLLESYKDKTDKTKIIDSDLFKFINTAESTQLDSMSQDEAKELVKEFWGFITYFYGFFDNRKNMYTSEDKSTGIAYRLINENLPKFIDNMEAFNTAVTRPEIQANMDELYSNFSEYLNVESIQEMFQLDYYNMLLTQKQIDVYNAIIGGKTDDEHDVKIKGINEYINLYNQKHKDDKLPKLKALFKQILSDRNAISWLPEEFNSDQEVLNAIKDCYERLSENVLGDKVLKSLLGSLADYSLDGIFIRNDLQLTDISQKMFGNWGVIQNAIMQDIKHVAPARKHKESEEDYEKRIAGIFKKADSFSISYINDCLNEADPNNAYFVENYFATLGAVDTPTMQRENLFALVQNAYTEITALLHSDYPTEKNLAQDKANVAKIKALLDAIKSLQHFVKPLLGKGDESDKDERFYGELASLWTELDTVTPLYNMIRNYMTRKPYSQKKIKLNFENPQLLGGWDVNKEKDYATIILRRNGLYYLAIMNKDSKKLLGKAMPSDGECYEKMVYKLLPGANKMLPKVFFAKSRMEDFKPSKELVEKYNNGTHKKGKNFNIQDCHNLIDYFKQSIDKHEDWSKFGFKFSDTSTYEDFSGFYREVEQQGYKLSFARVSVSYINQLVEEGKMYLFQIYNKDFSEYSKGTPNMHTLYWKALFDERNLADVVYKLNGQAEMFYRKKSIENTHPTHPANHPILNKNKDNKKKESLFDYDLIKDRRYTVDKFMFHVPITMNFKSVGSENINQDVKAYLRHADDMHIIGIDRGERHLLYLVVIDLQGNIKEQYSLNEIVNEYNGNTYHTNYHDLLDVREEERLKARQSWQTIENIKELKEGYLS

SEQ ID NO: 1570 - protein, 1270 aa, unidentified
  REGION 1..1270: note = Description of Unknown: uncultivated organism sequence
  REGION 1..1270: note = Category: MG75 effectors
  REGION 1..1270: note = Description: MG75-56 effector
MEFDDFKRLYPLSKTLRFEAKPIGATLKNIIKSGLLEEDEHRAQSYVKVKKLIDEYHKVFIDRVLNDGCLTIENKGKQDSLEEYFESYISKSNDENANKAFKEIQGNLRSLIANKLTKDKGYANLFGNKLIESYKDKDDTKKIIDSDLIQFINTAEPSKLDSMSQDEAKELVKEFRGFTTYFVGFFDNRKNMYTSEEKSTGIAYRLVNENLPKFIDNMEAFKKAIAKPEIQANMEELYSNFAEYLNVESIQEMFKLDYYNMLLTQKQIDVYNAIIGGKTDEDHDVKIKGINEYINLYNQQHKDEKLPKLKALFKQILSDRNAISWLPEEFNSDQDVLNAIKDCYERLSENVLGDKVLKSLLCSLSDYNLNGIFVRNDLQLTDISQKTFGNWSVIQNAIMQNIKNVAPARKRKESEEDYEKRISDILKKADSFSIQYINDCLNEMDNNNLHAVDGYFATLGAVNTPTMQRENLFALIQNAYTDISDLLDTPYPENKNLAQDKTNVAKVKALLDAIKSLQHFVKPLLGMGDESDKDERFYGELASLWTELDTVTPLYNMIRNYMTRKPYSEKKIKLNFENPQLLGGWDANKEKDYATIILRRNGMYYLAIMDKDSKKLLGKTMPSDGECYEKMVYKLLPGANKMLPKVFFAKSRINDFKPSKKIVENYNNGTHKKGKNFNINDCHNLIDYFKQSIDKHEDWSKFGFNFSDTSTYEDLSGFYREVEQQGYKLSFTNISVSFIDKLVDEGKMYLFQIYNKDFSDYSKGTPNMHTLYWKALFDERNLADVVYKLNGQAEMFYRKKSIDYTHPTHPANHPIQNKNKDNKKKESVFEYDLVKDRRYTVDKFLFHVPITMNFKSVGSENINQQVREYLQQADDTHIIGIDRGERHLLYLVVIDMQGNIKEQFTLNEIVNEYNGNTYRTNYHDLLDTREEKRLTARQSWQTIENIKELKEGYLSQVVHKITQLMVKYHAVVVLEDLNKGFMRGRQKVEKQVYQKFEKMLIDKLNYLVDKKADAAQSGGLLNAYQLTSKFDSFQKLGKQSGFLFYIPAWNTSKIDPVTGFVNLLDTRYQNTEKSKAFFSKFDAIRYNADKDWFEFNLDYDKFGTKAEGTRTKWILCTQGNRICRNADKNPQWDNPKIDLTRELKSLFEHYNINICGNLKEEICSQTDKAFFTGLLHILKLTLQMRNSITGTETDYLVSPVADENGVFYDSRSCGDRLPENADANGAYNIARKGLMLIGQIKETKDLANFKYDISNKAWLNFAQQKPYKNE

SEQ ID NO: 1571 - protein, 1292 aa, unidentified
  REGION 1..1292: note = Description of Unknown: uncultivated organism sequence
  REGION 1..1292: note = Category: MG75 effectors
  REGION 1..1292: note = Description: MG75-57 effector
MNRKTKYQKPKTESKIKSMIKEFEDFKRLYPIQKTLRFEAKPIGSTLEHLVKSGILDEDEHRAASYVRVKKLIDEYHKAFIDRVLNDGCLPFKNKGEKNSIEEYYESYTSKDKEEDSKKRFKEIQQNLRSIIVNKLTKDKAYANLFGNYLIESHKDKEDKKTMIDSDLIQFIKDADSLELGSMSKDEAIELVKEFWSFTTYFVGFYDNRKNMYSAEEKSTAIAYRLINENLPKFIDNMEAFKKIISRPEIQANTEQLYSDFAEYLNVESIQEMFQLDYYDLLLTQKQIDVYNAIIGGKTDEKHDIKTKGINEYINLYNQQHKEDKLPKLKVLFKQILSDRNAISWLPEEFNSDQEMLISIKDCYERLCINVLGDKVLKSLLSSLDDYELEGIFLQNDQQLTNISQKIFGSWSVIQEAITRNIKNTAPARKHKETEEDYEKRIFSIFKQASSFSIKYIDDCLYDLDKNNINTIENYFATLGAENTPEIQRENLFAIIKNAYTDVAGLLCSAYPTEKNLSQDENHVAKIKALLDAIKSLQHFVKPLLGNGDEHDKDERFYGELVSLWTELDTVTPLYNMVRNRITQKPYSQKKIKLNFENPQLLGGWDANKEKDYSCIILRREGMYYLAIMDKDSRKLLGKEMPSDGECYEKMVYKLLPGANKMLPKVFFAKSRIEEFMPSEQIIEKYNNGTHKKGKDFNITDCHNLIDYFKQSINKHEDWSKFGFTFSETSTYEDLSGFYREVEQQGYKLSFTNVSASYINSLVDEGKMYLFQIYNKDFSEYSKGTPNMHTLYWKAPFDEQNLADVIYKLNGQAEIFYRKKSIDATHPTHPANRPVQNKNKDNKKKESLFEYDLIKDRRYSVDKFMFHVPITMNFKSSGSENINQQVKEYLQLANDTHIIGIDRGERHLLYLVVIDMHGNIKEQFSLNEIVNTYKGNIYHTNYHDLLEAREEERLKARQSWQTIENIKELKEGYLSQVVHKITQLMVKYHAIVVLEDLNMGFMRGRQKVEKQVYQKFEKMLIDKLNYLVNKQANITEAGGLLNAYQLTSKFDSFQKLGKQSGFLFYIPAWNTSKIDPVTGFVNLLDTRYQNVEKAKAFFSKFDAIRFNQDKDWFEFNLDYNKFGEKAEGTRTRWTLCTQGKRIYTFRNEDKNSQWDNIEIDLTSEMKSLLELYHIDIQGNLKEAINSQTDKSFFTKLIHLLKLTLQIRNSITRTETDYLISPVADEDGEFYDSRSCGPELPKNADANGAYNIARKGLMLIRQIKEAKELDKIKFDISNKAWLNFAQQKPYKND

SEQ ID NO: 1572 - protein, 1272 aa, unidentified
  REGION 1..1272: note = Description of Unknown: uncultivated organism sequence
  REGION 1..1272: note = Category: MG75 effectors
  REGION 1..1272: note = Description: MG75-58 effector
MKFDDFKKLYSLSKTLRFEAKPVGSTLKNIIESGLLEEDEHRAQSYVKVKKLIDEYHKVFIDRVLNDGCLTIENKGKKDSLEEYYESYMSKSNDENVSKTFKEIQENLRSVIAKKLTDNNAYANLFGNKLIESYKDKDEKNKIIDSDLIQFINTAEPSQLDSMSQDEAKELVKEFWGFTTYFVGFFDNRKNMYTSEEKSTGIAYRLVNENLPKFIDNMEAFKKAIAKPEIQANMEELYSNFAEYLNVESIQEMFQLDYYNMLLTQKQIDVYNAIIGGKTDEEHDVKIKGINEYINLYNQQHKDEKLPKLKALFKQILSDRNAISWLPEEFNSDQEVLNAIDDCYKRLSENVLGDKVLKSLLCSLDDYNLDGIFVRNDLQLTDISQKMFGNWSVIQNAIMQNIKNVAPARKRKESEEDYEKRISDIFKKADSFSIQYINDCLNEMDDNNLHAVDGYFATLGAVNTPAMQRENLFALIQNAYTDISNLLETPYPENKNLAQDKTNVAKVKALLDAIKSLQHFVKPLLGKGDESDKDERFYGELASLWTELDTVTPLYNMIRNYMTRKPYSEKKIKLNFENPQLLGGWDANKEKDYATIILRRNGMYYLAIMDKDSKKLLGKTMPSDGECYEKMVYKLLPGANKMLPKVFFAKSRINDFKPSKLIVENYNNGTHKKGKNFNINDCHNLIDYFKQSIDKHEDWSKFGFNFSDTSTYEDLSGFYREVEQQGYKLSFTNVSVSFIDKLVDEGKMYLFQIYNKDFSDFSKGTPNMHTLYWKALFDERNLADVVYKLNGQAEMFYRKKSINNTHPTHPANHPIQNKNKDNKKKESVFEYDLIKDRRYTVDKFLFHVPITMNFKSVGSENINQQVREYLQQADDTHIIGIDRGERHLLYLVVIDMQGNIKEQFTLNEIVNEYNGNTYRTNYHDLLDTREEERLTARQSWQTIENIKELKEGYLSQVVHKITQLMVKYHAVVVLEDLNKGFMRGRQKVEKQVYQKFEKMLIDKLNYLVDKKADAAQSGGLLNAYQLTSKFDSFQKLGKQSGFLFYIPAWNTSKIDPVTGFVNLLDTRYQNTEKAKAFFSRFDAIRYNANKDWFEFYLDYDKFCTKAEGTRTRWTLCTQGSRISTFRNADKNSQWDNQKVDLTREIKSLFNYYHINICGNLKEEICSQTDKAFFTGLLHMLKLTLQMRNSITGTETDYLISPVADENGTFYDSRSCGDTLPKNADANGAYNIARKGLMFIGQIKKTKDLANFKYDISNKAWLNFAQQKPYKNE

SEQ ID NO: 1573 - protein, 1274 aa, unidentified
  REGION 1..1274: note = Description of Unknown: uncultivated organism sequence
  REGION 1..1274: note = Category: MG75 effectors
  REGION 1..1274: note = Description: MG75-59 effector
MAKNFEDFKRLYPLSKTLRFEAKPIGATLDNIIKSGLLDEDEHRAASYVKMKKLIDEYHKVFIDRVLDNGCLPLEDKGDNNSLAEYYESYVSKAQDEDAIKKFKEIQQNLCSIIAKKLTDDKAYANLFGNKLIESYKDKADKTKIIDSDLIQFINTAESTQLVSMSQDEAKELVKEFWGFTTYFEGFFKNRKNMYTPEEKSTGIAYRLINENLPKFIDNMEAFKKAITRPEIQANMEELYSDFSEYLNVESIQEMFQLDYYNMLLTQKQIDVYNAIIGGKTDDEHDVKIKGINEYINLYNQQHKDDKLPKLKALFKQILSDRNAISWLPEEFNSDQEVLNAIKDCYERLAENVLGDKVLKSLLCSLSDYTLDGIFIRNDLQLTDISQKMFGNWGVIQNAIMQNIKRVAPARKHKESEEDYEKRIAGIFKKADSFSISYINDCLNEADSNNAYFVENYFATFGAVNTPTMQRENLFALVQNAYTEVASLLHSDYPTAKHLAQDKANVAKIKALLDAIKSLQHFVKPLLGKGDESDKDERFYGELASLWAELDTVTPLYNMIRNYITRKPYSQKKIKLNFENPQLLGGWDANKEKDYATIILRRNGLYYLAIMNKESKKLLGKAMPSDGECYEKMVYKLLPGANKMLPKVFFAKSRMEDFKPSKELVEKYNNGTHKKGKNFNIQDCHNLIDYFKQSISKHEDWGKFGFNFSDTSTYEDLSGFYREVEQQGYKLSFARVSVSYINQLVEEGKMYLFQIYNKDFSEYSKGTPNMHTLYWKALFDERNLADVVYKLNGQAEMFYRKKSIENTHPTHPANHPILNKNKDNKKKESLFEYDLIKDRRYTVDKFMFHVPITMNFKSVGSENINQGVKEYLHHADDMHIIGIDRGERHLLYLVVIDLQGNIKEQYSLNEIVNEYNGNTYHTNYHDLLDAREDERLKARQSWQTIENIKELKEGYLSQVIHKITQLMVKYHAIVVLEDLNMGFMRGRQKVEKQVYQKFEKMLIDKLNYLVDKKADASVSGGWLNAYQLTSKFDSFQKLGKQSGFLFYIPAWNTSKIDPVTGFVNLLDARYQNVEKAKAFFSKFDAIRYNKDKDWFEFNLDYDKFGKKAEGTRTKWTLCTRGMRIDTFRNKEKNSQWDNQEVDLTAEMKSLLEHYYIDIHGNLKDAISAQTDKAFFTGLLHILKLTLQMRNSITGTETDYLVSPVADENGIFYDSRSCGEELPENADANGAYNIARKGLMLIEQIKGAEDLGNLKFDISNKAWLNFAQKKPYKNG

SEQ ID NO: 1574 - protein, 1275 aa, unidentified
  REGION 1..1275: note = Description of Unknown: uncultivated organism sequence
  REGION 1..1275: note = Category: MG75 effectors
  REGION 1..1275: note = Description: MG75-60 effector
MAKNFEDFKRLYSLSKTLRFEAKPIGATLDNIVKSGLLDEDEHRAASYVKVKKLIDEYHKVFIDRVLANGCLPLKNEGHNNSLTEYYDNYVSKSQNEDAKKTFEENQQNLRSIIAKKLTEDKAYANLFGKNLLESYKDKTDKTKIIDSDLFKFINTAESTQLDSMSQDEAKELVKEFWGFITYFYGFFDNRKNMYTSEDKSTGIAYRLINENLPKFIDNMEAFNTAVTRPEIQANMDELYSNFSEYLNVESIQEMFQLDYYNMLLTQKQIDVYNAIIGGKTDDEHDVKIKGINEYINLYNQKHKDDKLPKLKALFKQILSDRNAIFWLPEEFNSDQEVLNAIKDCYERLSENVLGDKVLKSLLGSLADYSLDGIFIRNDLQLTDISQKMFGNWGVIQNAIMQDIKHVAPARKHKESEEDYEKRIAGIFKKADSFSISYINDCLNEADPNNAYFVENYFATLGAVDTPTMQRENLFALVQNAYTEITALLHSDYPTEKNLAQDKANVAKIKALLDAIKSLQHFVKPLLGKGDESDKDERFYGELASLWTELDTVTPLYNMIRNYMTRKPYSQKKIKLNFENPQLLGGWDVNKEKDYATIILRRNGLYYLAIMNKDSKKLLGKAMPSDGECYEKMVYKLLPGANKMLPKVFFAKSRMEDFKPSKELVEKYNNGTHKKGKNFNIQDCHNLIDYFKQSIDKHEDWSKFGFKFSDTSTYEDFSGFYREVEQQGYKLSFARVSVSYINQLVEEGKMYLFQIYNKDFSEYSKGTPNMYTLYWKALFDERNLADVVYKLNGQAEMFYRKKSIENTHPTHPANHPILNKNKDNKKKESLFDYDLIKDRRYTVDKFMFHVPITMNFKSVGSENINQDVKAYLRHADDMHIIGIDRGERHLLYLVVIDLQGNIKEQYSLNEIVNEYNGNTYHTNYHDLLDVREEERLKARQSWQTIENIKELKEGYLSQVIHKITQLMVGYHAIVVLEDLSKGFMRSRQKVEKQVYQKFEKMLIDKLNYLVDKKTDVSTPGGLLNAYQLTCKSDSSQKLGKQSGFLFYIPAWNTSKIDPVTGFVNLLDTHSLNSKEKIKAFFSKFDAIRYNKDKKWFEFNLDYDKFGKKAEDTRTKWTLCTRGMRIGTFRNKEKNSQWDNQEVDLTTEMKSLLEHYYIDIHGNLKDAISTQTDKAFFTGLLHILKLTLQMRNSITGTETDYLVSPVADENGIFYDSRSCGDQLPENADANGAYNIARKGLMLIEQIKNAEDLNNVKFDISNKAWLNFAQQKPYKNG

SEQ ID NO: 1575 - protein, 1245 aa, unidentified
  REGION 1..1245: note = Description of Unknown: uncultivated organism sequence
  REGION 1..1245: note = Category: MG75 effectors
  REGION 1..1245: note = Description: MG75-61 effector
METFSGFTNLYPLSKTLRFRLIPVGETLKHFIDSGILEEDQHRAESYVKVKAIIDDYHRAYIENSLSGFELPLESTGKFNSLEEYYLYHNIRNKTEEIQNLSSKVRTNLRKQVVVQLTKNEIFKRIDKKELIQSDLIDFVKNEPDANEKIALISEFRNFTVYFKGFHENRRNMYSDEEKSTSIAFRLIHENLPKFIDNMEVFAKIQNTSILENFDAIQKELCPELVTLCEMFKLGYFNKTLSQKQIDAYNTVIGGKTTSEGKKIKGLNEYINLYNQQHKQEKLPKMKLLFKQILSDRESASWLPEKFENDSQVVGAMVNFWNTIHDTVLAEGGLKTIIASLGSYGLEGIFLKNDLQLTDISQKATGSWSKISSEIKQKIEVMNPQKKKESYESYQERIDKLFKSYKSFSLAFINECLRGEYKIEDYFLKLGAVNSSSLQKENHFSHILNAYTDVKEAIGFYSESTDTKLIQDNDSIQKIKQFLDAVKDLQAYVKPLLGNGDETGKDERFYGDLIEYWSLLDLITPLYNMVRNYVTQKPYSVDKIKINFQNPTLLNGWDLNKETDNTSVILRRDGKYYLAIMNNKSRKVFLKYPSGTDGNCYEKMEYKLLPGANKMLPKVFFSKSRINEFMPNERLLSNYEKGTHKKSGICFSLDDCHTLIDFFKKSLDKHEDWKNFGFKFSDTSTYEDMSGFYKEVENQGYKLSFKPIDATYVDQLVDEGKIFLFQIYNKDFSEHSKGTPNMHTLYWKMLFDETNLGDVVYKLNGEAEVFFRKASINVSHPTHPANIPIKKKNLKHKDEERILKYDLIKDKRYTVDQFQFHVPITMNFKADGNGNINQKAIDYLCSASDTHIIGIDRGERNLLYLVVIDGNGKICEQFSLNEIEVEYNGEKYSTNYHDLLNVKENERKQARQSWQSIANIKDLKEGYLSQVIHKISELMVKYNAIVVLEDLNAGFMRGRQKVEKQVYQKFEKKLIEKLNYLVFKKQSSDLPGGLMHAYQLANKFESFNALGKQSGFLFYIPAWNTSKMDPVTGFVNLFDVKYESVDKAKSFFSKFDSMRYNVERDMFEWKFNYGEFTKKAEGTKTDWTVCSYGNRIITFRNPDKNSQWDNKEINLTENIKLLFERFGIDLSSNLKDEIMQRTEKEFFIELISLFKLVLQMRNSWTGTDIDYLVSPVCNENGEFFDSRNVDETLPQNADANGAYNIARKGMILLDKIKKSNGEKKLALSITNREWLSFAQGCCKNG

SEQ ID NO: 1576 - protein, 1274 aa, unidentified
  REGION 1..1274: note = Description of Unknown: uncultivated organism sequence
  REGION 1..1274: note = Category: MG75 effectors
  REGION 1..1274: note = Description: MG75-62 effector
MDKKFEDFKRLYPLSKTLRFEAKPIGSTLDNIIKSGLLDEDEHRAVSYVKVKKLIDEYHKSFIDRVLDEGCLPFENNGEKDSLEEYYESYKLKSNDENANKTFKEIQQNLRSVIANKLTDDKAYANLFGNKLIESYKDKEDKKKTIDSDLIQFINTAEPSQLDSMSQDEAKELVKEFWGFTTYFVGFFDNRKNMYTSEEKSTGIAYRLVNENLPKFIDNMEAFKKVIAKSEIQANIEELYSNFAEYLNVESIQEMFQLDYYNMLLTQKQIDVYNAIIGGKTDEKHDVKIKGINEYINLYNQQHKDEKLPKLKALFKQILSDRNAISWLPEEFNDDQEVLNAIKDCYERLSENVLGNKVLKSLLCSLADYNLDDIFIRNDLQLTDISQKMFGNWSVIQDAIIQNIKNVAPARKRKESEEDYEKRISGIFKKADSFSILYINSCLNEMDDNSLHAVDGYFATLGAVNTPTMQRENLFALIQNAYTDISDLLNTKYPANKNLAQDKTNVAKVKALLDAIKSLQHFVKPLLGKGDESDKDERFYGELASLWTELDTVTPLYNMIRNYMTRKPYSEKKIKLNFENPQLLGGWDANKEKDYSTIILRRNGMYYLAIMNKDSRRLLGKAMPSDGECYEKMVYKLLPGANKMLPKVFFAKSRIDDFKPNIQIVENYNNGTHKKRKNFNIQDCHDLIDFFKQSIKKHEDWSKFSFNFSDTSTYEDLSGFYREVEQQGYKLSFMNVSVSFIDKLVDEGKMYLFQIYNKDFSEYSKGTPNMHTLYWKALFDERNLADVVYKLNGQAEMFYRKKSIDYTHPTHPANHPILNKNKDNKKKESLFEYDLIKDRRYTVDKFLFHVPITMNFKSVGSENINQQVREYLQQADDTHIIGIDRGERHLLYLVVIDMQGNIKEQFTLNEIVNEYNGNTYRTNYHDLLDIREEERLAARQSWQTIENIKELKEGYLSQVIHKITQLMVKYHAIVVLEDLNMGFMRGRQKVEKQVYQKFEKMLIDKLNYLVDKKADATQPGGILNAYQLTSKFDSFQKLGKQSGFLFYIPAWNTSKIDSVTGFVNLLDTRYQNTEKAKVFFSKFDAIRYNEEKDWFEFYLDYDKFGSKAEGTRTKWTLCTQGKRIRTFRNPDKNSQWDNQEVDLTREMKSLFEHYHINICGNLKEEICSQTDKAFFTGLLHVLKLTLQMRNSITGTETDYLVSPVADEEGNFYDSRYCNITLPKNADANGAYNIARKGLMLVKQIKAATDLANFKYDISNKAWLNFAQQKPYKNE

SEQ ID NO: 1577 - protein, 1321 aa, unidentified
  REGION 1..1321: note = Description of Unknown: uncultivated organism sequence
  REGION 1..1321: note = Category: MG75 effectors
  REGION 1..1321: note = Description: MG75-63 effector
MEFDDFKRLYPLSKTLRFEAKPIGATLNNIIKSGLLEEDEHRAQSYVKVKKLIDEYHKVFIDRVLDDGCLTIENKGKKDSLEEYYESYMSKSNDENVSKTFKEIQENLRSVIAKKLTDDNAYANLFGNKLIESYKDKDDKKKIIDSDLIQFINTAEPSKLDSMSQDEAKELVKEFWGFTTYFEGFHKNRKNMYTSEEKSTGIAYRLVNENLPKFIDNMEAFKKAIAKPEIQANMEELYSNFAEYLNVESIQEMFQLDYYNMLLTQKQIDDYNAIIGGKTDEDHDVKIKGINEYINLYNQQHKDEKLPKLKALFKQILSDRNAISWLPEEFNSDQDVLNAIKDCYERLSENVLGDKVLKSLLCSLSDYNLNGIFVRNDLQLTDISQKMFGNWNVIQNAIMQNFFFKKVAPARKRKESEEDYEKRISDIFKKTDSFSIQYINDCLNEMDDNNLHAVDGYFATLGAVNTPTMQRENLFALIQNAYTDISDLLDTPYPENKNLAQDKTNVAKVKALLDAIKSLQHFVKPLLGKGDESDKDERFYGELASLWTELDTVTLLFNMVHNYMTRKPYSQKKIKLNYKNTQLLAGWDANKEKEHAAIILRRNGMYYLAIMDKDSKNLLDKAMPSDGECYEKMVYKQFDISKQLPKCTTELKRVRKALVEDAKRSCLLSDSKDWNKPLNVTRKLWELNNYVWDKKKADWVLRKKENETRPKKFHKKYLELTSDKNGYNQAKNDWIKFTKEFLSSYKKVEDYDIHYKKRYNSVDELYKQLNSDFYTISFTYVSVSFIDKLVNEGKMYLFKIYNKDFSNYSKGTPNMHTLYWKALFDERNLADVVYKLNGEAEMFYRKKSINNTHPTHPANHPIQNKNKDNKKKESVFEYDLVKDYRYTEDKFLFHVPITMNFKSVGSENINQQVKEYLQQADDTHIIGIDRGERHLLYLVVIDMEGNIKEQFSLNEIVNEYNGNTYRTNYHDLLDVCADKRLKASQSWQTIENIKELKEGYLSQAIHKITQLMVKYHAVVVLEDLNKGFMRGRQKVEKQVYQKFEKMLIDKLNYLVDKKADAAQSGGLLNAYQLTSKFDSFQKLGKQSGFLFYIPAWNTSKIDPVTGFVNLFDTRYTNADKALEFFSKFDAIRYNEEKDWFEFEFDYDKFTQKAHGTRTKWTLCTYGMRLRSFKNPAKQYNWDFEVVVLTDEFKRILGEAGIDIHENLKDAIRNLEGKRRKYLEPLMQFMKLLLQLRNSRKNPEEDYILSPVADENGVFYDSRSCGDKLPENADANGAYNIARKGLMLIRQIKEAKELDKVKFDISNKAWLNFAQQKPYKNE

SEQ ID NO: 1578 - protein, 1275 aa, unidentified
  REGION 1..1275: note = Description of Unknown: uncultivated organism sequence
  REGION 1..1275: note = Category: MG75 effectors
  REGION 1..1275: note = Description: MG75-64 effector
MAKNFEDFKRLYSLSKTLRFEAKPIGATLDNIVKSGLLDEDEHRAASYVKVKKLIDEYHKVFIDRVLANGCLPLKNEGHNNSLTEYYDNYVSKSQNEDAKKTFEENQQNLRSIIAKKLTEDKAYANLFGKNLLESYKDKTDKTKIIDSDLFKFINTAESTQLDSMSQDEAKELVKEFWGFITYFYGFFDNRKNMYTSEDKSTGIAYRLINENLPKFIDNMEAFNTAITRPEIQANMDELYSNFSEYLNVESIQEMFQLDYYNMLLTQKQIDVYNAIIGGKTDDEHDVKIKGINEYINLYNQKHKDDKLPKLKALFKQILSDRNAISWLPEEFNSDQEVLNAIKDCYERLSENVLGDKVLKSLLGSLADYSLDGIFIRNDLQLTDISQKMFGNWGVIQNAIMQDIKHVAPARKHKESEEDYEKRIAGIFKKADSFSISYINDCLNEADPNNAYFVENYFATLGAVDTPTMQRENLFALVQNAYTEITALLHSDYPTEKNLAQDKANVAKIKALLDAIKSLQHFVKPLLGKGDESDKDERFYGELASLWTELDTVTPLYNMIRNYMTRKPYSQKKIKLNFENPQLLGGWDVNKEKDYATIILRRNGLYYLAIMNKDSKKLLGKAMPSDGECYEKMVYKLLPGANKMLPKVFFAKSRMEDFKPSKELVEKYNNGTHKKGKNFNIQDCHNLIDYFKQSIDKHEDWSKFGFKFSDTSTYEDLSGFYREVEQQGYKLSFARVSVSYINQLVEEGKMYLFQIYNKDFSEYSKGTPNMHTLYWKALFDERNLADVVYKLNGQAEMFYRKKSIENTHPTHPANHPILNKNKDNKKKESLFEYDLIKDRRYTVDKFMFHVPITMNFKSVGSENINQDVKAYLRHADDMHIIGIDRGERHLLYLVVIDLQGNIKEQYSLNEIVNEYNGNTYHTNYHDLLDVREEERLKARQSWQTIENIKELKEGYLSQVIHKITQLMVGYHAIVVLEDLSKGFMRSRQKVEKQVYQKFEKMLIDKLNYLVDKKTDVSTPGGLLNAYQLTCKSDSSQKLGKQSGFLFYIPAWNTSKIDPVTGFVNLLDTHSLNSKEKIKAFFSKFDAIRYNKDKKWFEFNLDYDKFGKKAEDTRTKWTLCTRGMRIDTFRNKEKNSQWDNQEVDLTTEMKSLLEHYYIDIHGNLKDAISTQTDKAFFTGLLHILKLTLQMRNSITGTETDYLVSPVADENGIFYDSRSCGDQLPENADANGAYNIARKGLMLIEQIKNAEDLNNVKFDISNKAWLNFAQQKPYKNG

SEQ ID NO: 1579 - protein, 1274 aa, unidentified
  REGION 1..1274: note = Description of Unknown: uncultivated organism sequence
  REGION 1..1274: note = Category: MG75 effectors
  REGION 1..1274: note = Description: MG75-65 effector
MAKNFEDFKRLYPLSKTLRFEAKPIGATLDNIVKSGLLDEDEHRAASYVKVKKLIDEYHKVFIDRVLADGCLPLKNEGHNNSLTEYYDSYVSKSQNEDAKKAFEENQQNLRSIIAKKLIEDKAYANLFGKNLIESYKDKEDKKKIIDSELIQFICTAEATQLDSMSQDEAKEIVKEFWGFTTYFVGFFDNRKNMYTAEEKSTGIAYRLINENLPKFIDNMEAFKKAIARPEIQANMEELYSNFSEYLNVESIQEMFQLDYYNMLLTQKQIDVYNAIIGGKTDDEHDVKIKGINEYINLYNQQHKDDKLPKLKSLFKQILSDRNAISWLPEEFNSDQEVLNAIKDCYERLAENVLGDKVLKSLLGSLADYSLDGIFIRNDLQLTDISQKMFGNWGVIQNAIMQNIKHVAPARKHKESEEDYEKRIAGIFKKADSFSISYINDCLNEADSNNAYFVENYFAAFGAVNTPTMQRENLFSLVQNAYTEVAALLHSDYPTAKHLAQDKANVAKIKALLDAIKSLQHFVKPLLGKGDESDKDERFYGELASLWAELDTVTPLYNMIRNYMTRKPYSQKKIKLNFENPQLLGGWDANKEKDYATIILRRDGLYYLAIMNKESKKLLGKAMPSDGECYEKMVYKLLPGANKMLPKVFFAKSRMEDFKPSKELVEKYNNGTHKKGKNFNIQDCHNLIDYFKQSISKHEDWGKFGFNFSDTSTYEDLSGFYREVEQQGYKLSFARVSVSYISQLVEEGKMYLFQIYNKDFSEYSKGTPNMHTLYWKALFDERNLADVVYKLNGQAEMFYRKKSIENTYPTHPANHPILNKNKDNKKKESLFDYDLIKDRRYTVDKFMFHVPITMNFKSSGSENINQDVKAYLRHADDMHIIGIDRGERHLLYLVVIDLQGNIKEQYSLNEIVNEYNGNTYHTNYHDLLDVREEERLKARQSWQTIENIKELKEGYLSQVIHKITQLMVKYHAIVVLEDLNMGFMRGRQKVEKQVYQKFEKMLIDKLNYLVDKKADASVSGGLLNAYQLTSKFDSFQKLGKQSGFLFYIPAWNTSKIDPVTGFVNLLDTRYQNVEKAKVFFSKFDAIRYNKDKDWFEFNLDYDKFGKKAEGTRTKWALCTRGMRIDTFRNKEKNSQWDNQEVDLTAEMKSLLEHYYIDIHGNLKDAISAQTDKAFFTGLLHILKLTLQMRNSITGTETDYLVSPVADENGIFYDSRSCGDELPENADANGAYNIARKGLMMIEQIKDAKDLDNLKFDISNKSWLNFAQQKPYKNE

SEQ ID NO: 1580 - protein, 1089 aa, unidentified
  REGION 1..1089: note = Description of Unknown: uncultivated organism sequence
  REGION 1..1089: note = Category: MG75 effectors
  REGION 1..1089: note = Description: MG75-66 effector
MAKNFEDFKRLYPLSKTLRFEAKPIGATLDNIVKSGLLDEDEHRAASYVKVKKLIDEYHKVFIDRVLADGCLPLKNEGHNNSLTEYYDSYVSKSQNEDAKKAFEENQQNLRSIIAKKLIEDKAYANLFGKNLIESYKDKEDKKKIIDSELIQFICTAEATQLDSMSQDEAKEIVKEFWGFTTYFVGFFDNRKNMYTAEEKSTGIAYRLINENLPKFIDNMEAFKKAIARPEIQANMEELYSNFSEYLNVESIQEMFQLDYYNMLLTQKQIDVYNAIIGGKTDDEHDVKIKGINEYINLYNQQHKDDKLPKLKSLFKQILSDRNAISWLPEEFNSDQEVLNAIKDCYERLAENVLGDKVLKSLLGSLADYSLDGIFIRNDLQLTDISQKMFGNWGVIQNAIMQNIKHVAPARKHKESEEDYEKRIAGIFKKADSFSISYINDCLNEADSNNAYFVENYFAAFGAVNTPTMQRENLFSLVQNAYTEVAALLHSDYPTAKHLAQDKANVAKIKALLDAIKSLQHFVKPLLGKGDESDKDERFYGELASLWAELDTVTPLYNMIRNYMTRKPYSQKKIKLNFENPQLLGGWDANKEKDYATIILRRDGLYYLAIMNKESKKLLGKAMPSDGECYEKMVYKLLPGANKMLPKVFFAKSRMEDFKPSKELVEKYNNGTHKKGKNFNIQDCHNLIDYFKQSISKHEDWGKFGFNFSDTSTYEDLSGFYREVEQQGYKLSFARVSVSYISQLVEEGKMYLFQIYNKDFSEYSKGTPNMHTLYWKALFDERNLADVVYKLNGQAEMFYRKKSIENTHPTHPANHPILNKNKDNKKKESLFDYDLIKDRRYTVDKFMFHVPITMNFKSSGSENINQDVKAYLRHADDMHIIGIDRGERHLLYLVVIDLQGNIKEQYSLNEIVNEYNGNTYHTNYHDLLDVREEERLKARQSWQTIENIKELKEGYLSQVIHKITQLMVKYHAIVVLEDLNMGFMRGRQKVEKQVYQKFEKMLMDKLNYLVDKKADASVSGGLLNAYQLTSKFDSFQKLGKQSGFLFYIPAWNTSKIDPVTGFVNLLDTRYQNVEKAKVFFSKFDAIRYN

SEQ ID NO: 1581 - protein, 1250 aa, unidentified
  REGION 1..1250: note = Description of Unknown: uncultivated organism sequence
  REGION 1..1250: note = Category: MG75 effectors
  REGION 1..1250: note = Description: MG75-67 effector
MISLNYFQNQYAVAKTLCLELRPIGKTMEYIISSGILKEDEHRNESYKLVKKIIDDYHKAYIELSLSRFELKITSCSKNDALEDFYCQYLANSQEEKDKNIFKKTQDNLRKQIAKHLTQGEAYKRIDKKELIQEDLLEFVAADPDAANKKILINEFRDFTTYFTGFYENRKNMYSEEAQSTAIAYRIIHENLPKFIDNMGTFKQLMQSSITDILPQIFDNFKKDLEVSSIQEIFDLNYFNKVLTQKQIDIYNAIIGGKSLNENSRIQGLNEYINLYNQQHKENKLPLLKLLFKQILSDRNSLSWLPEAFETDKQVLHAVRKCYANLKESVLHEAGLVQLLSSLPSYDSTRIYIRNDQALTTISQKLFGDWGIIPHAIKERLKKDISAKRKETEEAYLERIEKAFKQADSYTIAYINDSLKEIGVDKKNIEDYFIHLGAICAEGQEQENILQRIASAYSQAQPLLEEKVPVHKNLMQDKDSVELIKSLLDELKNLQHFIKPLLGKGSESDKDERFYGEFVGLWNELDQITTLYNKVRNYVTRKPYSTEKFKINFQNATLLKGWDRNKERDNTSIILRKNGLYYLAIMRKEYNKVFEKYPAGTEGNCYEKMEYKLLPGANKMLPKVFFSKSRINEFNPSPQLLQNYQMGTHKKGDQFKKEDCHALIDFFKTSIEKHEDWKNFNFQFSPTSVYEDMSGFYREVEQQGYKLVFRSIDAEYIDKLVEEGKIFLFQIYNKDFSPFSKGTPNLHTLYWKMLFDERNLNNVVYKLNGEAEIFFRKKSITYTNPTHPAEIPIKNKNVQNKKKESVFRYDLIKNHRFTIDSFQFHVPITMNFKNAGLSNLNEQVYTYLRENKDAHIIGIDRGERHLLYLVVIDRYGRIVKQFSLNEIVNEYHGNTYTTNYHDLLDKREEARQQARQSWQSIENIKELKEGYLSQVVHKIANLMVEYHAIVVLEDLNIGFMRGRQKVEKQVYQKFEKMLIDKLNYLVDKKKAPEADGGLLKAFQLTNQFESFQKLGKQSGFLFYVPAWNTSKIDPCTGFTNLLDTRYENIAKAQKFFRTFDAIRYNAVKDYFELELDYDKFHKRAEGTQTKWTLCTYGTRIKTFRNPENNNQWDNVEINLTEEFKKLFKQFEINLSGDLQQAICAQTEKSFFESLLRLLKLTLQMRNSITGTDVDYLLSPVQNAEGYFYDSRKGDKSLPANADANGAYNIARKGLWVIQQIKQTPQGQKAKLSISNKEWLKFAQEKPYLKD

SEQ ID NO: 1582 - protein, 1245 aa, unidentified
  REGION 1..1245: note = Description of Unknown: uncultivated organism sequence
  REGION 1..1245: note = Category: MG75 effectors
  REGION 1..1245: note = Description: MG75-68 effector
METFSGFTNLYPLSKTLRFRLIPVGETLKHFIGSGILEEDQHRAESYVKVKAIIDDYHRTYIENSLSGFELPLESTGKFNSLEEYYLYHNIRNKTEEIQNLSSKVRTNLRKQVVTQLTKNEIFKRIDKKELIQSDLIDFVKNEPDANEKIALISEFRNFTVYFKGFHENRRNMYSDEEKSTSIAFRLIHENLPKFIDNMEVFAKIQNTSISENFDAIQKELCPELVTLCEMFKLGYFNKTLSQKQIDAYNTVIGGKTTSEGKKIKGLNEYINLYNQQHKQEKLPKMKLLFKQILSDRESASWLLEKFENDSQVVGAMVNFWNTIHDTVLAEGGLKTIIASLGSYGLEGIFLKNDLQLTDISQKATGSWSKISSEIKQKIEAMNPQKKKESYESYQERIDKLFKSYKSFSLAFVNECLRGEYKIEDYFLKLGAVNSSLLQKENHFSHILNTYTDVKEVIGFYSESTDTKLIQDNDSIQKIKQFLDAVKDLQAYVKPLLGNSDETGKDERFYGDLIEYWSLLDLITPLYNMVRNYVTQKPYSVDKIKINFQNPTLLNGWDLNKEMDNTSVILRRDGKYYLAIMNNKSRKVFLKYPSGTDRNCYEKMEYKLLPGANKMLPKVFFSKSRINEFMPNERLLSNYEKGTHKKSGTCFSLDDCHTLIDFFKKSLNKHEDWKNFGFKFSDTSTYEDMSGFYKEVENQGYKLSFKPIDATYVDQLVDEGKIFLFQIYNKDFSEHSKGTPNMHTLYWKMLFDETNLGDVVYKLNGEAEVFFRKASINVSHPTHPANIPIKKKNLKHKDEERILKYDLIKDKRYTVDQFQFHVPITMNFKANGNGNINQKAIDYLRSASDTHIIGIDRGERNLLYLVVIDGNGKICEQFSLNEIEVEYNGEKYSTNYHDLLNVKENERKQARQSWQSIANIKDLKEGYLSQVIHKISELMVKYNAIVVLEDLNAGFMRGRQKVEKQVYQKFEKKLIEKLNYLVFKKQSSDLPGGLMHAYQLANKFESFNTLGKQSGFLFYIPAWNTSKMDPVTGFVNLFDVKYESVDKAKSFFSKFDSIRYNVERDMFEWKFNYDEFTKKAEGTKTDWTVCSYGNRIITFRNPDKNSQWDNKEINLTENIKLLFERFGIDLSSNLKDEIMERTEKEFFIELISLFKLVLQMRNSWTGTDIDYLVSPVCNENGEFFDSRNVDETLPQNADANGAYNIARKGMILLDKIKKNNGEKKLTLSITNREWLSFAQGCCKNG

SEQ ID NO: 1583 - protein, 1274 aa, unidentified
  REGION 1..1274: note = Description of Unknown: uncultivated organism sequence
  REGION 1..1274: note = Category: MG75 effectors
  REGION 1..1274: note = Description: MG75-69 effector
MAKIFEDFKRLYPLSKTLRFEAKPIGATLDNIIKSGLLDEDEHRAASYVRVKKLIDEYHKVFIDRVLDNGCLPLKNEGHNNSLTEYYESYVTKSQNEDAKKVFKEIQQNLRSIIAKKLTEDKAYANLFGKNLIESYKDKTDKTKIIDSDLIKFINTAESTQLDSMSQDEAKELVKEFWGFTTYFVGFYDNRKNMYTAEEKSTGIAYRLVNENLPKFIDNMEAFKKAIARPEIQANMEELYSDFSEYLNVESVQEMFQLDYYNMLLTQKQIDVYNAIIGGKTDDEHDVKIKGINEYINLYNQQHKDDKLPKLKALFKQILSDRNAISWLPEEFNGDQEVLNAIKDCYERLSENVLGDKVLKSLLGSLSDYSLDGIFIRNDLQLTDISQKMFGNWCVIQNAIMQNIKHVAPARKHKESEEDYEKRIAGIFKKVDSFSISFINDCLNEADPNNAYFVENYFATFGAVNTPTMQRENLFALVQNAYTEVAALLHSDYLTAKHLAQDKVNVAKIKALLDAIKSLQHFVKPLLGKGDESDKDERFYGELASLWAELDTVTPLYNMIRNYMTRKPYSQKKIKLNFENPQLLGGWDANKEKDYATIILRRDGLYYLAIMNKDSKKLLGKAMPSDGECYEKMVYKLLPGANKMLPKVFFAKSRMEDFKPSKELVEKYNNGTHKKGKNFNIQDCHNLIDYFKQSISKHEDWGKFGFNFSDTSTYEDLSGFYREVEQQGYKLSFTRVSVSYISQLVEEGKMYLFQIYNKDFSEYSKGTPNMHTLYWKALFDERNLADVVYKLNGQAEMFYRKKSIENTHPTHPANHPILNKNKDNKKKESLFDYDLIKDRRYTVDKFMFHVPITMNFKSSGSENINQDVKAYLRHADDMHIIGIDRGERHLLYLVVIDLQGNIKEQYSLNEIVNEYNGNTYHTNYHDLLDVREEERLKARQSWQTIENIKELKEGYLSQVIHKITQLMVKYHAIVVLEDLNMGFMRGRQKVEKQVYQKFEKMLIDKLNYLVDKKADASVSGGLLNAYQLTSKFDSFQKLGKQSGFLFYIPAWNTSKIDPITGFVNLLDTRYQNVEKAKVFFSKFDAIRYNKDKDWFEFNLDYDKFGKKAEGTRTKWTLCTRGMRIDTFRNKEKNSQWDNQEVDLTAEMKSLLEHYYIDIYGNLKDAISAQTDKAFFTGLLHILKLTLQMRNSITGTETDYLVSPVADENGIFYDSRSCGDELPENADANGAYNIARKGLMMIEQIKDAKDLDNLKFDISNKSWLNFAQQKPYKNE

SEQ ID NO: 1584 - protein, 1264 aa, unidentified
  REGION 1..1264: note = Description of Unknown: uncultivated organism sequence
  REGION 1..1264: note = Category: MG75 effectors
  REGION 1..1264: note = Description: MG75-70 effector
MNFEQFTHLYPLSKTLRFELRPVGATLARIKEGGFLENDNHRAESYKKVKKLIDEYHKHFIEQALGDFSLTENETEGSKCLNSYLETYIQLYRSSRIEDAEKKAFEKVQAEMRKLIAKTLKGSEAYKRLFKQELIKEDLITFLRTHGGTVADEELVEEFKNFTTYFTGFYENRENMYSEEEKSTAISYRLVNENLPIFVDNMAAFAIIAQVPEVRAKLDVLQKDLGVELDGTTIDELFTLPFFNKVLTQKQIVVYNAAIGGKVSDSHSKGESHIKGINQIVNLYNQQHKDARLPKLKMLYKQILSDREALSWLPEKFDKDADLLKAIHDGYERLVSDGVLENLRTLLESIADYQTEGIFITNDQQLTRISQKMFGEWSFISEAILCALKKKVPQKRNECDEKYEERIDKMLKNYGGFSIRFIDDCVAAYVNTLDDEERKKRFIPTMEAYFATLGAFDTEEGQTINFFSRIQNARDALQGLLDSAYPERRALIQDKENGALLKELLDAILALMHFVKPLLGKNENGKDERFYGELMQIWDEFDSFVPLYNMSRNYLTQKPYSEEKYKLNFENSQLLKGWDLNKEADNTSIILRKDGLFYLAIMNKKHNKLFARELPADGDCYDKMDYKLLPGPNKMFPKVFFSKSRIAEFAPSEHIMDVYRKGSFKKGDTFNLQDCHDLIDFFKASILKHEDWRQFEFKFSETEQYDDISGFYREVEAQGYKVTFRQVSVSYIDRLVNEGKLYLFQIYNKDFSSYSKGTPNMHTLYWRALFDERNLSDVVYKLNGEAEVFYRKKSIEAHPTHPANRPIKNKNKLNDKEESLFAYDLIKDRRYSKDKFSLHVPITMNFKSVGGPNINDDVVEFLRTNENLHFIGIDRGERHLLYLTVIDSHGHILEQRTLNDVVNNYQGKDYHTDYHDLLETRERQRQEARSSWKAIENIKDLKEGYLAQVVHQIAQLMVKYHAIVVLEDLNGGFMRGRQKVERSVYQQFEKKLIDKLNYLVDKKSDAHAPGGLMNAYQLANQFKSFKSMGRQSGFIFYIPAWNTSKIDPVTGFTNLFDTRYKNVHDAQQFFSKFKSIRYNETADRFEFKFSYSDFTRKAEGSRTDWTVCTYGTRIKTFRDPQKNNEWTSKEVVLTEEFKKFFAAYGMDIHSNLKDSIAAHDEKAFFEQLLVLMRLTLQIRNSKSGTDVDYLLSPVADENGVFFDSRSCGNSLPQDADANGAYNIARKGLMLVRQMREAKDLKKFKADMTNRNWLKFAQEKPYLND

SEQ ID NO: 1585 - protein, 1275 aa, unidentified
  REGION 1..1275: note = Description of Unknown: uncultivated organism sequence
  REGION 1..1275: note = Category: MG75 effectors
  REGION 1..1275: note = Description: MG75-71 effector
MAKNFEDFKRLYPLSKTLRFEAKPIGATLDNIIKSGLLDEDEHRAASYVKMKKLIDEYHKVFIDRVLDNGCLPLEDKGDNNSLAEYYESYVSKAQDEDAIKKFKEIQQNLCSIIAKKLTDDKAYANLFGNKLIESYKDKADKTKIIDSDLIQFINTAESTQLVSMSQDEAKELVKEFWGFTTYFEGFFKNRKNMYTPEEKSTGIAYRLINENLPKFIDNMEAFKKAITRPEIQANMEELYSDFSEYLNVESIQEMFQLDYYNMLLTQKQIDVYNAIIGGKTDDEHDVKIKGINEYINLYNQQHKDDKLPKLKALFKQILSDRNAISWLPEEFNSDQEVLNAIKDCYERLAENVLGDKVLKSLLCSLSDYTLDGIFIRNDLQLTDISQKMFGNWGVIQNAIMQNIKRVAPARKHKESEEDYEKRIAGIFKKADSFSISYINDCLNEADPNNAYFVENYFATFGAVNTPTMKRENLFALVQNAYTEVASLLHSDYPTAKHLAQDKANVAKIKALLDAIKSLQHFVKPLLGKGDESDKDERFYGELASLWAELDTVTPLYNMIRNYITRKPYSQKKIKLNFENPQLLGGWDANKEKDYATIILRRNGLYYLAIMNKESKKLLGKAMPSDGECYEKMVYKLLPGANKMLPKVFFAKSRMEDFKPSKELVEKYNTGTHKKGKNFNIQDCHNLIDYFKQSISKHEDWGKFGFNFSDTSTYEDLSGFYREVEQQGYKLSFARVSVSYINQLVEEGKMYLFQIYNKDFSEYSKGTPNMHTLYWKALFDERNLADVVYKLNGQAEMFYRKKSIENTHPTHPANHPILNKNKDNKKKESLFEYDLIKDRRYTVDKFMFHVPITMNFKSSGSENINQDVKAYLRHADDMHIIGVDRGERHLLYLVVIDLQGNIKEQYSLNEIVNEYNGNTYHTNYHDLLDVREDERLKARQSWQTIENIKELKEGYLSQVIHKITQLMVKYHAIVVLEDLNKGFMRGRQKVEKQVYQKFEKMLIDKLNYLVDKKADASVSGGLLNAYQLTSKFDSFQKLGKQSGFLFYIPAWNTSKIDPVTGFVNLLDTHSLNSKEKIKAFFSKFDAIRYNKDKDWFEFNLDYDKFGKKAEGTRTKWTLCTRGMRIDTFRNKEKNSQWDNQEVDLTAEMKSLLEHYYIDIHGNLKDAISAQTDKAFFTGLLHILKLTLQMRNSITGTETDYLVSPVADENGIFYDSRSCGDELPENADANGAYNIARKGLMMIEQIKEVKDLDNLKFDISNKSWLNFAQQKPYKNE

SEQ ID NO: 1586 - protein, 439 aa, unidentified
  REGION 1..439: note = Description of Unknown: uncultivated organism sequence
  REGION 1..439: note = Category: MG75 effectors
  REGION 1..439: note = Description: MG75-72 effector
MIKDKRYTVDQFQFHVPITMNFKADGNGNINQKAIDYLCSASDTHIIGIDRGERNLLYLVVIDGNGKICEQFSLNEIEVEYNGEKYSTNYHDLLNVKENERKQARQSWQSIANIKDLKEGYLSQVIHKISELMVKYNAIVVLEDLNAGFMRGRQKVEKQVYQKFEKKLIEKLNYLVFKKQSSDLPGGLMHAYQLANKFESFNALGKQSGFLFYIPAWNTSKMDPVTGFVNLFDVKYESVDKAKSFFSKFDSMRYNVERDMFEWKFNYGEFTKKAEGTKTDWTVCSYGNRIITFRNPDKNSQWDNKEINLTENIKLLFERFGIDLSSNLKDEIMQRTEKEFFIELISLFKLVLQMRNSWTGTDIDYLVSPVCNENGEFFDSRNVDETLPQNADANGAYNIARKGMILLDKIKKSNGEKKLALSITNREWLSFAQGCCKNG

SEQ ID NO: 1587 - protein, 1274 aa, unidentified
  REGION 1..1274: note = Description of Unknown: uncultivated organism sequence
  REGION 1..1274: note = Category: MG75 effectors
  REGION 1..1274: note = Description: MG75-73 effector
MARIFEDFKRLYPLSKTLRFEAKPIGATLDNIVKSGLLDEDEHRAESYVKVKKLIDEYHKVFIDRVLDNGCLPLKNEGHNNSLTEYYDSYVSKSQNEDAKKAFEENQQNLRSIIAKKLTEDKAYANLFGKNLIESYKDKTDKTKIIDSDLIQFINTAESTQLNSMSQDEAKELVKEFWGFTTYFVGFFDNCKNMYTAEEKSTGIAYRLINENLPKFIDNMEAFKKAIARPEIQANMEELYSNFSEYLNVESIQEMFLLDYYNMLLTQKQIDVYNAIIGGKTDDEHDVKIKGINEYINLYNQQHKDDKLPKLKALFKQILSDRNAISWLPEEFNSDQEVLNAIKDCYERLSENVLGDKVLKSLLGSLADYSLDGIFIRNDLQLTDISQKMFGNWGVIQNAIMQNIKRVAPARKHKESEEDYEKRIAGIFKKADSFSISYINDCLNEADPNNAYFVENYFATFGAVNTPTMQRENLFALVQNAYTEVASLLHSYYPAEKKLAQDKANVAKIKALLDAIKSLQHFVKPLLGKGDESDKDERFYGELASLWAELDTVTPLYNMIRNYITRKPYSQKKIKLNFENPQLLGGWDANKEKDYATIILRRNGLYYLAIMDKDSRKLLGKAMPSDGECYEKMVYKLLPGANKMLPKVFFAKSRMDDFKPSKELIEKYNNGTHKKGKNFDIQDCHNLIDYFKQSIDKHEDWSKFGFNFSDTSTYEDLSGFYREVEQQGYKLSFARVSVSYINQLVEEGKMYLFQIYNKDFSEYSKGTPNMHTLYWKALFDERNLADVVYKLNGQAEMFYRKKSIENTHPTHPANHPILNKNKDNKKKESLFEYDLIKDRRYTVDKFMFHVPITMNFKSVGSENINQGVKEYLHHADDMHIIGIDRGERHLLYLVVIDLQGNIKEQYSLNEIVNEYNGNTYHTNYHDLLDAREDERLKARQSWQTIENIKELKEGYLSQVIHKITQLMVKYHAIVVLEDLNMGFMRGRQKVEKQVYQKFEKMLIDKLNYLVDKKADASVSGGLLNAYQLTSKFDSFQKLGKQSGFLFYIPAWNTSKIDPVTGFVNLLDARYQNVEKAKAFFSKFDAIRYNKDKDWFEFNLDYDKFGKKAEGTRTKWILCTRGMRIDTFRNKEKNSQWDNQEVDLTAELKSLLEHYYIDIHGNLKEAISAQTDKAFFTGLLHILKLTLQMRNSITGTETDYLVSPVADENGIFYDSRSCGEQLPENADANGAYNIARKGLMMIEQIKNAEDLGNLKFDISNKAWLNFAQQKPYKNG

SEQ ID NO: 1588 - protein, 1203 aa, unidentified
  REGION 1..1203: note = Description of Unknown: uncultivated organism sequence
  REGION 1..1203: note = Category: MG75 effectors
  REGION 1..1203: note = Description: MG75-74 effector
MTIENKGKKDSLEEYYESYMSKSNDENVSKTFKEIQENLRSVIAKKLTDDNAYANLFGNKLIESYKDKDEKNKIIDSDLIQFINTAEPSQLDSMSQDEAKELVKEFWGFTTYFVGFFDNRKNMYTSEEKSTGIAYRLVNENLPKFIDNMEAFKKAIAKPEIQASMEELYSNFAEYLNVESIQEMFQLDYYNMLLTQKQIDVYNAIIGGKTDEEHDVKIKGINEYINLYNQQHKDEKLPKLKALFKQILSDRNAISWLPEEFNSDQEVLNAIDDCYKRLSENVLGDKVLKSLLCSLDDYNLDGIFVRNDLQLTDISQKMFGNWSVIQSAIMQNIKNVAPARKRKESEEDYEKRISDIFKKADSFSIQYINDCLNEMDNNNLHAVDGYFATLGAVNTPTMQRENLFALIQNAYTDISNLLETPYPENKNLAQDKTNVAKVKALLDAIKSLQHFVKPLLGKGDESDKDERFYGELASLWTELDTVTPLYNMIRNYMTRKPYSEKKIKLNFENPQLLGGWDANKEKDYATIILRRNGMYYLAIMDKDSKKLLGKTMPSNGECYEKMVYKLLPGANKMLPKVFFAKSRINDFKPSKLIVENYNNGTHKKGKNFNINDCHNLIDYFKQSIDKHEDWSKFGFNFSDTSTYEDLSGFYREVEQQGYKLSFTNVSVSFIDKLVDEGKMYLFQIYNKDFSDFSKGTPNMHTLYWKALFDERNLADVVYKLNGQAEMFYRKKSINNTHPTHPANHPIQNKNKDNKKKESVFEYDLIKDRRYTVDKFLFHVPITMNFKSVGSENINQQVREYLQQADDTHIIGIDRGERHLLYLVVIDMQGNIKEQFTLNEIVNEYNGNTYRTNYHDLLDTREEERLTARQSWQTIENIKELKEGYLSQVVHKITQLMVKYHAVVVLEDLNKGFMRGRQKVEKQVYQKFEKMLIDKLNYLVDKKADAAQSGGLLNAYQLTSKFDSFQKLGKQSGFLFYIPAWNTSKIDPVTGFVNLLDTRYQNTEKAKAFFSRFDAIRYNANKDWFEFYLDYDKFCTKAEGTRTRWTLCTQGSRISTFRNAEKNSQWDNLEVDLTREMKSLFEHYHINICGNLKEEICLQTDKAFFTGLLHMLKLTLQMRNNITGTETDYLISPVADENGTFYDSRSCGDTLPKNADANGAYNIARKGLMFIGQIKETKDLANFKYDISNKAWLNFAQQKPYKNE

SEQ ID NO: 1589 - protein, 1245 aa, unidentified
  REGION 1..1245: note = Description of Unknown: uncultivated organism sequence
  REGION 1..1245: note = Category: MG75 effectors
  REGION 1..1245: note = Description: MG75-75 effector
METFSGFTNLYPLSKTLRFRLIPVGETLKHFIDSGILEEDQHRAESYVKVKAIIDDYHRAYIENSLSGFELPLESMGKFNSLEEYYLYHNIRNKTEEIQNLSSKVRTNLRKQVVTQLTKNEIFKRIDKKELIQSDLIDFVKNEPDANEKIALISEFRNFTVYFKGFHENRKNMYSDEEKSTSIAFRLIHENLPKFIDNMEVFAKIQNTSISENFDAIQKELCPELVTLCEMFKLGYFNKTLSQKQIDAYNTVIGGKTTSEGKKIKGLNEYINLYNQQHKQEKLPKMKLLFKQILSDRESVSWLPEKFENDSQVVGAMVNFWNTIHDTVLAEGGLKTIIASLGSYGLEGIFLKNDLQLTDISQKATGSWGKISSEIKQKIEVMNPQKKKESYETYQERIDKIFKSYKSFSLAFINECLRGEYKIEDYFLKLGAVNSSSLQKENHFSHILNAYTDVKEAIGFYSESTDTKLIQDNDSIQKIKQFLDAVKDLQAYVKPLLGNGDETGKDERFYGDLIEYWSLLDLITPLYNMVRNYVTQKPYSIDKIKINFQNPTLLNGWDLNKETDNTSVILRRDGKYYLAIMNNKSRKVFLKYPSGTDRNCYEKMEYKLLPGANKMLPKVFFSKSRINEFMPNERLLSNYEKGTHKKSGTCFSLDDCHTLIDFFKKSLDKHEDWKNFGFKFSDTSIYEDMSGFYKEVENQGYKLSFKPIDATYVDQLVDEGKIFLFQIYNKDFSEHSKGTPNMHTLYWKMLFDETNLGDVVYKLNGEAEVFFRKASINVSHPTHPANIPIKKKNLKHKDEERILKYDLIKDKRYTVDQFQFHVPITMNFKADGNGNINQKAIDYLRSASDTHIIGIDRGERNLLYLVVIDGNGKICEQFSLNEIEVEYNGEKYSTNYHDLLNVKENERRQARQSWQSIANIKDLKEGYLSQVIHKISELMVKYNAIVVLEDLNAGFMRGRQKVEKQVYQKFEKKLIEKLNYLVFKKQSFDLPGGLMHAYQLANKFESFNTLGKQSGFLFYIPAWNTSKMDPVTGFVNLFDVKYESVDKAKSFFSKFDSIRYNVERDMFEWKFNYGEFTKKAEGTKTDWTVCSYGNRIITFRNPDKNSQWDNKEINLTENIKLLFERFGIDFSSNLKDEIMQRTEKEFFIELISLFKLVLQMRNSWTGTDIDYLVSPVCNENGEFFDSRNVDETLPQNADANGAYNIARKGMILLDKIKKGNGEKKLALSITNREWLSFAQGCCKNG

SEQ ID NO: 1590 - protein, 1274 aa, unidentified
  REGION 1..1274: note = Description of Unknown: uncultivated organism sequence
  REGION 1..1274: note = Category: MG75 effectors
  REGION 1..1274: note = Description: MG75-76 effector
MAKNFEDFKRLYPLSKTLRFEAKPIGATLDNIIKSGLLDEDEHRAASYVKMKKLIDEYHKVFIDRVLDNGCLPLKNEGQNNSLTEYYESYVSKSQNEDAKKAFEENQQNLRSIVAKKLTDDKAYANLFGKNLIESYKDKEDKKKIIDSDLIQFICTAEATQLDSMSQDEAKEIVKEFWDFTTYFVGFFDNRKNMYTAEEKSTGIAYRLINENLPKFIDNMEAFKKAIARPEIQANMEELYSNFSEYLNVESIQEMFLLDYYNMLLTQKQIDVYNAIIGGKTDDEHDVKIKGINEYINLYNQQHKDDKLPKLKDLFKQILSDRNAISWLPEEFNSDQEVLNAIKDCYERLSENVLGDKVLKSLLGSLSDYTLDGIFIRNDLQLTDISQKMFGNWGVIQNAIMQNIKRVAPARKHKESEEDYEKRIAGIFKKADSFSISYINDCLNEADPNNAYFVENYFATFGAVNTPTMQRENLFALVQNAYTEVASLLHSDYPTAKHLAQDKANVAKIKALLDAIKSLQHFVKPLLGKGDESDKDERFYGELASLWAELDTVTPLYNMIRNYITRKPYSQKKIKLNFENPQLLGGWDANKEKDYATIILRRNGLYYLAIMNKESKKLLGKAMPSDGECYEKMVYKLLPGANKMLPKVFFAKSRMEDFKPSKELVEKYNNGTHKKGKNFNIQDCHNLIDYFKQSINKHEDWGKFGFNFSDTSTYEDLSGFYREVEQQGYKLSFARVSVSYINQLVEEGKMYLFQIYNKDFSEYSKGTPNMHTLYWKALFDERNLADVVYKLNGQAEMFYRKKSIEKTHPTHPANHPILNKNKDNKKKESLFDYDLIKDRRYTVDKFMFHVPITMNFKSVGSENINQGVKEYLHHADDMHIIGIDRGERHLLYLVVIDLQGNIKEQYSLNEIVNEYNGNTYHTNYHDLLDAREDERLKARQSWQTIENIKELKEGYLSQVIHKITQLMVKYHAIVVLEDLNMGFMRGRQKVEKQVYQKFEKMLIDKLNYLVDKKADASVSGGWLNAYQLTSKFDSFQKLGKQSGFLFYIPAWNTSKIDPVTGFVNLLDARYQNVEKAKAFFSKFDAIRYNKDKDWFEFNLDYDKFGKKTEGTRTKWTLCTRGMRIDTFRNKEKNSQWDNQEVDLTAEMKSLLEHYYIDIHGNLKDAISAQTDKAFFTGLLHILKLTLQMRNSITGTETDYLVSPVADENGIFYDSRSCGEELPENADANGAYNIARKGLMLIEQIKGAEDLGNLKFDISNKAWLNFAQKKPYKNG

SEQ ID NO: 1591 - protein, 1272 aa, unidentified
  REGION 1..1272: note = Description of Unknown: uncultivated organism sequence
  REGION 1..1272: note = Category: MG75 effectors
  REGION 1..1272: note = Description: MG75-77 effector
MEFDDFKRLYPLSKTLRFEAKPIGATLKNIIKSGLLEEDEHRAQSYVKVKKLIDEYHKAFIDRVLNEGCLTIENKGNKDSLEEYYESYMSKSNDENVSKTFKEIQENLRSVIAKRLTDDKAYANLFGKNLIESYKDKEEKNKIIDSDLIQFINTAEPSQIDSMSQDEAKELVKEFWGFTTYFVGFFDNRKNMYTSEEKSTGIAYRLVNENLPKFIDNMEAFKKAIAKPEIQANMEELYSNFAEYLNVESIQEMFQLDYYDMLLTQKQIDVYNAIIGGKTDEDHDVKIKGINEYINLYNQQHKDEKLPKLKALFKQILSDRNAISWLPEEFNSDQEVLDAIKDCYERLSENVLGYKVLKSLLCSLSDYNLNGIFVRNDLQLTDISQKMFGNWSVIQNAIMQNIKNIAPARKRKESEEDYEKRISDIFKKADSFSIQYINDCLNEMDNNNLHAVDGYFATLGAVNTPTMQRENLFALIQNAYTDISDLLDTPYPQNKNLAQDKTNVAKVKVLLDAIKSLQHFVKPLLGMGDESDKDERFYGELASLWTELDTVTPLYNMIRNYMTRKPYSEKKIKLNFENPQLLGGWDANKEKDYATIILRRNGMYYLAIMDKDSKKLLGKTMPSDGECYEKMVYKLLPGANKMLPKVFFAKSRINDFKPSKKIVENYNNGTHKKGKNFNINDCHDLIDYFKQSIDKHEDWSKFGFNFSDTSTYEDLSGFYREVEQQGYKLSFTNISVSFIDKLVDEGKMYLFQIYNKDFSDYSKGTPNMHTLYWKALFDERNLADVVYKLNGQAEMFYRKKSIDYTYPTHPANHPIQNKNKDNKKKESVFEYDLVKDRRYTVDKFLFHVPITINFKSVGSENINQQVREYLQQADDTHIIGIDRGERHLLYLVVIDMQGNIKEQFTLNEIVNEYNGNTYRTNYHDLLDTREEERLTARQSWQTIENIKELKEGYLSQVIHKITQLMVKYHAVVVLEDLNKGFMRGRQKVEKQVYQKFEKMLIDKLNYLVDKKADATQSGGLLNAYQLTSKFDSFQKLGKQSGFLFYIPAWNTSKIDPVTGFVNLLDTRYQNTEKAKAFFSKFDAIRYNADKDWFEFNLDYDKFGTKAEGTRTTWTLCTQGNRICTFRNAEKNSQWDNQEVDLTGELKSLFEHYNINICGNLKEEICSQTDKAFFTGLLHILKLTLQMRNSITGTETDYLVSPVADENGVFYDSRSCGDQLPENADANGAYNIARKGLMLIREIKKAKELGKVKYDISNKAWLNFAQQKPYKNE

SEQ ID NO: 1592 - protein, 1274 aa, unidentified
  REGION 1..1274: note = Description of Unknown: uncultivated organism sequence
  REGION 1..1274: note = Category: MG75 effectors
  REGION 1..1274: note = Description: MG75-78 effector
MAKNFEDFKRLYPLSKTLRFEAKPIGVTLDNIVKSGLLDEDEHRAASYVKVKKLIDEYHKVFIDRVLADGCLPLKNEGHNNSLTEYYDNYVSKSQNEDAKKAFEENQQNLRSIIAKKLTEDKAYANLFGKNLIESYKDKTDKTKIIDSDLFNFINTAESTQLDSMSQDAAKEIVKEFWGFTTYFVGFFDNRKNMYTAEEKSTGIAYRLINENLPKFIDNMEAFKKAIARPEIQANMDELYSNFSEYLNVESIQEMFQLDYYNMLLTQKQIDVYNAIIGGKTDDEHDVKIKGINEYINLYNQKHKDDKLPKLKALFKQILSDRNAISWLPEEFNSDQEVLNAIKDCYERLSENVLGDKVLRSLLGSLADYSLDGIFIRNDLQLTDISQKMFGNWGVIQNAIMQNIKRIAPARKHKESEEDYEKRIAGIFKKADSFSISYINDCLNEADPNNAYFVENYFATFGAVNTPTMQRENLFALVQNAYTEVAALLHSDYPTVKNLAQDKANVSKIKVLLDAIKSLQHFVKPLLGKGDESDKDERFYGELASLWAELDTVTPLYNMIRNYMTRKPYSQKKIKLNFENPQLLGGWDANKEKDYATIILRRNGLYYLAIMNKDSKKLLGKAMPSDGECYEKMVYKLLPGANKMLPKVFFAKSRMEDFKPSKELVEKYNNGTHKKGKNFCIQDCHNLIDYFKQSIDKHEDWSKFGFNFSETSTYEDLSGFYREVEQQGYKLSFARVSVSYINQLVEEGKMYLFQIYNKDFSEYSKGTPNMHTLYWKALFDERNLADVVYKLNGQAEMFYRKKSIENTHPTHPANHPILNKNKDNKKKESLFEYDLIKDRRYTVDKFMFHVPITMNFKSSGSENINQDVKAYLRHADDMHIIGIDRGERHLLYLVVIDLQGNIKEQFSLNEIVNDYNGNTYHTNYHDLLDVREDERLKARQSWQTIENIKELKEGYLSQVIHKITQLMVKYHAIVVLEDLNMGFMRGRQKVEKQVYQKFEKMLIEKLNYLVDKKADASASGGLLNAYQLTSKFDSFQKLGKQSGFLFYIPAWNTSKIDPVTGFVNLLDTRYQNVEKAKSFFSKFDAIRYNKDKEWFEFNLDYDKFSKKAEGTRTKWTLCTRGMRIDTFRNKEKNSQWDNQKVDLTAEMKSLLEHYYIDIHGNLKDAISAQTDKAFFTGLLHILKLTLQMRNSITGTETDYLVSPVVDENGIFYDSRSCGDELPENADANGAYNIARKGLMMIEQIKDAKDLDNLKFDISNKAWLNFAQQKPYKNG

SEQ ID NO: 1593 - protein, 1274 aa, unidentified
  REGION 1..1274: note = Description of Unknown: uncultivated organism sequence
  REGION 1..1274: note = Category: MG75 effectors
  REGION 1..1274: note = Description: MG75-79 effector
MAKIFEDFKRLYPLSKTLRFEAKPIGATLDNIIKSGLLDEDEHRAASYVRVKKLIDEYHKVFIDRVLDNGCLPLKNEGHNNSLTEYYESYVTKSQNEDAKKVFKEIQQNLRSIIAKKLTEDKAYANLFGKNLIESYKDKTDKTKIIDSDLIKFINTAESTQLDSMSQDEAKELVKEFWGFTTYFVGFYDNRKNMYTAEEKSTGIAYRLVNENLPKFIDNMEAFKKAIARPEIQANMEELYSDFSEYLNVESVQEMFQLDYYNMLLTQKQIDVYNAIIGGKTDDEHDVKIKGINEYINLYNQQHKDDKLPKLKALFKQILSDRNAISWLPEEFNGDQEVLNAIKDCYERLSENVLGDKVLKSLLGSLSDYSLDGIFIRNDLQLTDISQKMFGNWCVIQNAIMQNIKHVAPARKHKESEEDYEKRIAGIFKKVDSFSISFINDCLNEADPNNAYFVENYFATFGAVNTPTMQRENLFALVQNAYTEVAALLHSDYPTAKHLAQDKVNVAKIKALLDAIKSLQHFVKPLLGKGDESDKDERFYGELASLWAELDTVTPLYNMIRNYMTRKPYSQKKIKLNFENPQLLGGWDANKEKDYATIILRRDGLYYLAIMNKESKKLLGKAMPSDGECYEKMVYKLLPGANKMLPKVFFAKSRMEDFKPSKELVEKYNNGTHKKGKNFNIQDCHNLIDYFKQSISKHEDWGKFGFNFSDTSTYEDLSGFYREVEQQGYKLSFTRVSVSYISQLVEEGKMYLFQIYNKDFSEYSKGTPNMHTLYWKALFDERNLADVVYKLNGQAEMFYRKKSIENTHPTHPANHPILNKNKDNKKKESLFDYDLIKDRRYTVDKFMFHVPVTMNFKSSGSENINQDVKAYLRHADDMHIIGIDRGERHLLYLVVIDLQGNIKEQYSLNEIVNEYNGNTYHTNYHDLLDVREEERLKARQSWQTIENIKELKEGYLSQVIHKITQLMVKYHAIVVLEDLNMGFMRGRQKVEKQVYQKFEKMLIDKLNYLVDKKADASVSGGLLNAYQLTSKFDSFQKLGKQSGFLFYIPAWNTSKIDPVTGFVNLLDTRYQNVEKAKVFFSKFDAIRYNKDKDWFEFNLDYDKFGKKAEGTRTKWTLCTRGMRIDTFRNKEKNSQWDNQKVDLTAEMKSLLEHYYIDIHGNLKDAISAQTDKAFFTGLLHILKLTLQMRNSITGTETDYLVSPVADENGIFYDSRSCGDELPENADANGAYNIARKGLMLIEQIKEAKDLDNLKFDISNKSWLNFAQQKPYKNG

SEQ ID NO: 1594 - protein, 1274 aa, unidentified
  REGION 1..1274: note = Description of Unknown: uncultivated organism sequence
  REGION 1..1274: note = Category: MG75 effectors
  REGION 1..1274: note = Description: MG75-80 effector
MAKNFEDFKRLYPLSKTLRFEAKPIGATLDNIVKSGLLDEDEHRAASYVKVKKLIDEYHKVFIDRVLADGCLPLENEGHNNSLAEYYDSYVSKSQNEDAKKAFEENQQNLRSIIAKKLTEDKAYANLFGKNLIESYKDKEDKKKIIDSDLIQFICTAEATQLDSMSQDEAKEIVKEFWGFTTYFVGFFDNRKNMYTVEEKSTGIAYRLINENLPKFIDNMEAFKKAIARPEIQANMEELYSNFSEYLNVESIQEMFLLDYYNMLLTQKQIDVYNAIIGGKTDDEHDVKIKGINEYINLYNQQHKDNKLPKFKALFKQILSDRNAISWLPEEFNSDQEVLNAIKDCYERLSENVLGDKVLKSLLGSLSDYTLDGIFIRNDLQLTDISQKMFGNWCVIQNAIMQNIKHVAPARKHKESEEDYEKRIAGIFKKADSFSISYINDCLNEADSNNAYFVENYFATFGAVNTPTMQRENLFSLVQNAYTEVAALLHSDYPTAKHLAQDKANVAKIKALLDAIKALQHFVKPLLGKGDESDKDERFYGELALLWAELDTVTPLYNMIRNYMTRKPYSQKKIKLNFENPQLLGGWDANKEKDYATIILRRDGLYYLAIMNKESKKLLGKAMPSDGECYEKMVYKLLPGANKMLPKVFFAKSRMEDFKPSKELVEKYNNGTHKKGKNFNIQDCHNLIDYFKQSISKHEDWGKFGFNFSDTSTYEDLSVFYREVEQQGYKLSFARVSVSYISQLVEEGKMYLFQIYNKDFSEYSKGTPNMHTLYWKALFDERNLADVVYKLNGQAEMFYRKKSIENTHPTHPANHPILNKNKDNKKKESLFDYDLIKDRRYTVDKFMFHVPITMNFKSSGSENINQDVKAYLRHADDMHIIGIDRGERHLLYLVVIDLQGNIKEQYSLNEIVNEYNGNTYHTNYHDLLDVREEERLKARQSWQTIENIKELKEGYLSQVIHKITQLMVKYHAIVVLEDLNMGFMRGRQKVEKQVYQKFEKMLIDKLNYLVDKKADAFVSGGLLNAYQLTSKFDSFQKLGKQSGFLFYIPAWNTSKIDPVTGFVNLLDTRYQNVEKAKVFFSKFDAIRYNKDKDWFEFNLDYDKFGKKAEGTKTKWTLCTRGMRIDTFRNKEKNSQWDNHEVDLTAEMKSLLEHYYIDIHGNLKDAISAQTDKVFFTGLLHILKLTLQMRNSITGTETDYLISPVADENGIFYDSRSCGDELPENADANGAYNIARKGLMMIEQIKDAKDLDNLKFDISNKSWLNFAQQKPYKNE

SEQ ID NO: 1595 - protein, 1222 aa, unidentified
  REGION 1..1222: note = Description of Unknown: uncultivated organism sequence
  REGION 1..1222: note = Category: MG75 effectors
  REGION 1..1222: note = Description: MG75-81 effector
MKKLIDEYHKVFIDRVLNDGCLTIENKGKQDSLEEYFESYISKSNDENANKAFKEIQGNLRSLIANKLTKDKGYANLFGKNLIESYKDKDDTKKIIDSDLIQFINTAEPSKLDSMSQDEAKELVKEFRGFTTYFVGFFDNRKNMYTSEEKSTGIAYRLVNENLPKFIDNMEAFKKAIAKPEIQANMEELYSNFAEYLNVESIQEMFKLDYYNMLLTQKQIDVYNAIIGGKTDEDHDVKIKGINEYINLYNQQHKDEKLPKLKALFKQILSDRNAISWLPEEFNSDQDVLNAIKDCYERLSENVLGDKVLKSLLCSLSDYNLNGIFVRNDLQLTDISQKTFGNWSVIQNAIMQNIKNVAPARKRKESEEDYEKRISDIFKKADSFSIQYINDCLNEMDNNNLHAVDGYFATLGAVNTPTMQRENLFALIQNAYTDISDLLDTPYPENKNLAQDKTNVAKVKALLDAIKSLQHFVKPLLGMGDESDKDERFYGELASLWTELDTVTPLYNMIRNYMTRKPYSEKKIKLNFENPQLLGGWDANKEKDYATIILRRNGMYYLAIMDKDSKKLLGKTMPSDGECYEKMVYKLLPGANKMLPKVFFAKSRINDFKPSKKIVENYNNGTHKKGKNFNINDCHDLIDYFKQSIDKHEDWSKFGFNFSDTSTYEDLSGFYREVEQQGYKLSFTNISVSFIDKLVDEGKMYLFQIYNKDFSDYSKGTPNMHTLYWKALFDERNLADVVYKLNGQAEMFYRKKSIDYTHPTHPANHPIQNKNKDNKKKESVFEYDLVKDRRYTVDKFLFHVPINMNFKSVGSENINQQVREYLQQADDTHIIGIDRGERHLLYLVVIDMQGNIKEQFTLNEIVNEYNGNTYRTNYHDLLDTREEERLTARQSWQTIENIKELKEGYLSQVVHKITQLMVKYHAVVVLEDLNKGFMRGRQKVEKQVYQKFEKMLIDKLNYLVDKKADAAQSGGLLNAYQLTSKFDSFQKLGKQSGFLFYIPAWNTSKIDPVTGFVNLLDTRYQNTEKSKAFFSKFDAIRYNADKDWFEFNLDYDKFGTKAEGTRTKWILCTQGNRICRNADKNPQWDNPKIDLTRELKSLFEHYNINICGNLKEEICSQTDKAFFTGLLHILKLTLQMRNSITGTETDYLVSPVADENGVFYDSRSCGDRLPENADANGAYNIARKGLMLIGQIKETKDLANFKYDISNKAWLNFAQQKPYKNE

SEQ ID NO: 1596 - protein, 1245 aa, unidentified
  REGION 1..1245: note = Description of Unknown: uncultivated organism sequence
  REGION 1..1245: note = Category: MG75 effectors
  REGION 1..1245: note = Description: MG75-82 effector
METFSGFTNLYPLSKTLRFRLIPVGETLKYFIGSGILEEDQHRAESYVKVKAIIDDYHRAYIENSLSGFELPLESTGKFNSLEEYYLYHNIRNKTEEIQNLSSKVRTNLRKQVVAQLTKNEIFKRIDKKELIQSDLIDFVKNEPDANEKIALISEFRNFTVYFKGFHENCRNMYSDEEKSTSIAFRLIHENLPKFIDNMEVFAKIQNTSISENFDAIQKELCPELVTLCEMFKLGYFNKTLSQKQIDAYNTVIGGKTTSEGKKIKGLNEYINLYNQQHKQEKLPKMKLLFKQILSDRESASWLPEKFENDSQVVGAIVNFWNTIHDTVLAEGGLKTIIASLGSYGLEGIFLKNDLQLTDISQKATGSWGKISSEIKQKIEVMNPQKKKESYETYQERIDKIFKSYKSFSLAFINECLRGEYKIEDYFLKLGAVNSSSLQKENHFSHILNTYTDVKEVIGLYSESTDTKLIQDNDSIQKIKQFLDAVKDLQAYVKPLLGNGDETGKDERFYGDLIEYWSLLDLITPLYNMVRNYVTQKPYSVDKIKINFQNPTLLNGWDLNKETDNTSVILRRDGKYYLAIMNNKSRKVFLKYPSGTDRNCYEKMEYKLLPGANKMLPKVFFSKSRINEFMPNERLLSNYEKGTHKKSGTCFSLDDCHTLIDFFKKSLDKHEDWKNFGFKFSDTSTYEDMSGFYKEVENQGYKLSFKPIDATYVDQLVDEGKIFLFQIYNKDFSEHSKGTPNMHTLYWKMLFDETNLGDVVYKLNGEAEVFFRKASINVSHPTHPANIPIKKKNLKHKDEERILKYDLIKDKRYTVDQFQFHVPITMNFKADGNGNINQKAIDYLRSASDTHIIGIDRGERNLLYLVVIDGNGKICEQFSLNEIEVEYNGEKYSTNYHDLLNVKENERKQARQSWQSIANIKDLKEGYLSQVIHKISELMVKYNAIVVLEDLNAGFMRGRQKVEKQVYQKFEKKLIEKLNYLVFKKQSSDLPGGLMHAYQLANKFESFNTLGKQSGFLFYIPAWNTSKMDPVTGFVNLFDVKYESVDKAKSFFSKFDSIRYNVERDMFEWKFNYGEFTKKAEGTKTDWTVCSYGNRIITFRNPDKNSQWDNKEINLTENIKLLFERFGIDLSSNLKDEIMQRTEKEFFIELISLFKLVLQMRNSWTGTDIDYLVSPVCNENGEFFDSRNVDETLPQNADANGAYNIARKGMILLDKIKKSNGEKKLALSITNREWLSFAQGCCKNG

SEQ ID NO: 1597 - protein, 1245 aa, unidentified
  REGION 1..1245: note = Description of Unknown: uncultivated organism sequence
  REGION 1..1245: note = Category: MG75 effectors
  REGION 1..1245: note = Description: MG75-83 effector
MGIFSDFTNLYPLSKTLRFKLIPVGETLKHFMDSGILEEDQHRAESYVKVKAIIDDYHRAYIESALAGFELPLESTGKYNSLEEYYMYHSIRNKTEEIQNTLSKIRASLRKQIVGQLVKNEKFKRIDKKELIQDDLIDFVRNDADADEKIGLISEFRNFTVYFKGFHENRKNMYSDEEKSTSIAFRLIHENLPKFIDNMEVFAKIANTSISDDFVAVQKELCPESVTLCEMFKLGYFNKTLSQKQIDAYNTIIGGKTTSDGDKIKGLNEYINLYNQQHRQEKLPKMKLLFKQILSDKESASWLPEKFENDSQVARAILDFWNTIRDTVLAEGGLRTVVSSLGSYCLEGVFLKNDLQLADISQKATGDWGKIAAEIKVKIESTNPQKKKESYEVYQERIDKLFKSYKSFSLAFVNDCLRGEYKIEDYFVRLGAVNTDTLQKENHFARIFNAYTDVKEVLESYANSSDTQLIQDNVSIQKLKQFLDAVKELQAYVKPLLGCGDESGKDERFYGDFVEYWNQLDLITPLYNMVRNYVTRKPYSVEKIKINFQNPTLLNGWDLNKETDNTSVILRRGGKYYLAIMNSKFRKVFLEYPSGVNRDCYEKMEYKLLPGANKMLPKVFFSKSRINEFMPDDELLSNYEKGTHKKSGNCFSLDDCHALIDFFKKSLNKHEDWKNFGFKFSDTSTYTDMSGFYKEVEHQGYKLSFKPVDAGYVDGLVDEGKIFLFQIYNKDFSESSKGTPNLHTLYWRMLFDETNLGDVVYKLNGEAELFFRKASIKVSHPTHPANVPIRKKNPMHKDEERTLKYDLIKDKRYTVDQFQFHVPITMNFKSDGSGNINQKVLEYLRAASDTHIIGIDRGERNLLYLVVIDGNGKICEQFSLNEVKVEYNGEVYSTDYHELLDVKEAERKQARQSWQSIANIKELKEGYLSQVIHKIAEMIVKYHAIVVLEDLNAGFMRGRQKVEKQVYQKFEKMLIEKLNYLVFKKQPSDLPGGLMHAYQLTNKFESFSSLGKQCGFLFYIPAWNTSKMDPVTGFVNLFDVKYESVDKAKSFFSKFESIRYNAERDLFEWKFNYGDFTKKAEGSKSDWTACSYGNRIITYRNPDKNAQWDSKEINLTACIKTLFEKFGIDLSSNLKEAIMQRDEKEFFVELISLFKLVLQIRNSLTGKDIDYLMSPVCNANGDFFDSRKVDESLPQNADANGAYNIARKGMILLDKIRECVGDKKLNLAITNKEWLSFAQGYCKNG

SEQ ID NO: 1598 - protein, 1274 aa, unidentified
  REGION 1..1274: note = Description of Unknown: uncultivated organism sequence
  REGION 1..1274: note = Category: MG75 effectors
  REGION 1..1274: note = Description: MG75-84 effector
MAKNFEDFKRLYPLSKTLRFEAKPIGATLDNIVKSGLLDEDEHRAASYVKVKKLIDEYHKVFIDRVLDNGCLPLEDKGDNNSLAEYYDSYVSKSQNEDAKKAFKEIQQNLRSIIAKKLTDDKAYANLFGNKLIESYKDKADKTKIIDSDLIQFIHTAESTQLDSMSQDEAKELVKEFWGFTTYFVGFFDNRKNMYTAEEKSTGIAYRLINENLPKFIDNMEAFKKAIARPEIQANMEELYSNFSEYLNVESIQEMFLLDYYNMLLTQKQIDVYNAIIGGKTDDEHDVKIKGINEYINLYNQQHKDDKLPKLKALFKQILSDRNAISWLPEEFNSDQEVLNAIKDCYERLAENVLGDKVLKSLLGSLADYSLDGIFIRNDLQLTDISQKMFGNWGVIQNAIMQNIKHVAPARKHKESEEDYEKRIAGIFKKADSFSISYINDCLNEADPNNAYFVENYFATFGAINTPTMQRENLFALVQNAYTEVAALLHSDYPTVKHLAQDKANVSKIKALLDAIKSLQHFVKPLLGKGDESDKDERFYGELASLWAELDTVTPLYNMIRNYMTRKPYSQKKIKLNFENPQLLGGWDANKEKDYATIILRRNGLYYLAIMNKDSKKLLGKAMPSDGECYEKMVYKLLPGANKMLPKVFFAKSRMEDFKPSKELVEKYNNGTHKKGKNFCIQDCHNLIDYFKQSIDKHEDWSKFGFNFSETSTYEDLSGFYREVEQQGYKLSFARVSVSYINQLVEEGKMYLFQIYNKDFSEYSKGTPNMHTLYWKALFAERNLADVVYKLNGQAEMFYRKKSIENTHPTHPANHPILNKNKDNKKKESLFEYNLIKDRRYTVDKFMFHVPITMNFKSSGSENINQDVKAYLRYADDMHIIGIDRGERHLLYLVVIDLQGNIKEQVSLNEIVNDYNGNTYHTNYHDLLDVREDERLKARQSWQAIENIKELKEGYLSQVIHKITQLMVKYHAIVVLEDLNMGFMRGRQKVEKQVYQKFEKMLIDKLNYLVDKKADVSVSGGLLNAYQLTSKFDSFQKMGKQSGFLFYIPAWNTSKIDPITGFVNLLDTRYQNVEKAKVFFSKFDAIRYNKDKDWFEFNLDYDKFGKKAEGTRTKWALCTRGMRIDTFRNKEKNSQWDNQEVDLTAEMKSLLEHYYIDIHGNLKDAISAQTDKAFFTGLLHILKLTLQMRNSITGTETDYLVSPVADENGIFYDSRSCGDELPENADANGAYNIARKGLMMIEQIKEAKDLDNLKFDISNKSWLNFAQQKPYKNG

SEQ ID NO: 1599 - protein, 1272 aa, unidentified
  REGION 1..1272: note = Description of Unknown: uncultivated organism sequence
  REGION 1..1272: note = Category: MG75 effectors
  REGION 1..1272: note = Description: MG75-85 effector
MKFDDFKKLYSLSKTLRFEAKPVGSTLKNIIESGLLEEDEHRAQSYVKVKKLIDEYHKVFIDRVLNDGCLTIENKGKKDSLEEYYESYMSKSNDENVSKTFKEIQENLRSVIAKKLTDNNAYANLFGNKLIESYKDKDEKNKIIDSDLIQFINTAEPSQLDSMSQDEAKELVKEFWGFTTYFVGFFDNRKNMYTSEEKSTGIAYRLVNENLPKFIDNMEAFKKAIAKPEIQTNMEELYSNFAEYLNVESIQEMFQLDYYNMLLTQKQIDVYNAIIGGKTDEEHDIKIKGINEYINLYNQQHKDEKLPKLKALFKQILSDRNAISWLPEEFNSDQEVLNAINDCYKRLSENVLGDKVLKSLLCSLDDYNLDGIFVRNDLQLTDISQKMFGNWSVIQSAIMQNIKNVAPARKRKESEEDYEKRISDIFKKADSFSIQYINDCLNEMDNNNLHAVDGYFATLGAVNTPTMQRENLFALIQNAYTDISNLLETPYPENKNLAQDKTNVAKVKALLDAIKSLQHFVKPLLGKGDESDKDERFYGELASLWTELDTVTPLYNMIRNYMTRKPYSEKKIKLNFENPQLLGGWDANKEKDYATIILRRNGMYYLAIMDKDSKKLLGKTMPSDGECYEKMVYKLLPGANKMLPKVFFAKSRINDFKPSKLIVENYNNGTHKKGKNFNINDCHNLIDYFKQSIDKHEDWSKFGFNFSDTSTYEDLSGFYREVEQQGYKLSFTNVSVSFIDKLVDDGKMYLFQIYNKDFSDFSKGTPNMHTLYWKALFDERNLADVVYKLNGQAEMFYRKKSINNTHPTHPANHPIQNKNKDNKKKESVFEYDLIKDRRYTVDKFLFHVPITMNFKSVGSENINQQVREYLQQADDTHIIGIDRGERHLLYLVVIDMQGNIKEQFTLNEIVNEYNGNTYRTNYHDLLDTREEERLTARQSWQTIENIKELKEGYLSQVIHKITQLMVKYHAVVVLEDLNKGFMRGRQKVEKQVYQKFEKMLIDKLNYLVDKKADAAQSGGLLNAYQLTSKFDSFQKLGKQSGFLFYIPAWNTSKIDPVTGFVNLLDTRYQNTEKAKAFFSRFDAIRYNANKDWFEFYLDYDKFCTKAEGTRTRWTLCTQGSRISTFRNAEKNSQWDNLEVDLTREMKSLFEHYHINICGNLKEEICLQTDKAFFTGLLHMLKLTLQMRNSITGTETDYLISPVADENGTFYDSRSCDATLPKNADANGAYNIARKGLMFIGQIKETKDLANFKYDISNKAWLNFAQQKPYKNE

SEQ ID NO: 1600 - protein, 1319 aa, unidentified
  REGION 1..1319: note = Description of Unknown: uncultivated organism sequence
  REGION 1..1319: note = Category: MG75 effectors
  REGION 1..1319: note = Description: MG75-86 effector
MAKIFEDFKRLYPLSKTLRFDAKPVGATLDNIVKSGLLEEDEHRAASYVRVKKLIDEYHKVFIDRVLDNGCLPLENKGENNSLAEYYDSYVSKSQNEDAKKAFEENQQNLRSIIAKKLTGDKAYANLFGKNLIESYKDKKDKKKIIDSDLIQFINTADSTQLDSMTQVEAKELVKEFWGFVTYFYGFFDNRKNMYTAEKKSTGIAYRLINENLPKFIDNMEAFKKVIARPEIQANMEELYSDFSEYLNVESIQEMFQLDYYDMLLTQKQIDVYNAIIGGKTDDEHDVKIKGINEYINLYNQQHKDTRLPKLKALFKQILSDRNAISWLPEEFNSDQEVLNAIKDCYERLSENVLGDKVLKSLLGSLADYSLEGIFIRNDLQLTDVSQKMFGNWGVIQNAIMQNIKHVAPARKHKESEEEYEKRIAGIFKKADSFSISYLNDCLNEADPNNAYFVENYFATFGAVNTPTMQRENLFALVQNKYTEVAALLHSDYPTAKHLAQDKANVAKIKALLDAIKSLQHFVKPLLGKGDESDKDERFYGELASLWAELETVTPLYNMIRNYMTRKPYSQKKIKLNFENPQLLDGWDANKEKDYATIILRRNGLYYLAIMGKDSKNLLGKAMPSDGECYEKMVYKQFDISKQLPKCTTELKHVRKALVEDAKRSCLLSDFNNWNKPLNVTRKLWELNNFVWDKKKEDWVLRKKDNETRPKKFHKKYLELTSDKKGYNQAKNDWIKFIKEFLSSYKKVEAYDIHYKKRYNSVDELYKQLNGDLYAISFTYVSASFIEQLVSEGKMYLFQIYNKDFSEYSKGTPNMHTLYWKALFDERNLADVVYKLNGQAEMFYRKKSIENTHPTHPANHPILNKNKDNKKKESLFDYDLIKDRRYTVDKFMFHVPITMNFKSSGSENINQDVKAYLRHADDMHIIGIDRGERHLLYLVVIDLQGNIKEQYSLNEIVNEYNGNTYHTNYHDLLDVREEERLKARQSWQTIENIKELKEGYLSQVIHKITQLMVKYHAIVVLEDLNMGFMRGRQKVEKQVYQKFEKMLIDKLNYLVDKKADASVSGGLLNAYQLTSKFDSFQKMGKQSGFLFYIPAWNTSKIDPVTGFVNLLDTRYQNVEKAKVFFSKFDAIRYNKDKDWFEFNLDYDKFGKKAEGTRTKWALCTRGMRIDTFRNKEKNSQWDNQEVDLTAEMKSLLEHYYIDIHGNLKDAISAQTDKTFFTGLLHILKLTLQMRNSITGTETDYLVSPVADENGIFYDSRSCGDELPENADANGAYNIARKGLMMIEQIKDAKDLNNLKFDISNKAWLNFAQQKPYKNG

SEQ ID NO: 1601 - protein, 1274 aa, unidentified
  REGION 1..1274: note = Description of Unknown: uncultivated organism sequence
  REGION 1..1274: note = Category: MG75 effectors
  REGION 1..1274: note = Description: MG75-87 effector
MAKIFEDFKRLYPLSKTLRFEAKPIGATLDNMVKSGLLDEDEHRAASYVKVKKLIDEYHKVFIDRVLDNGCLPLKNEGHNNSLTEYYESYVTKSQNEDAKKVFKEIQQNLRSIIAKKLTEDKAYANLFGKNLIESYKDKTDKTKIIDSDLIKFINTAESTQLDSMSQDEAKELVKEFWGFTTYFVGFYDNRKNMYTAEEKSTGIAYRLVNENLPKFIDNMEAFKKAIARPEIQANMEELYSDFSEYLNVESVQEMFQLDYYNMLLTQKQIDVYNAIIGGKTDDEHDVKIKGINEYINLYNQQHKDDKLPKLKALFKQILSDRNAISWLPEEFNGDQEVLNAIKDCYERLSENVLGDKVLKSLLGSLADYSLEGIFIRNDLQLTDVSQKMFGNWGVIQNAIIQNIKHVAPARKHKESEEEYEKRIAGIFKKADSFSISYINDCLNEADPNNAYFVENYFATQGAVDTPTMQRENLFALVQNAYTEVAALLHSDYPTAKNLAQDKADVAKIKALLDAIKSLQHFVKPLLGKGDESDKDERFYGELTSLWSELDTVTPLYNMIRNYMTRKPYSQKKIKLNFENPQLLGGWDANKEKDYATIILRRNGLYYLAIMNKDSKKLLGKAMPSDGECYEKMVYKLLPGANKMLPKVFFTKSRMGDFKPSKELIEKYNNGTHKKGKNFNIQDCHNLIDYFKQSISKHEDWGKFGFNFSDTSTYEDLSGFYREVEQQGYKLSFARVSVSYISQLVEEGKMYLFQIYNKDFSEYSKGTPNMHTLYWKALFDECNLADVVYKLNGQAEMFYRKKSIENTHPTHPANHPIQNKNKDNKKKESLFDYDLIKDRRYTVDKFMFHVPITMNFKSSGSENINQDVKAYLRHADDMHIIGIDRGERHLLYLVVIDLQGNIKEQFSLNEIVNEYNGNTYHTNYHDLLDVREEERLKARQSWQTIENIKELKEGYLSQVIHKITQLMVKYHAIVVLEDLNMGFMRGRQKVEKQVYQKFEKMLIDKLNYLVDKKADASVSGGLLNAYQLTSKFDSFQKLGKQSGFLFYIPAWNTSKIDPITGFVNLLDTRYQNVEKAKVFFSKFDAIRYNKDKDWFEFNLDYDKFGKKAEGTRTKWTLCTRGMRIDTFRNKEKNSQWDNQEVDLTAEMKSLLEHYYIDIHGNLKDAISAQTDKAFFTGLLHILKLTLQMRNSITGTETDYLVSPVADENGIFYDSRSCGDELPENADANGAYNIARKGLMMIEQIKDAKDLDNLKFDISNKSWLNFAQQKPYKNE

SEQ ID NO: 1602 - protein, 1274 aa, unidentified
  REGION 1..1274: note = Description of Unknown: uncultivated organism sequence
  REGION 1..1274: note = Category: MG75 effectors
  REGION 1..1274: note = Description: MG75-88 effector
MAKIFEDFKRLYPLSKTLRFEAKPIGATLDNMVKSGLLDEDEHRAASYVKVKKLIDEYHKVFIDRVLDNGCLPLKNEGHNNSLTEYYESYVTKSQNEDAKKVFKEIQQNLRSIIAKKLTEDKAYANLFGKNLIESYKDKTDKTKIIDSDLIKFINTAESTQLDSMSQDEAKELVKEFWGFTTYFVGFYDNRKNMYTAEEKSTGIAYRLVNENLPKFIDNMEAFKKAIARPEIQANMEELYSDFSEYLNVESVQEMFQLDYYNMLLTQKQIDVYNAIIGGKTDDEHDVKIKGINEYINLYNQQHKDDKLPKLKALFKQILSDRNAISWLPEEFNGDQEVLNAIKDCYERLSENVLGDKVLKSLLGSLADYSLEGIFIRNDLQLTDVSQKMFGNWGVIQNAIIQNIKHVAPARKHKESEEEYEKRIAGIFKKADSFSISYINDCLNEADPNNAYFVENYFATQGAVDTPTMQRENLFALVQNAYTEVAALLHSDYPTAKNLAQDKADVAKIKALLDAIKSLQHFVKPLLGKGDESDKDERFYGELTSLWSELDTVTPLYNMIRNYMTRKPYSQKKIKLNFENPQLLGGWDANKEKDYATIILRRNGLYYLAIMNKDSKKLLGKAMPSDGECYEKMVYKLLPGANKMLPKVFFAKSRMGDFKPSKELIEKYNNGTHKKGKNFNIQDCHNLIDYFKQSISKHEDWGKFGFNFSDTSTYEDLSGFYREVEQQGYKLSFARVSVSYISQLVEEGKMYLFQIYNKDFSEYSKGTPNMHTLYWKALFDECNLADVVYKLNGQAEMFYRKKSIENTHPTHPANHPIQNKNKDNKKKESLFDYDLIKDRRYTVDKFMFHVPITMNFKSSGSENINQDVKAYLRHADDMHIIGIDRGERHLLYLVVIDLQGNIKEQFSLNEIVNEYNGNTYHTNYHDLLDVREEERLKARQSWQTIENIKELKEGYLSQVIHKITQLMVKYHAIVVLEDLNMGFMRGRQKVEKQVYQKFEKMLIDKLNYLVDKKADASVSGGLLNAYQLTSKFDSFQKLGKQSGFLFYIPAWNTSKIDPITGFVNLLDTRYQNVEKAKVFFSKFDAIRYNKDKDWFEFNLDYDKFGKKAEGTRTKWTLCTRGMRIDTFRNKEKNSQWDNQEVDLTAEMKSLLEHYYIDIHGNLKDAISAQTDKAFFTGLLHILKLTLQMRNSITGTETDYLVSPVADENGIFYDSRSCGDELPENADANGAYNIARKGLMMIEQIKDAKDLDNLKFDISNKSWLNFAQQKPYKNE

SEQ ID NO: 1603 - protein, 1271 aa, unidentified
  REGION 1..1271: note = Description of Unknown: uncultivated organism sequence
  REGION 1..1271: note = Category: MG75 effectors
  REGION 1..1271: note = Description: MG75-89 effector
MEFNDFKRLYPLSKTLRFEAKPIGSTLNNIIKSGLLEEDEHRAQSYVKVKKLIDEYHKVFIDRVLDDGCLTIENKDKKNSLEEYYESYMSKSNDENVSKTFKEIQENLRSVIAKKLTDDNAYANLFGNKLIESYKDKDDKKKIIDSDLIQFINTAEPSQLDSMSQDEAKELVKEFWGFTTYFVGFFDNRKNMYTSEEKSTGIAYRLVNENLPKFIDNMEAFKKAIAKPEIQANMGELYSNFAEYLNVESIQEMFQLDYYNMLLTQKQIDVYNAIIGGKTDEDHDVKIKGINEYINLYNQQHKDEKLPKLKALFKQILSDRNAISWLPEEFNSDKEVLNAIKDCYERLSENVLGDKVLKSLLCSLSDYNLNGIFVRNDLQLTDISQKMFGNWSVIQNAIMQNIKNVAPARKRKESEEDYEKRISDIFKKADSFSIQYINDCLNEMDNNNLHAVDGYFATLGAVNTPTMQRENLFALIQNAYTDISDLLDTPYPENKNLAQDKTNVAKVKALLDAIKSLQHFVKPLLGMGDESDKDERFYGELASLWTELDTVTPLYNMIRNYMTRKPYSEKKIKLNFENPQLLGGWDANKEKDYATIILRRNGMYYLAIMDKDSKKLLGKTMPSDGECYEKMVYKLLPGANKMLPKVFFAKSRINDFKPSKKIVENYNNGTHKKGKNFNINDCHDLIDYFKQSIDKHEDWSKFGFNFSDTSTYEDLSGFYREVEQQGYKLSFTNVSASFIDKLVDEGKMYLFQIYNKDFSDYSKGTPNMHTLYWKALFDERNLADVVYKLNGQAEMFYRKKSIDYTHPTHPANHPIQNKNKDNKKKESVFEYDLVKDRRYTVDKFLFHVPITMNFKSVGSENINQQVREYLQQADDTHIIGIDRGERHLLYLVVIDMQGNIKEQFTLNEIVNEYNGNTYRTNYHDLLDTREEERLTARQSWQTIENIKELKEGYLSQVVHKITQLMVKYHAVVVLEDLNKGFMRGRQKVEKQVYQKFEKMLIDKLNYLVDKKADATQSGGLLNAYQLTSKFDSFQKLGKQSGFLFYIPAWNTSKIDPVTGFVNLLDTRYLNTEKAKAFFSKFDAIRYNADKDWFEFNLDYDKFGTKAEGTRTTWTLCTQGNRICTFRNAEKNSQWDNQEIDLTREMKSLFEHYHINICGNLKEEICSQTDKAFFTGLLHILKLTLQMRNSITGTETDYLVSPVADENGVFYDSRSCGDTLPKNADANGAYNIARKGLMLIGQIKETKDLANFKYDISNKAWLNFAQQKPYKK

SEQ ID NO: 1604 - protein, 1264 aa, unidentified
  REGION 1..1264: note = Description of Unknown: uncultivated organism sequence
  REGION 1..1264: note = Category: MG75 effectors
  REGION 1..1264: note = Description: MG75-90 effector
MNFEQFTHLYPLSKTLRFELRPVGATLARIKEGGFLENDNHRAESYKKVKKLIDEYHKHFIEQALGDFSLTENETEGSKCLNSYLETYIQLYRSSRIEDAEKKAFEKVQAEMRKLIAKTLKGSEAYKRLFKQELIKEDLTAFLRTHGGTVADEELVEEFKNFTTYFTGFYENRENMYSEEEKSTAISNRLVNENLPKFVDNMAAFAIIAQVPEVRAMLDVMQKDLGAELDGTTIDELFTLPFFNKVLTQKQIAVYNAVIGGKVRDSHSKGESHIKGINQIVNLYNQQHKDARLPKLKMLYKQILSDREALSWLPEKFDKDADLLKAIHDGYERLASDGVLENLRTLLESMADYQAEGIFITNDQQLTRISQKMFGEWSFISEAILCVLKKEVPQKRNECDEKYEERIDKMLKNHGGFSIRFIDDCVAAYVNTLDDEEQKKRFIPTVEAYFATLGAFDTEEEQTVNFFSRIQNARDALQGLLDSAYPEGRALIQDKENGALLKELLDAILALMHFVKPLLGKNENGKDERFYGELMQIWDEFDSFVPLYNMSRNYLTQKPYSEEKYKLNFENSQLLKGWDLNKEADNTSIILRKDGLFYLAIMNKKHNKLFARELPADGDCYDKMDYKLLPGPNKMFPKVFFSKSRIAEFAPSEHIMDVYRKGSFKKGDTFNLQDCHDLIDFFKASILKHEDWRQFEFKFSETEQYDDISGFYREVEAQGYKVTFRQVSVSYIDRLVNEGKLYLFQIYNKDFSSYSKGTPNMHTLYWRALFDERNLSDVVYKLNGEAEVFYRKKSIEAHPTHPANRPIKNKNKLNDKVESLFAYDLIKDRRYSEDKFSLHVPITMNFKSIGGPNINDDVVEFLRTNENLHFIGIDRGERHLLYLTVIDSHGHILEQRTLNDVVNNYQGKDYHTDYHDLLETRERQRQEARSSWKAIENIKDLKEGYLAQVVHQIAQLMVKYHAIVVLEDLNGGFMRGRQKVERSVYQQFEKKLIDKLNYLVDKKTDAHAPGGLMNAYQLANQFKSFKSMGRQSGFIFYIPAWNTSKIDPVTGFTNLFDTRYKNVHDAQQFFSMFKSIRYNETADRFEFRFSYSDFTRKAEGSRTDWTVCTYGTRIKTFRDPQKNNEWTSKEVVLTEEFKKFFASYGVDIHSNLKDSIAAHDEKAFFEQLLALMRLTLQIRNSKSGTDVDYLLSPVADENGVFFDSRSCGNSLPQDADANGAYNIARKGLMLVRQMREAKDLKKFKADMTNRNWLKFAQEKPYLND

SEQ ID NO: 1605 - protein, 1246 aa, unidentified
  REGION 1..1246: note = Description of Unknown: uncultivated organism sequence
  REGION 1..1246: note = Category: MG75 effectors
  REGION 1..1246: note = Description: MG75-91 effector
MMETFSDFTNLYPLSKTLRFRLIPVGKTLRHFIDSGILEEDQHRAESYVKVKAIIDDYHRSYIESSLSAFELPVESMGKSNSLEEYYLYHNIRNKTEDIQNALSKVRNNLRKQIVAQLTKNEMFKRIDKKELIQNDLIDFVKNEPDANEKIALISEFRNFTVYFKGFHENRKNMYSDEEKSTSIAFRLIHENLPKFIDNMEVFAKIQNTSISEKFDAIQKELCPDSVAFVDMFKLGYFNRTLSQRQIDAYNTVISGRTTAEGEKIKGLNEYINLYNQQHKQEKLPKMKLLFKQILSDRESASWLPEKLENDKQVVGALVDFWNAIHDTVLAEGGLKTVISSLVSYSLEGIFLKNDLQLTDVSQKATGSWSKIPAAIKQKLEAMNPQKKKESYEGYQERIDKIFKSYKSFSLAFINECLHGEYKIEDYFIKLGAINTDLLQKENHFSHILNTYTDIKEVIESYSESTDTKLIRDNGSIQKIKQFLDAVKDLQSYVKPLLGNGDETGKDERFYGDFVEYWNQLDLITPLYNMVRNYVTQKNYSIEKIKINFQNPTLLNGWDLNKETDNTSVILRRDGKYYLAIMNSKFRKVFLKYPSGSDRNCYEKMEYKLLPGANKMLPKVFFSKSRIQEFMPDERLLSNYEKGTHKKTGNCFSLTDCHALIDFFKKSLNKHEDWKNFGFKFSNTSTYTDMSGFYKEVENQGYKLSFKPVDAVYVDQLVDEGKIFLFQIYNKDFSEHSKGTPNMHTLYWKMLFDETNLGDVVYKLNGEAEVFFRKASIKVSSPTHPANVPIKKKNPKHKDEERLLKYDLIKDKRYTVDQFQFHVPITMNFKSDGNGNINQKVVEYLRSASNIHIIGIDRGERNLLYLVVIDGSGKICEQFSLNEIKVEHNGETYSTNYHDLLDIKENERKQARQSWQSIANIKELKEGYLSQVIHKISELMVKYNAIVVLEDLNTGFMRGRQKVEKQVYQKFEKMLIEKLNYLVFKKQPSDSCGGLMHAYQLTNKFEGFNKLGKQSGFLFYIPAWNTSKMDPMTGFVNLFDLKYESIDKAKSFFSKFDSIRYNVERDMFEWKFNYDEFTKKAEGTKTNWTVCSYGNRIITFRNPNKNSQWDNKEINLTENIKLLFERFGIDLSSNLKDEIMQRTEKEFFIELISLFKLVLQMRNSWTGTDIDYLVSPVCNEKGEFFDSRNVDKALPQNADANGAYNIARKGLILLDRIKESTSDKKLNFSITNKEWLSFVQGCCKNG

SEQ ID NO: 1606 - protein, 1274 aa, unidentified
  REGION 1..1274: note = Description of Unknown: uncultivated organism sequence
  REGION 1..1274: note = Category: MG75 effectors
  REGION 1..1274: note = Description: MG75-92 effector
MAKIFEDFKRLYPLSKTLRFEAKPIGATLDNIIKSGLLDEDEHRAASYVRVKKLIDEYHKVFIDRVLDNGCLPLKNEGHNNSLTEYYESYVTKSQNEDAKKVFKEIQQNLRSIIAKKLTEDKAYANLFGKNLIESYKDKTDKTKIIDSDLIKFINTAESTQLDSMSQDEAKELVKEFWGFTTYFVGFYDNRKNMYTAEEKSTGIAYRLVNENLPKFIDNMEAFKKAIARPEIQANMEELYSDFSEYLNVESVQEMFQLDYYNMLLTQKQIDVYNAIIGGKTDDEHDVKIKGINEYINLYNQQHKDDKLPKLKALFKQILSDRNAISWLPEEFNGDQEVLNAIKDCYERLSENVLGDKVLKSLLGSLADYSLDGIFIRNDLQLTDISQKMFGNWGVIQNAIMQNIKHVAPARKHKESEEDYEKRIAGIFKKADSFSISYINDCLNEADPNNAYFVENYFATFGAVNTPTMQRENLFALIQNAYTEVAALLHSDYPIAKHLAQDKANVAKIKALLDAIKSLQHFVKPLLGKGDESDKDERFYGELASLWAELDMVTPLYNMIRNYMTRKPYSQKKIKLNFENPQLLGGWDANKEKDYATIILRRDGLYYLAIMNKESKKLLGKAMPSDGECYEKMVYKLLPGANKMLPKVFFAKSRMEDFKPSKELVEKYNNGTHKKGKNFNIQDCHNLIDYFKQSISKHEDWGKFGFNFSDTSTYEDLSGFYREVEQQGYKLSFARVSVSYISQLVEEGKMYLFQIYNKDFSEYSKGTPNMHTLYWKALFDERNLADVVYKLNGQAEMFYRKKSIENTHPTHPANHPILNKNKDNKKKESLFDYDLIKDRRYTVDKFMFHVPITMNFKSSGSENINQDVKAYLRHTDDMHIIGIDRGERHLLYLVVIDLQGNIKEQYSLNEIVNEYNGNTYHTNYHDLLDVREEERLKARQSWQTIENIKELKEGYLSQVIHKITQLMVKYHAIVVLEDLNMGFMRGRQKVEKQVYQKFEKMLIDKLNYLVDKKADASVSGGLLNAYQLTSKFDSFQKLGKQSGFLFYIPAWNTSKIDPVTGFVNLLDTRYQNVEKAKVFFSKFDAIRYNKDKDWFEFNLDYDKFGKKAEGTRTKWTLCTRGMRIDTFRNKEKNSQWDNQEVDLTAEMKSLLEHYYIDIHGNLKDAISAQTDKAFFTGLLHILKLTLQMRNSITGTETDYLVSPVADENGIFYDSRSCGDELPENADANGAYNIARKGLMLIEQIKEAKDLDNLKFDISNKSWLNFAQQKPYKNE

SEQ ID NO: 1607 - protein, 1264 aa, unidentified
  REGION 1..1264: note = Description of Unknown: uncultivated organism sequence
  REGION 1..1264: note = Category: MG75 effectors
  REGION 1..1264: note = Description: MG75-93 effector
MNFEQFTHLYPLSKTLRFELRPVGATLAKIKEGGFLENDNHRAESYKKVKKLIDEYHKHFIEQALGDFSLTENETEGSKCLNSYLETYIQLYRSSRIEDAEKKAFEKVQAEMRKFIAKTLKGSEAYKRLFKQELIKEDLTAFLRTHGGTVADEELVEEFKNFTTYFTGFYENRENMYSEEEKSTAISYRLVNENLPKFVDNMAAFAIIAQVPEVRAMLDVMQKDLGAELDGTTIDELFTLPFFNKVLTQKQIAVYNAVIGGKVSDSHSKGESHIKGINQIVNLYNQQHKDARLPKLKMLYKQILSDREALSWLPEKFDKDADLLKAIHDGYERLASDGVLENLRTLLESMADYQAEGIFITNDQQLTRISQKMFGEWSFISEAILCALKKDVPQKRNECDEKYEERIDKMLKNHGGFSIRFIDDCVAAYVNTLDDEEQKKRFIPTVEAYFATLGAFDTEEEQTVNFFSRIQNARDALQGLLDSAYPEGRALIQDKENGALLKELLDAILALMHFVKPLLGKNENGKDERFYGELMQIWDEFDSFVPLYNMSRNYLTQKPYSEEKYKLNFENSQLLKGWDLNKEADNTSIILRKDGLFYLAIMNKKHNKLFARELPTDGDCYEKMDYKLLPGPNKMFPKVFFSKSRKAEFAPSEHIMDIYKKGSFKKGETFNLQDCHDLIDFFKASILKHEDWRQFEFKFSETEQYDDISGFYREVEAQGYKVTFRQVSVSYIDRLVNEGKLYLFQIYNKDFSSYSKGTPNMHTLYWRALFDERNLSDVVYKLNGEAEVFYRKKSIEAHPTHPANRPIKNKNKLNDKEKSLFAYDLIKDRRYSEDKFSLHVPITMNFKSVGGPNINDDVVEFLRTNENLHFIGIDRGERHLLYLTVIDSHGHILEQRTLNDVVNNYQGKDYHTDYHDLLETRERQRQEARSSWKAIENIKDLKEGYLAQVVHQIAQLMVKYHAIVVLEDLNGGFMRGRQKVERSVYQQFEKKLIDKLNYLVDKKTDAHAPGGLMNAYQLANQFKSFKSMGRQSGFIFYIPAWNTSKIDPVTGFTNLFDTRYKNVHDAQQFFSAFKSIRYNETADRFEFKFSYSDFTRKAEGSRTDWTVCTYGTRIKTFRDPQKNNEWTSKEVVLTEEFKKFFAAYHVDIHSNLKDSIAAHDEKAFFEQLLALMRLTLQIRNSKSGTDVDYLLSPVADENGVFFDSRSCGNSLPQDADANGAYNIARKGLMLVRQMREAKDLKKFKADMTNRNWLKFAQEKPYLND

SEQ ID NO: 1608 - protein, 1321 aa, unidentified
  REGION 1..1321: note = Description of Unknown: uncultivated organism sequence
  REGION 1..1321: note = Category: MG75 effectors
  REGION 1..1321: note = Description: MG75-94 effector
MEFDDFKRLYPLSKTLRFEAKPIGATLKNIIKSGLLEEDEHRAQSYVKVKKLIDEYHKAFIDRVLNEGCLTIENKGNKDSLEEYYESYMSKSNDENVSKTFKDIQENLRSVIANKLTKDKGYANLFGNKLIESYKDKDDTKKIIDSDLIQFINTAEPSKLDSMSQDEAKELVKEFWGFTTYFEGFHKNRKNMYTSEEKSTGIAYRLVNENLPKFIDNMEAFKKAIAKPEIQANMEELYSNFAEYLNVESIQEMFQLDYYNMLLTQKQIDVYNAIIGGKTDEENDVNIKGINQYINIYNQHHKDEKLPKLKALFKQILSDRNAISWLPEEFNSDQDVLNAIKDCYERLSENVLGDKVLKSLLCSLSDYNLNGIFVRNDLQLTDISQKMFGNWNVIQNAIMQNFFFKKVAPARKRKESEEDYEKRISDIFKKTDSFSIQYINDCLNEMDDNNLHAVDGYFATLGAVNTPTMQRENLFALIQNAYTDISDLLDTPYPENKNLAQDKTNVAKVKALLDAIKSLQHFVKPLLGKGDESDKDERFYGELASLWTELDTVTLLFNMVHNYMTRKPYSQKKIKLNYKNTQLLAGWDANKEKEHAAIILRRNGMYYLAIMDKDSKNLLDKAMPSDGECYEKMVYKQFDISKQLPKCTTELKRVRKALVEDAKRSCLLSDSKDWNKPLNVTRKLWELNNYVWDKKKADWVLRKKENETRPKKFHKKYLELTSDKKGYNQAKNDWIKFTKEFLSSYKKVEDYDIHYKKRYNSVDELYKQLNSDFYTISFTYVSVSFIDKLVNEGKMYLFKIYNKDFSNYSKGTPNMHTLYWKALFDERNLADVVYKLNGEAEMFYRKKSINNTHPTHPANHPIQNKNKDNKKKESVFEYDLVKDYRYTEDKFLFHVPITMNFKSVGSENINQQVKEYLQQADDTHIIGIDRGERHLLYLVVIDMEGNIKEQFSLNEIVNEYNGNTYRTNYHDLLDVCADKRLKASQSWQTIENIKELKEGYLSQAIHKITQLMVKYHAVVVLEDLNKGFMRGRQKVEKQVYQKFEKMLIDKLNYLVDKKADAAQSGGLLNAYQLTSKFDSFQKLGKQSGFLFYIPAWNTSKIDPVTGFVNLFDTRYTNADKALEFFSKFDAIRYNEEKDWFEFEFDYDKFTQKAHGTRTKWTLCTYGMRLRSFKNPAKQYNWDSEVVALTDEFKRILGEAGIDIHENLKDAICNLEGKRRKYLEPLMQFMKLLLQLRNSRKNPEEDYILSPVADENGVFYDSRSCGDKLPENADANGAYNIARKGLMLIRQIKEAKEFGKVKYDISNKAWLNFAQQKPYKNE

SEQ ID NO: 1609 - protein, 1027 aa, unidentified
  REGION 1..1027: note = Description of Unknown: uncultivated organism sequence
  REGION 1..1027: note = Category: MG75 effectors
  REGION 1..1027: note = Description: MG75-95 effector
MAKNFEDFKRLYSLSKTLRFEAKPIGATLDNIVKSGLLDEDEHRAASYVKVKKLIDEYHKVFIDRVLDDGCLPLENKGNNNSLAEYYESYVSRAQDEDAKKKFKEIQQNLRSVIAKKLTEDKAYANLFGNKLIESYKDKEDKKKIIDSDLIQFINTAESTQLDSMSQDEAKELVKEFWGFVTYFYGFFDNRKNMYTAEEKSTGIAYRLVNENLPKFIDNIEAFNRAITRPEIQENMGVLYSDFSEYLNVESIQEMFQLDYYNMLLTQKQIDVYNAIIGGKTDDEHDVKIKGINEYINLYNQKHKDDKLPKLKSLFKQILSDRNAISWLPEEFNSDQEVLNAIKDCYERLSENVLGDKVLKSMLGSLADYSLDGIFIRNDLQLTDISQKMFGNWSVIQNAIMQNIKHVAPARKHKESEEEYENRIAGIFKKADSFSISYIDACLNETDPNNAYFVENYFATLGAVDTPTMQRENLFALVQNAYTEITALLHSDYPTEKTLAQDKANVAKIKALLDAIKSLQHFVKPLLGKGDESDKDERFYGELASLWAELDTMTPLYNMIRNYMTRKPYSQKKIKLNFENPQLLGGWDANKEKDYATIILRRNGLYYLAIMNKDSKKLLGKAMPSDGECYEKMVYKLLPGANKMLPKVFFAKSRMEDFKPSKELVEKYNNGTHKKGKNFNIQDCHNLIDYFKQSIDKHEDWSKFGFKFSDTSTYEDLSGFYREAEQQGYKLSFARVSVSYINQLVEEGKMYLFQIYNKDFSEYSKGTPNMHTLYWKALFDERNLADVVYKLNGQAEMFYRKKSIENTHPTHPANHPILNKNKDNNKKESLFEYDLIKDRRYTVDKFMFHVPITMNFKSSGSENINQDVKAYLCHADDMHIIGIDRGERHLLYLVVIDLQGNIKEQFSLNEIVNDYNGNTYHTNYHDLLDVREDERLKARQSWQTIENIKELKEGYLSQVIHKITQLMVKYHAIVVLEDLNMGFMRGRQKVEKQVYQKFEKMLIEKLNYLVDKKADASVSGGLLNAYQ

SEQ ID NO: 1610 - protein, 1274 aa, unidentified
  REGION 1..1274: note = Description of Unknown: uncultivated organism sequence
  REGION 1..1274: note = Category: MG75 effectors
  REGION 1..1274: note = Description: MG75-96 effector
MAKNFEDFKRLYPLSKTLRFEAKPIGATLDNIVKSGLLEEDEHRAASYVKVKKLIDEYHKVFIDRVLADGCLPLENEGHNNSLAEYYDSYVSKSQNEDAKKAFEENQQNLRSIIAKKLTEDKAYANLFGKNLIESYKDKTDKTKIIDSDLIQFINTAESTQLNSMSQDEAKELVKEFWGFTTYFVGFFDNRKNMYTAEEKSTGIAYRLINENLPKFIDNMEAFKKAIARPEIQANMEELYSNFSEYLNVESIQEMFLLDYYNMLLTQKQIDVYNAIIGGKTDDEHDVKIKGINEYINLYNQQHKDDKLPKLKALFKQILSDRNVISWLPEEFNSDQEVLNAIKDCYERLSDNVLGDKVLKSLLGSLADYSLDGIFIRNDLQLTDISQKMFGNWGVIQNAIMQNIKHVAPARKHKESEEDYEKRIAGIFKKADSFSISYINDCLNEADSNNAYFVENYFATFGAVNTPTMQRENLFSLVQNAYTEVAALLHSDYPTAKHLAQDKANVAKIKALLDAIKSLLHFVKPLLGKGDESNKDERFYGELASLWAELDTVTPLYNMIRNYMTRKPYSQKKIKLNFENPQLLGGWDANKEKDYATIILRRDGLYYLAIMNKESKKLLGKAMPSDGECYEKMVYKLLPGANKMLPKVFFAKSRMEDFKPSKELVEKYNNGTHKKGKNFNIQDCHNLIDYFKQSISKHEDWGKFGFNFSDTSTYEDLSGFYREVEQQGYKLSFARVSVSYISQLVEEGKMYLFQIYNKDFSEYSKGTPNMHTLYWKALFDERNLADVVYKLNGQAEMFYRKKSIENTHPTHPANHPILNKNKDNKKKESLFDYDLIKDRRYTVDKFMFHVPITMNFKSSGSENINQDVKAYLRHADDMHIIGIDRGERHLLYLVVIDLQGNIKEQYSLNEIVNEYNGNTYHTNYHDLLDVREDERLKARQSWQTIENIKELKEGYLSQVIHKITQLMVKYHAIVVLEDLNKGFMRGRQKVEKQVYQKFEKMLIDKLNYLVDKKADASVSGGLLNAYQLTSKFDSFQKLGKQSGFLFYIPAWNTSKIDPITGFVNLLDTRYQNVEKAKVFFSKFDAIRYNKDKDWFEFNLDYDKFGKKAEGTRTKWTLCTRGMRIDTFRNKEKNSQWDNHEVDLTAEMKSLLEHYYIDIHGNLKDAISAQTDKAFFTGLLHILKLTLQMRNSITGTETDYLVSPVADENGIFYDSRSCGDELPENADANGAYNIARKGLMMIEQIKEAKDLDNLKFDISNKSWLNFAQQKPYKNG

SEQ ID NO: 1611 - protein, 772 aa, unidentified
  REGION 1..772: note = Description of Unknown: uncultivated organism sequence
  REGION 1..772: note = Category: MG75 effectors
  REGION 1..772: note = Description: MG75-97 effector
MEFNDFKRLYPLSKTLRFEAKPIGSTLNNIIKSGLLEEDEHRAQSYVKVKKLIDEYHKVFIDRVLDDGCLTIENKDKKNSLEEYYESYMSKSNDENVSKTFKEIQENLRSVIAKKLTDDNAYANLFGNKLIESYKDKDDKKKIIDSDLIQFINTAEPSQLDSMSQDEAKELVKEFWGFTTYFVGFFDNRKNMYTSEEKSTGIAYRLVNENLPKFIDNMEAFKKAIAKPEIQANMGELYSNFAEYLNVESIQEMFQLDYYNMLLTQKQIDVYNAIIGGKTDEDHDVKIKGINEYINLYNQQHKDEKLPKLKALFKQILSDRNAISWLPEEFNSDKEVLNAIKDCYERLSENVLGDKVLKSLLCSLSDYNLNGIFVRNDLQLTDISQKMFGNWSVIQNAIMQNIKNVAPARKRKESEEDYEKRISDIFKKADSFSIQYINDCLNEMDNNNLHAVDGYFATLGAVNTPTMQRENLFALIQNAYTDISDLLDTPYPENKNLAQDKTNVAKVKALLDAIKSLQHFVKPLLGMGDESDKDERFYGELASLWTELDTVTPLYNMIRNYMTRKPYSEKKIKLNFENPQLLGGWDANKEKDYATIILRRNGMYYLAIMDKDSKKLLGKTMPSDGECYEKMVYKLLPGANKMLPKVFFAKSRINDFKPSKKIVENYNNGTHKKGKNFNINDCHDLIDYFKQSIDKHEDWSKFGFNFSDTSTYEDLSGFYREVEQQGYKLSFTNVSASFIDKLVDEGKMYLFQIYNKDFSDYSKGTPNMHTLY

SEQ ID NO: 1612 - protein, 1272 aa, unidentified
  REGION 1..1272: note = Description of Unknown: uncultivated organism sequence
  REGION 1..1272: note = Category: MG75 effectors
  REGION 1..1272: note = Description: MG75-98 effector
MEFNDFKRLYPLSKTLRFEAKPIGSTLNNIIKSGLLEEDEHRAQSYVKVKKLIDEYHKVFIDRVLDDGCLTIENKDKKNSLEEYYESYMSKSNDENVSKTFKEIQENLRSVIAKKLTDDNAYANLFGNKLIESYKDKDDKKKIIDSDLIQFINTAEPSQLDSMSQDEAKELVKEFWGFTTYFVGFFDNRKNMYTSEEKSTGIAYRLVNENLPKFIDNMEAFKKAIAKPEIQANMGELYSNFAEYLNVESIQEMFQLDYYNMLLTQKQIDVYNAIIGGKTDEDHDVKIKGINEYINLYNQQHKDEKLPKLKALFKQILSDRNAISWLPEEFNSDKEVLNAIKDCYERLSENVLGDKVLKSLLCSLSDYNLNGIFVRNDLQLTDISQKMFGNWSVIQNAIMQNIKNVAPARKRKESEEDYEKRISDIFKKADSFSIQYINDCLNEMDNNNLHAVDGYFATLGAVNTPTMQRENLFALIQNAYTDISDLLDTPYPENKNLAQDKTNVAKVKALLDAIKSLQHFVKPLLGMGDESDKDERFYGELASLWTELDTVTPLYNMIRNYMTRKPYSEKKIKLNFENPQLLGGWDANKEKDYATIILRRNGMYYLAIMDKDSKKLLGKTMPSDGECYEKMVYKLLPGANKMLPKVFFAKSRINDFKPSKKIVENYNNGTHKKGKNFNINDCHDLIDYFKQSIDKHEDWSKFGFNFSDTSTYEDLSGFYREVEQQGYKLSFTNVSASFIDKLVDEGKMYLFQIYNKDFSDYSKGTPNMHTLYWKALFDERNLADVVYKLNGQAEMFYRKKSIDYTHPTHPANHPIQNKNKDNKKKESVFEYDLVKDRRYTVDKFLFHVPITMNFKSVGSENINQQVREYLQQADDTHIIGIDRGERHLLYLVVIDMQGNIKEQFTLNEIVNEYNGNTYRTNYHDLLDTREEERLTARQSWQTIENIKELKEGYLSQVVHKITQLMVKYHAVVVLEDLNKGFMRGRQKVEKQVYQKFEKMLIDKLNYLVDKKADATQSGGLLNAYQLTSKFDSFQKLGKQSGFLFYIPAWNTSKIDPVTGFVNLLDTRYLNTEKAKAFFSKFDAIRYNADKDWFEFNLDYDKFGTKAEDTRTTWTLCTQGNRICTFRNAEKNSQWDNQEIDLTREMKSLFEHYHINICGNLKEEICSQTDKAFFTGLLHILKLTLQMRNSITGTETDYLVSPVADENGVFYDSRSCGDMLPKNADANGAYNIARKGLMLIGQIKETKDLANFKYDISNKAWLNFAQQKPYKNE

SEQ ID NO: 1613 - protein, 1211 aa, unidentified
  REGION 1..1211: note = Description of Unknown: uncultivated organism sequence
  REGION 1..1211: note = Category: MG75 effectors
  REGION 1..1211: note = Description: MG75-99 effector
MLICLVSRCSKLFYTISRCYFHIESTFSGASISFVLSHIARYAPSPEENSCIPITHFQCKNNFEHLLNKLIESYKDKEDKKKIIDSDLIQFINCANSSQLNGMSEDEAKELVKEFWGFTTYFEGFHTNRKNMYTAEEESTAIAHRLVNENLPKFIDNMDVFKKAVAKPEIQANIEELYANFAAYLNVESIQEMFQLDYYNMLLTQKQIDVYNAIIGGKTDEDHDVKIKGINEYINLYNQQHKNEKLPKLKVLFKQILSDRNAISWLPEEFNDDQEVLNAIKHCYERLSENVLGDKVLKSLLCSLGDYNLDGIFVRNDAQLTDISQKMFGDWGVIQNAIIQNIKNVAPARKRKESEEDYEKRISDIFKKADSFSLRYINDCLNEMDEKNPYTVQWYFSTLGAVNTPTMQRENLFALIQNAYTDISDLLNSQYPTDKNLSQDKTNVAKVKALLDAIKSLQHFVKPLLGRGDESDKDERFYGELASLWTELDTVTPLYNMVRNYMTRKPYSEKKIKLNFENPQLLGGWDANKEKDYASIILRRNGLYYLAIMNKESKKLLGKTMPSDGECYEKMVYKLLPGANKMLPKVFFSKSKIDYFKPSKQIVENYNNDTHKKGKNFNINDCHDLIDFFKQSIDIHEDWSKFGFKFSDTSTYKDLSGFYREVEQQGYKLSFTKVSVSFIDKLVDDGKMYLFQIYNKDFSKYSKGTPNMHTLYWKALFDERNLADVVYKLNGQAEMFYRKKSIVYTHPTHPANHPILNKNKENKKKESVFEYDLVKDRRYTVDKFLLHVPITMNFKSVGSENINQQVREYLQQAEDTHIIGIDRGERHLLYLVVIDMQGNIKEQYTLNEIVNEYNGNTYRTNYYDLLNTREEERLTARQSWQTIENIKELKEGYLSQVIHKITQLMVKYHAVVVLEDLNKGFMRGRQKVEKQVYQKFEKMLIDKLNYLVDKKADAAQLGGLLNAYQLTSKFDSFQKLGKQSGFLFYIPAWNTSKIDPVTGFVNLLDTRYQNTEKAKAFFSKFDAIRYNADKDWFEFYLDYDKFGTKAEGTRTKWTLCTQGYRIRTFRNADKNSQWDNQDVDLTKELKALFEIYHINIGGNLKEGICSQTDKAFFTGLLHILKLTLQMRNSITGTETDYLVSPVADENGVFYDSRSCGDTLPKNADANGAYNIARKGLMLIEQIKETKDLANFKYDISNKAWLNFAQQKPYEK

SEQ ID NO: 1614 - protein, 1254 aa, unidentified
  REGION 1..1254: note = Description of Unknown: uncultivated organism sequence
  REGION 1..1254: note = Category: MG75 effectors
  REGION 1..1254: note = Description: MG75-100 effector
MKKNMKRKFDDFIHLYSLSKTLRFEARPIGDTLRNFKKNGLLERDKHRAESYVKVKKLIDEYHKAFIDRVLNGSVLNYVNKGKYDSLTEYYDLYSVPRKDEASQKHFKAIQQHLRQQIVKKLTDDKDYKHLFGKELLESYKDKGDKKKLNEADLVQFINAANPKQLHTLSKKEAIDLVQEFSGFTTYFNEFHKNRKNMYSAEEKSTGIAYRLINENLPKFIDNMKSFKKIVDIPEMKDNLKQIHEYFVDYLNVENIHEMFQLDYYNQLLTQKQIDVYNAIIGGKTDNEHKEKIKGINEYVNLYNQTHKDAKLPKLKVLFKQILSDRNAISWLPEEFKDDQEVLNAIKDCYARLSKNVLGDNILKELLCSLAEYDTKGIFLRNDLQLTDISQKMFGNWSVIPSAIKNDKDVAFKKQDSFSIDYIDACLDKFVDNNTHTIEGYFATLGAVDTQTTQLENIFAQIKNAYTGIESLLNSAYPEDKNLSQDKDNVAKIKLFLDALMSLMHFVKPLLGKGDESNKDEKFYGDFTLLWTELETVVPLYNMVRNYMTRKPYSKSKIKLNFDNSQLLGGWDANKESDYASILLRRDGKYYLAIVDKDSKKLLGKSMPSDGECYEKMVYKLLPGANKMLPKVFFATSRIKDFKPSEQLLENYNKGTHKKGVNFSISDCHALIDYFKQSINKHEDWKNFNFNFSETSTYEDLSAFYREVEQQGYKITFTNVSVAFIDKLVKEGKMYLFQIYNKDFSEYSKGTPNMHTLYWKALFDDRNLKDVVYKLNGQAEMFFREKSIKVSTIHPANCPIQNKNKDNKKKESIFEYSLIKDRRYTVDKFMFHVPITMNFKSADTENINLPVREYLQTSDDTHIIGIDRGERHLIYLVVIDLQGNIVEQYTLNDIVNEYNGNTYRTNYHDLLDAREHDQLKARQNWQTIENIKELKEGYLSQVIHKITQLMIKYHAIVVLEDLNKGFMRGRQKVGKQVYQKFEKMLIDKLNFLVDKKADIESVGGLLNAYQLTNKLESFKNLGKQSGFLFYIPACNTSNIDPVTGFVNLLDTRSQNAKAFFDKFDSIRYNKEKDWFEFALDYNNFGNKAEGTRTKWTLCTQGKRIKTFRNAEKNSNWDYQIIDLTIELKQLFAHYNIDINGNLKKAISNQTEKTFFVELMQLLKLTLQMRNSITNTETDYLVSPVADENGNFYDSRKCGSSLPENADANGAFNIARKGLMIIEQIKASDDLSKLKFDISNKSWLNFAQQKPYKHE

SEQ ID NO: 1615 - protein, 1250 aa, unidentified
  REGION 1..1250: note = Description of Unknown: uncultivated organism sequence
  REGION 1..1250: note = Category: MG75 effectors
  REGION 1..1250: note = Description: MG75-101 effector
MKRKFDDFIHLYSLSKTLRFEARPIGDTLRNFKKNGLLERDKHRAESYVKVKKLIDEYHKVFIDRVLNGSVLNYVNKGKYDSLTEYYDLYSVPRKDEASQKHFKAIQQHLRQQIVKKLTDDKDYKHLFGKELLESYKDKGDKKKLNEADLVQFINAANPKQLHTLSKKEAIDLVQEFSGFTTYFNEFHKNRKNMYSAEEKSTGIAYRLINENLPKFIDNMKSFKKIVDIPEMKDNLKQIHEYFVDYLNVENIHEMFQLDYYNQLLTQKQIDVYNAIIGGKTDNEHKEKIKGINEYVNLYNQTHKDAKLPKLKVLFKQILSDRNAISWLPEEFKDDQEVLNAIKDCYARLSKNVLGDNILKELLCSLAEYDTKGIFLRNDLQLTDISQKMFGNWSVIPSAIKNDKDVAFKKQDSFSIDYIDACLDKFVDNNTHTIEGYFATLGAVDTQTTQLENIFAQIKNAYTGIESLLNSAYPEDKNLSQDKDNVAKIKLFLDALMSLMHFVKPLLGKGDESNKDEKFYGDFTLLWTELETVVPLYNMVRNYMTRKPYSKSKIKLNFDNSQLLGGWDANKESDYASILLRRDGKYYLAIVDKDSKKLLGKSMPSDGECYEKMVYKLLPGANKMLPKVFFATSRIKDFKPSEQLLENYNKGTHKKGVNFSISDCHALIDYFKQSINKHEDWKNFNFNFSETSTYEDLSAFYREVEQQGYKITFTNVSVAFIDKLVKEGKMYLFQIYNKDFSEYSKGTPNMHTLYWKALFDDRNLKDVVYKLNGQAEMFFREKSIKVSTIHPANCPIQNKNKDNKKKESIFEYSLIKDRRYTVDKFMFHVPITMNFKSADTENINLPVREYLQTSDDTHIIGIDRGERHLIYLVVIDLQGNIVEQYTLNDIVNEYNGNTYRTNYHDLLDAREHDQLKARQNWQTIENIKEVKEGYLSQVIHKITQLMIKYHAIVVLEDLNKGFMRGRQKVGKQVYQKFEKMLIDKLNFLVDKKADIESVGGLLNAYQLTNKLESFKNLGKQSGFLFYIPAWKTSNIDPVTGFVNLLDTRSQNAKAFFDKFDSIRYNKEKDWFEFALDYNNFGNKAEGTRTKWTLCTQGKRIKTFRNAEKNSNWDYQIIDLTIELKQLFAHYNIDINGNLKKAISNQTEKTFFVELMQLLKLTLQMRNSITNTETDYLVSPVADENGNFYDSRKCGSSLPENADANGAFNIARKGLMIIEQIKASDDLSKLKFDISNKSWLNFAQQKPYKHE

SEQ ID NO: 1616 - protein, 1274 aa, unidentified
  REGION 1..1274: note = Description of Unknown: uncultivated organism sequence
  REGION 1..1274: note = Category: MG75 effectors
  REGION 1..1274: note = Description: MG75-102 effector
MAKNFEDFKRLYPLSKTLRFEAKPIGATLDNIVKSGLLEEDEHRAASYVKVKKLIDEYHKVFIDRVLADGCLPLENEGHNNSLAEYYDSYVSKSQNEDAKKAFEENQQNLRSIIAKKLTEDKAYANLFGKNLIESYKDKTDKTKIIDSDLIQFINTAESTQLNSMSQDEAKELVKEFWGFTTYFVGFFDNRKNMYTAEEKSTSIAYRLINENLPKFIDNMEAFKKAIARPEIQANMGELYSNFSEYLNVESVPEMFQLDYYNMLLTQKQIDVYNAIIGGKTDDEHDVKIKGINEYINLYNQQHKDDKLPKLKALFKQILSDRNAISWLPEEFNSDQEVLNAIKDCYERLSENVLGDKVLKSLLDSLADYSLDGIFIRNDLQLTDISQKMFGNWGVIQNAIMQNIKHVAPARKHKESEEDYEKRIAGIFKKADSFSISYINDCLNEADSNNAYFVENYFATFGAVNTPTMQRENLFSLVQNAYTEVAALLHSDYPTAKHLAQDKANVAKIKALLDAIKSLLHFVKPLLGKGDESNKDERFYGELASLWAELDTVTPLYNMIRNYMTRKPYSQKKIKLNFENPQLLGGWDANKEKDYATIILRRDGLYYLAIMNKESKKLLGKAMPSDGECYEKMVYKLLPGANKMLPKVFFAKSRMEDFKPSKELVEKYNNGTHKKGKNFNIQDCHNLIDYFKQSISKHEDWGKFGFNFSDTSTYEDLSGFYREVEQQGYKLSFARVSVSYISQLVEEGKMYLFQIYNKDFSEYSKGTPNMHTLYWKALFDERNLADVVYKLNGQAEMFYRKKSIENTHPTHPANHPILNKNKDNKKKESLFDYDLIKDRRYTVDKFMFHVPITMNFKSSGSENINQDVKAYLRHADDMHIIGIDRGERHLLYLVVIDLQGNIKEQYSLNEIVNEYNGNTYHTNYHDLLDVREDERLKARQSWQTIENIKELKEGYLSQVIHKITQLMVKYHAIVVLEDLNKGFMRGRQKVEKQVYQKFEKMLIDKLNYLVDKKADASVSGGLLNAYQLTSKFDSFQKLGKQSGFLFYIPAWNTSKIDPITGFVNLLDTRYQNVEKAKVFFSKFDAIRYNKDKDWFEFNLDYDKFGKKAEGTRTKWTLCTRGMRIDTFRNKEKNSQWDNHEVDLTAEMKSLLEHYYIDIHGNLKDAISAQTDKAFFTGLLHILKLTLQMRNSITGTETDYLVSPVADENGIFYDSRSCGDELPENADANGAYNIARKGLMMIEQIKEAKDLDNLKFDISNKSWLNFAQQKPYKNG

SEQ ID NO: 1617 - protein, 1254 aa, unidentified
  REGION 1..1254: note = Description of Unknown: uncultivated organism sequence
  REGION 1..1254: note = Category: MG75 effectors
  REGION 1..1254: note = Description: MG75-103 effector
MKFEDFTGLYPVSKTLRFEARPVGDTLKNIIKRGILEQDTHRAESYQKVKKLMDEYHKAFIDSVMSNFRFSCEDLEEYFVLYANKSDNDESKNKYTELQKKMRESVSKALKGDERFKKINKKELIKEDLYAFIREAGESQLVGLTREQAEELLLEFKDFSTYFGGFYQNRANMYVPDEKSTSIAYRLVNENLPRFVDNIDVFNKITSIPELRDNVKTIYDAFKEYLNVVELSNIFDVTFYSEVLTQKHIDLYNSIIGGRTDNESSKKIHGLNEYINLYNQTHKDEKLPKFKVLYKQILSDRVAVSWLPEAFSNDKETLCAIRDCYSGLEEHILGEKDLKILLESLDKFDLCGVFISNNKQLLSEISQKLYGNWKTIENAVRRHFEETSPQNVKKENEEKYRERISKIIKRYESFSIADLNEWVKKSDPDESRRIEDYFASLGVVNSENEQKEDLFSRVANVYIDVADLLFSDYPDGKRLAQDSKDVEKIKNLLDAIKELQWFVKPLNGSGDENNKDERFYGEFSMLWAELESFSLLYDKVRNYMTKKTYSQDKIKLNFANATLLKGWDRNKEVDNACVILRRNGLYYLGIMDKKYRRSFEGNYLCEGDVYEKMVYKLLPDPKKMLPKVFFSKSREKDFNPSDSILRIHKGETYKAGPQFKIEDCRELIDFYKKSISLHEDWKNFGFEFSDTSTYDDLNGFYREVEQQGYKITFKNVSVSYVEKLVGEGKLYLFQLYNKDFSSYSKGTPNIHTLYWKALFDEKNLLNVVYKLNGEAELFFRKKSINITNPTHPANVSVANKNKLNQKRESLFDYDLIKDRRYTIDKFLFHVPITMNFKSKGRPQIEQLVRGYLHSAENTHIIGIDRGERHLLYVSVIDSHGNIKEQFSLNEIINENAGNVYVTDYHALLDTKETERKEARQSWQTIENIKELKEGYLSQAVHKVTQLMIKYNAVIVLEDLNMGFMRGRQKVEKQVYQKFEKMLIDKLNYLVDKKVCVDAPGGVFHAYQLTSKFESFAKLGKQSGFLFYIPAWNTSKIDPITGFVNLFELKCDSIDRTKLFFSKFKSIRYNQRSDWFEFAFDYNDFTSKAAGTKTEWIITTHGTRIINFRNPQKNNQWDSNEVVLTDEFKSLFARYSIDFSGNLKEGITMQTDKSFFEGLLNYFKLTLQMRNSVTGTDVDYLISPVADGNGMFYDSRNCADSLPKNADANGAYNIARKGLMLIKQIKMSNDFKTVKLDITNKAWLEFAQKKPYLND

SEQ ID NO: 1618 - protein, 1274 aa, unidentified
  REGION 1..1274: note = Description of Unknown: uncultivated organism sequence
  REGION 1..1274: note = Category: MG75 effectors
  REGION 1..1274: note = Description: MG75-104 effector
MAKNFEDFKRLYPLSKTLRFEAKPIGATLDNIVKSGLLDEDEHRAESYVKVKKLIDEYHKVFIDRVLDNGCLPLKNEGHNNSLTEYYDSYVSKSQNEDAKKAFEENQQNLRSIIAKKLAEDKAYANLFGKNLIESYKDKTDKTKIIDSDLIQFINTAESTQLNSMSQDEAKELVKEFWGFTTYFVGFFDNRKNMYTAEEKSTGIAYRLINENLPKFIDNMEAFKKAIARPEIQANMEELYSNFSEYLNVESIQEMFLLDYYNMLLTQKQIDVYNAIIGGKTDDEHDVKIKGINEYINLYNQQHKDDKLPKLKALFKQILSDRNAISWLPEEFNSDQEVLNAIKDCYERLSENVLGDKVLKSLLGSLADYSLDGIFIRNDLQLTDISQKMFGNWGVIQNAIMQNIKRVAPARKHKESEEDYEKRIAGIFKKADSFSISYINDCLNEADPNNAYFVENYFATFGAVNTPTMQRENLFALVQNAYTEVASLLHSYYPAEKKLAQDKANVAKIKALLDAIKSLQHFVKPLLGKGDESDKDERFYGELASLWAELDTVTPLYNMIRNYITRKPYSQKKIKLNFENPQLLGGWDANKEKDYATIILRRNGLYYLAIMDKDSRKLLGKAMPSDGECYEKMVYKLLPGANKMLPKVFFAKSRMDDFKPSKELIEKYNNGTHKKGKNFDIQDCHNLIDYFKQSIDKHEDWSKFGFNFSDTSTYEDLSGFYREVEQQGYKLSFARVSVSYINQLVEEGKMYLFQIYNKDFSEYSKGTPNMHTLYWKALFDERNLADVVYKLNGQAEMFYRKKSIENTHPTHPANHPILNKNKDNKKKESLFEYDLIKDRRYTVDKFMFHVPITMNFKSVGSENINQGVKEYLHHADDMHIIGIDRGERHLLYLVVIDLQGNIKEQYSLNEIVNEYNGNTYHTNYHDLLDAREDERLKARQSWQTIENIKELKEGYLSQVIHKITQLMVKYHAIVVLEDLNMGFMRGRQKVEKQVYQKFEKMLIDKLNYLVDKKADASVSGGLLNAYQLTSKFDSFQKLGKQSGFLFYIPAWNTSKIDPVTGFVNLLDARYQNVEKAKAFFSKFDAIRYNKDKDWFEFNLDYDKFGKKAEGTRTKWTLCTRGMRIDTFRNKEKNSQWDNQEVDLTAELKSLLEHYYIDIHGNLKEAISAQTDKAFFTGLLHILKLTLQMRNSITGTETDYLVSPVADENGIFYDSRSCGDELPENADANGAYNIARKGLMMIEQIKNAEDLGNLKFDISNKAWLNFAQQKPYKNG

SEQ ID NO: 1619 - protein, 1257 aa, unidentified
  REGION 1..1257: note = Description of Unknown: uncultivated organism sequence
  REGION 1..1257: note = Category: MG75 effectors
  REGION 1..1257: note = Description: MG75-105 effector
MKYTDFTGIYSVSKTLRFELIPQGSTVENMKREGILNNDMHRADSYKEMKKLIDEYHKAFIERCLSDFSLKYDDTGKHDSLEEYFFYYEQKRNDKTKKIFEDIQVALRKQISKRFTGDTAFKRLFKKELIKEDLPSFVKNDPVKTELIKEFSDFTTYFQEFHKNRKNMYTSDAKSTAIAYRIINENLPKFIDNINAFDIVAKVPEMQEHFKTIADELRSHLQVGNDIDKMFNLQFFNKVLTQSQLDVYNAVIGGKSEGNKKIQGINEYINLYNQQHKKARLPMLKLLYKQILSDRVAISWLQDEFDNDQDMLDTIEAFYNKLNSNETGVLGEGKLKQILMGLDGYNLDGVFMRNDLQLSEVSQRLCGGWNIIKDAMTSDLKRSVQKKKKETDADFEERVSKLFSAQNSFSIAYINQCLGQAGIRCKIQDYFACLGAKEGENEAETTPDIFDQIAEAYHGAAPILNARPSSHNLAQDIEKVKAIKALLDALKRLQRFVKPLLGRGDEGDKDNFFYGDFMPIWEVLDQLTPLYNKVRNRMTRKPYSQEKIKLNFENSTLLNGWDLNKEHDNTSVILRREGLYYLGIMNKNYNKIFDANNVETIGDCYEKMIYKLLPGPNKMLPKVFFSKSRVQEFSPSKKILEIWESKSFKKGDNFNLDDCHALIDFYKDSIAKHPDWNKFNFKFSDTQSYTNISDFYRDVNQQGYSLSFTKVSVDYVNRMVDEGKLYLFQIYNKDFSPQSKGTPNMHTLYWRMLFDERNLHNVIYKLNGEAEVFYRKASLRCDRPTHPAHQPITCKNENDSKRVCVFDYDIIKNRRYTVDKFMFHVPITINYKCTGSDNINQQVCDYLRSAGDDTHIIGIDRGERNLLYLVIIDQHGTIKEQFSLNEIVNEYKGNTYCTNYHSLLEEKEAGNKKARQDWQTIESIKELKEGYLSQVIHKISMLMQRYHAIVVLEDLNGSFMRSRQKVEKQVYQKFEHMLINKLNYLVNKQYDATEPGGLLHALQLTSRMDSFKKLGKQSGFLFYIPAWNTSKIDPVTGFVNLFDTRYCNEAKAKEFFEKFDDISYNDERDWFEFSFDYRHFTNKPTGTRTQWTLCTQGTRVRTFRNPEKSNHWDNEEFDLTQAFKDLFNKYGIDIASGLKARIVNGQLTKETSAVKDFYESLLKLLKLTLQMRNSVTGTDIDYLVSPVADKDGIFFDSRTCGSLLPANADANGAFNIARKGLMLLRQIQQSSIDAEKIQLAPIKNEDWLEFAQEKPYL

SEQ ID NO: 1620 - protein, 1142 aa, unidentified
  REGION 1..1142: note = Description of Unknown: uncultivated organism sequence
  REGION 1..1142: note = Category: MG75 effectors
  REGION 1..1142: note = Description: MG75-106 effector
MARIFEDFKRLYPLSKTLRFEAKPIGATLDNIVKSGLLDEDEHRAESYVKVKKLIDEYHKVFIDRVLDNGCLPLKNEGHNNSLTEYYDSYVSKSQNEDAKKAFEENQQNLRSIIAKKLTEDKAYANLFGKNLIESYKDKTDKTKIIDSDLIQFINTAESTQLNSMSQDEAKELVKEFWGFTTYFVGFFDNCKNMYTAEEKSTGIAYRLINENLPKFIDNMEAFKKAIARPEIQANMEELYSNFSEYLNVESIQEMFLLDYYNMLLTQKQIDVYNAIIGGKTDDEHDVKIKGINEYINLYNQQHKDDKLPKLKALFKQILSDRNAISWLPEEFNSDQEVLNAIKDCYERLSENVLGDKVLKSLLGSLADYSLDGIFIRNDLQLTDISQKMFGNWGVIQNAIMQNIKRVAPARKHKESEEDYEKRIAGIFKKADSFSISYINDCLNEADPNNAYFVENYFATFGAVNTPTMQRENLFALVQNAYTEVASLLHSYYPAEKKLAQDKANVAKIKALLDAIKSLQHFVKPLLGKGDESDKDERFYGELASLWAELDTVTPLYNMIRNYITRKPYSQKKIKLNFENPQLLGGWDANKEKDYATIILRRNGLYYLAIMDKDSRKLLGKAMPSDGECYEKMVYKLLPGANKMLPKVFFAKSRMDDFKPSKELIEKYNNGTHKKGKNFDIQDCHNLIDYFKQSIDKHEDWSKFGFNFSDTSTYEDLSGFYREVEQQGYKLSFARVSVSYINQLVEEGKMYLFQIYNKDFSEYSKGTPNMHTLYWKALFDERNLADVVYKLNGQAEMFYRKKSIENTHPTHPANHPILNKNKDNKKKESLFEYDLIKDRRYTVDKFMFHVPITMNFKSVGSENINQGVKEYLHHADDMHIIGIDRGERHLLYLVVIDLQGNIKEQYSLNEIVNEYNGNTYHTNYHDLLDAREDERLKARQSWQTIENIKELKEGYLSQVIHKITQLMVKYHAIVVLEDLNMGFMRGRQKVEKQVYQKFEKMLIDKLNYLVDKKADASVSGGLLNAYQLTSKFDSFQKLGKQSGFLFYIPAWNTSKIDPVTGFVNLLDARYQNVEKAKAFFSKFDAIRYKRIRTGLSLISTMTSLVKKQKVQGLSGFYAPEECVLILSEIKKKTHNGIIRKLT

SEQ ID NO: 1621 - protein, 506 aa, unidentified
  REGION 1..506: note = Description of Unknown: uncultivated organism sequence
  REGION 1..506: note = Category: MG75 effectors
  REGION 1..506: note = Description: MG75-107 effector
MHTLYWRMLFDERNLEDVVYSLNGGAEVFFRKASINVSHPTHPANIPIKKKNLKHKDEERILKYDLIKDKRYTIDQFQFHVPITMNFKVAGNGNININQKAIDYLRSASDTHIIGIDRGERNLLYLVVIDGNGKICEQFSLNEIEVEYNGEKYSTNYHDLLNVKENERKQARQSWQSIANIKDLKEGYLSQVIYKISELIVKYNAIVVLEDLNAGFMRGRQKVEKQVYQKFEKKLIEKLNYLVFKKQSSDLPGGLMHAYQLANKFESFNTLGKQSGFLFYIPAWNTSKMDPVTGFVNLFDVKYESVDKAKSFFSKFDSIRYNVERDMFEWKFNYGEFTKKAEGAKTDWTVCSYGNRIITFRNPDKNSQWDNKEINLTENVKLLFERFGIDLSSNLKDEIMERTEKEFFIELISLFKLVLQMRNSWTGTDIDYLVSPVCNENGEFFDSRNVDETLPQNADANGAYNIARKGMILLDKIKKNNGEKKLALSITNREWLSFAQGCCKNG

SEQ ID NO: 1622 - protein, 1274 aa, unidentified
  REGION 1..1274: note = Description of Unknown: uncultivated organism sequence
  REGION 1..1274: note = Category: MG75 effectors
  REGION 1..1274: note = Description: MG75-108 effector
MAKIFEDFKRLYPLSKTLRFDAKPVGATLDNIVKSGLLEEDEHRAASYVRVKKLIDEYHKVFIDRVLDNGCLPLENKGENNSLAEYYDSYVSKSQNEDAKKAFEENQQNLRSIIAKKLTGDKAYANLFGKNLIESYKDKKDKKKIIDSDLIQFICTAEATQLDSMSQDEAKEIVKEFWGFTTYFVGFFDNRKNMYTAEEKSTGIAYRLINENLPKFIDNMEAFKKAIARPEIQANMGELYSNFSEYLNVESVPEMFQLDYYNMLLTQKQIDVYNAIIGGKTDDEHDVKIKGINEYINLYNQQHKDDKLPKLKALFKQILSDRNVISWLPEEFNSDQEVLNAIKDCYERLSENVLGDKVLKSLLGSLADYSLDGIFIRNDLQLTDISQKMFGNWGVIQNAIMQNIKHVAPARKHKESEEDYEKRIADIFKKADSFSISYINDCLNEADPNNAYFVENYFATLGAVDTPTMQRENLFALVQNAYTEVAALLHSDYPTAKNLAQDKANVSKIKALLDAIKSLQHFVKPLLGKGDESDKDERFYGELASLWAELDTVTPLYNMIRNYMTRKPYSQKKIKLNFENPQLLGGWDANKEKDYATIILRRDGLYYLAIMNKESKKLLGKAMPSDGECYEKMVYKLLPGANKMLPKVFFAKSRMEDFKPSKELVEKYNNGTHKKGKNFNIQDCHNLIDYFKQSISKHEDWGKFGFNFSDTSTYEDLSGFYREVEQQGYKLSFARVSVSYISQLVEEGKMYLFQIYNKDFSEYSKGTPNMHTLYWKALFDERNLADVVYKLNGQAEMFYRKKSIENTHPTHPANHPILNKNKDNKKKESLFDYDLIKDRRYTVDKFMFHVPITMNFKSSGSENINQDVKAYLRHADDMHIIGIDRGERHLLYLVVIDLQGNIKEQYSLNEIVNEYNGNTYHTNYHDLLDVREEERLKARQSWQTIENIKELKEGYLSQVIHKITQLMVKYHAIVVLENLNMGFMRGRQKVEKQVYQKFEKMLIDKLNYLVDKKADASVSGGLLNAYQLTSKFDSFQKLGKQSGFLFYIPAWNTSKIDPVTGFVNLLDTRYQNVEKAKVFFSKFDAIRYNKDKDWFEFNLDYDKFGKKAEGTKTKWTLCTRGMRIDTFRNKEKNSQWDNHEVDLTAEMKSLLEHYYIDIHGNLKDAISAQTDKVFFTGLLHILKLTLQMRNSITGTETDYLISPVADENGIFYDSRSCGDELPENADANGAYNIARKGLMLVEQIKGAENLDNVKFDISNKAWLNFAQQKPYKNG

(The sequence listing continues in the following parts.)
